United States Patent Application Publication US 2008/0114160 A1 - sequence listing, part 56

SEQ ID NO: 18650 - DNA, 7613 bp, Oryza sativa
attagatagatggtttaagtctatagcaaaacagcaaagttagtctattccaaagcttttgcgcactagttagccacaatcttgtaaataccctattactttatgtaataatatctccttcaaagctatgtctaaatgtatgtaaagacgatccagattattgaaattgtatcaatctactgatctagggcttgatacaattttaatatgtcggttaccgaatcattagttttgggacccgacagtttcctatatgtaggtaattttcagggcaacatattggcttcgacagtgggttcaactacaaaagtatgaggaagatggagttttcctgaatgttgcatgtcgtaatcttgaaacaatggttatgcaacttttcgccaactatggatggagattcaccaatagactggaatattgttttccttgtcatgttaggtcttctttaaattttggttggttggcttgctttattttggactacgtctttttaagtttgctactttttgtaataattagctgtagctcttcggaataaaggccgggatgttacattccattattaaaaaaaattatgggattaggaacatattgggcatgtgttgatgatgatccaaggacgtgtgttgttccatgcctaaaccaaccacaccaacataaaatgctcaatgcaaaaatactcaagttttatttggtttgttgtcaaagatttgacaatggagtcattgtagtaaggctaaaggcccctttattggtaggaaaaacataaaaaacttaaagttctataggaaatactcataggaagacctttaaataaacgattgagtaatatactttcctttgaaattcttatgaaataggtaattttatagagattttaaagaaaagtaaagaatgaactttaacctcttaaaaattacctttaaggttatctcactcatccgatcgagcagtttttcttactgtctatttataaacgagcatcctgtctaatccgaaatttgacaaaatgaactttgcctaacagaaatcctctgtgtttagttcacgataaaattaaaagtttgattgaaattggaacgatgtaacggaaaagttggaagtttgtgtgtgtaggaaagttttgatgtgatgaaaaagttagatgtttgaagaaaaagtttggaactaaacaagggatgaagctattgcttgaggtgttgtttggatctgacgaaaaagattaagtgatagacacgtaaaacgtgaaagccattaatgcatcattaattaaattttaattattacaaacttgagaaaatggatttatttaatattagaaagcaacttgtatataacgaaatacagtttttagctgtttgaaaaatgtgctaatgaaaaacaaggtaaaatttatatttaattaatcaagtagatcaaggccgtagtactatcttttacggtggtactacctttacaggctttctttggttgaagctgccaactcaatttccttgttttttacgtgcacactttttaaacaattaaatcattaaatgatacgttgtttacgaaaaaaaatatacacaaaagttgtttaaaaatcgtaataatctatttttagaaagaatagccagtacttaattaattatgtactaataagttgctttgttttacgtgcacgatggatgaattcccaacccaaataacaaactcaggcagtagtacagacagtgtttagttccttcaaacctctaaaaattccgtcacatcaaatgtttggacacatgcgtggagtattaaatatggatgaaaaaaaactaattacacagtttgcatgtaaattgcgagacgaatcgtttaagcctaattaagctatgatttgacaatgtgatgctacagtaaacatttgctaatgacggattaattaggcttaataaattcgtctcgcaatttataggcggaatctgtaatctgttttgttattagtctatatttaatactttaaatgtgtgtagttgaagattgaactaaccaacataaaagaaaaaaaatatcggagagagtaactttggcttgcagagcacaattaactctggcttgcagtgtactacacaattccaagaagccccaatccaaaataaaaaaaactagagaggggccaatccacaaaagacacaagactattgttgaccagttgaccgaccccccttcctcggcgacatcgtctatattacgatttgcccccaaaaacccccaactctcccgcttcatcgtttccaccggagaaaaaccctcgaacgccgcgccgcccatggcctccgccaccgccgccggcgacgcctccgccgcggcgttctggacggcgtgcccgcactgctgctacgtccactcctacccgcgccactacgccgggcgccgcctccgctgcccgaccgccgcctgccgccgcgccttctccgccgccgagctccccgccgcgccgcccatcgtcccgggcaccgacatgtacttctgcacctgggccttcttcccgctcggcccccccgccgccgccgccgacgggtgggcccccttcacccccttcaactccgccccgaccccctcccctccccccgccaccgccgccgcccccgcccccgcccccgctcgcgccggtggccccacgtcgaggaagaagatgtgcgtgtccctcaaggggagggcccgcgtggaggcggagcaggaggaggaggaggaggaggccgcggccgccgccaccatcatcgatctcgagccggaggtgcaggagggcgggattggcgagaagggcttcaccggcatcaacctcaacgagtcggtggagctgagcgagctggggttccgcgacgacgagatcgagctcttcaccgccatgtcctgaattcgtgatcgctggggaaggtggtgaaaaaggttgtgcgccttctgatcataatatcatatactcaatgcttagtactactaactgctcaacatggtggatggtttgaaaaaattgggatagtaaccagtaatataatcttcgtatctgtgtagttatcaaggttttagtttcttatgatggaatgtaggcctttagggcttagcaatgcatagtttttggttatcttaatggcacaaggctatggtatgaaggtgatcgcgcatagtggtggaaatggcaaatgtggatccttttggttggacttggaagtgtaaagtgggttttatgtcttttggtgctggaaaatgtccactttatggccccaatatatataaattttagtttttagtttcagcttgttctgtttgtgcacggttttgtcggatggtgatatcaacttgagattatcctctggtttattgttgttgatttaatcactagaatggaacacaaagtttcatgcttgcttgcactcatttgcctttggtgtgtgagtttctgatgccctgaggatttctgatgatcagttcgttcagttcttgtgtcggagccctgcagctgaatgcgaccaaattctttcagtgactgttgtgtcttaaattggatatccaaggtgctatgttatccaactggggataggataacacagcgccacaattttcagtctgtgatctttgacatcttcatcagtagaactgtcaaattttgcaggccaatgttgtgagtttgatatggccaccattcactcaccatttatccttgttttcactatttgtatttcgttgtttcaaaaaaaatatttgtatttcagctagtgagaaatgaatggtataaaagtatagtatggccaaatcagatataatctttccagcataattcacaaaaagtggggggatacaatacacagttctgcttcagattagtatagttggtgcttttttttttccaccacttgtgactatttggctagaagttgtggctttaaacaatgtgcttcaaacattgtgtataggtgctagtggggaaaaaaatggagctatgttacttcaattcctgcctgtgaaaaaatatttgtttcctcaaaatctgatggtttaagctgagccatcatttcactgtctgactcctgagttacagagtggagctagaacttctggtacgcaaaaaccacatggaattcactaacatgtagtaccaatgtacattatgtagtaccatacaactcgcatcgctttcattatggacatatcttctgtgttttcgctgtatccattctgtcaggacaagaatccggccaaattaaaagccatgcaaactgacaagagtatgatctgtcgtaaatgttcaagattttgttttattttctctgctgtgattagagtcattctccattcttgtaatggggtgtacatgaactgcagcctgcaggtatttattttgttcagtgtgacgtataaataatgttggcaattaccgggtcactgtttatgatttttcagtgctgctagatcaagtttgctcttccgggctagtaatatttgacgatttcttcagttgtttgtgtaattctcgtaaaaacctgtacaatttacaggaagcaaacaccgcttcagatcgcatggactgggctttggcccatgcctaatgaataattatacctacagtgggccagatttggcccattgcaaattgttactggcgaaagcataattagacttcggacgtcggcgatggataagttgccgcaaaatttgtaactttgttttttggatttttctacacgtcttaaattttcttcagtaacttggttaaacacaaatacaatataattacattgtaacttacattttactatagtataatttttatatataactttaacatagttttggacagttagatttgctcagattcatgcaaatatggaaagaaaatattaatgtgttcaattgctcatggatgaggactttttgggggaaaaattcggatatataagattccctccgtcccaaaatatagtaatttttaggtggataggacatattctaatactacgaatctagataggggtatatccagattcatagtactagaatatatcacatccaaccaaaagttattatattttaggacggaggcagtagtccctttatttactagtaactccaagagggctcaacaagaaaattataccttcgtctaagttgtgagataatcgggtactactctactataacaaactctgtattttctggaccatagggtactgataatgaccatagggcactctattaaccttaggaggctgtgataattatgtcggccatgcaggagatgagaaccaaaacctaattttttttcataccaacaacatttatttttatacaccctcaacgaaagaaaatcccaatcatcagatttgctgtgattattctcaacatacacgaatattaattttactatcttacagtgaaacgagcgtaacttaactggttagatttcttatggtggaaccagtttatccgagtttaagtcctagacttgatacggagctcagatttatagctaattgtaggtgatatacccgtcaataacgagatgcccatggtgaacttagtcaatcttaaagtatgccggtctagtattataaaggtgctcatacttatgcccgtgatctcaaaatatgaaaaaaaaaaatcagctcagacatccaaaagtactcgtaggggcaagatatgcgtttgtgccttcatgggtgagtccacgcgtattacatgatttttattccctatgtcctaaaatataagggattttggagagatatgacacctaaatatgaataatctgtctagaacaagattatgggcatgtttagtggagcttaagattctgagaagcaactgctaagaagctagctggtgagaatctggagaagctggaaaacccagcttctgtcttctagttcattttccagattctacatctatagattcttagaatcttggtaaaaagatgggttgttagggagagcttttggtagctagagattataggagaagatgcaactgctaaaaactcctttaaataggtccttttagtaatgtgtcacgacctctaaaatcgcttacattttgagacggataggacaagaaaaagcctggaaaatcagaaaaaaaaaaggaagagcgaaaatgacaagattacccctccgccccttccaccttctcgcagccacacctcctcctctttcccctctcctccctctccactccacacgccgtactcgcctccgtcttcccccccgatctgcgggcgcgcgagctcggagcgtccttccccgcgcgcgccgccgccaccgccgagagagtggcctcctcctcctcctcccttccttcccgcgtggcctgggcctgcggttaccccgcgcgcacggccgacgacgactgcgacggcgacgaaggcgagctggtttcggaggggggcgcgacgcggccgacctgctcccccatctggttcgaatcgaaaggtatatcctcgttcttctgtccttggcccttgttccactccaaccttctcgacgccgctggatggatgggcggcttagattcggaatccgtccgatttgggattgggtttcttcccgtcgaattaacgcatccggttctttgtgcatttcgttttattttatgcgtggtagagagtactagtagcatcttgtagcgtgtgtttccgtgaaaacaaaattgatttggttgggggattatgtgatggtgaagccatgaagctcgccgaccactgtcacagtgtgactgcagagagatgggtgagagagggggaggaaagggattgatgagctttccctctgtaggctacttgcgctatcgcaggagatggcttcaaatggatccttgttccattgcaattgttgggttactggagatgactctggagaataagatctgaatgagtaaaatgtggttcgtatcgtgccccttgggtaacccggccatcgattggattgatgttaggttttgcaaaagttgaacttcattttgtagtttaattttgattccctttgtttggcgtgaatgcagtcgtatctctggagaatttttgctgaaacgttaaatgtgttagagcaatcgaatgcttgtcgtggtttactttgtgcgaggatcttttttttgcctcatgctagcatgtgaactgcttatgaaatatgaaccattgctatgttggtgaagaaatctggttataacttttgttgaatgcaatttgtaggtctagtggtaaatgtatgacctgacttgaatagtatcttttcaggtggatgccaatcggttggtcggttaaaaacaactaatttagctgatcctgtggggaagaagtaatggtactgccaggctctaaggagtctcaaaattatgatagcaacaaccagaaggttcatcctcaaccaattgacgaaaacatgaatcagaacatgggctcaatggacaccatgattggaaggatattcaacaatatatcctctttaaagtctgcatacattcagctgcaggaagctcacaccccatatgacccagacaagatccaggctgcagatcagcttgtcatagaggagctcacgaagctctcagagctcaagcatgcttacagagaaaagaatcctaagcctgtagcggcaaca

SEQ ID NO: 18651 - DNA, 2894 bp, Oryza sativa
cttactcaacaaggaatctgaggaatctgatgatgaagacaactacttttccatcgagttgacaccaagtttatttacatctgctgttgataatgcataccaatctatacatgatttttcaaagcctttgatcaacatgatgaaagctgcagggtgggatcttgatgctgctgctaatgcaattgaacctgctgtggtttacacaaggagggctcacaaaaagtatgctttcgagtcatatatttgccaaagaatgtttggtggtttccaagaagagagcttttctgttaaggctgctaacattactgtttccaatgaggctttcttccatcagttccttgcagtacgagccatggatcctttggatgtcttgagccaaaatcctgattcggtttttgggaagttttgcagaagcaagtacctattacttgtgcacccaaaaatggaaggctctttctttggtaacatggatcagagaaactatgtaatgagcggtggccatccgaggacacctttctatcaagcatttctgaagttagcgaagtcgatatggttactgcacaggctggcatactcctttgatccaaaagtcaaggtctttcaagtgaagaaggggagtgacttctccgaaattcacatggaaagtgttgtcaagaacatcatcctagatgaaggtgcagagaggcctaaagttggcctaatggtgatgcctgggttcttgattgggactagtgtcatacaatctcgggtgtatctttcaggtgtcaagtctgctgattgaagctgatgcagttactcgagaagatcaaggctactttgcatcttgcctgatcaaccaatcacattagtacaaggacgattaagggtcttgtgtgtgatgctgctgtcatctctgaaagatgctatagtcagagtgtcggtgaaaaatattgtctttttaaaatttcgagtgccatgctgtttgtatgtttcttcagatagatttcttctgtaatgtaactgtcaaatgtttgtctatatatatgtttatgtgtgttttgactggcatcctaggcgtgtaaacttcctatgatgctcctttgcataatttgtaattcacggctattcaccagaatgtagtatgctctggaaactagtgtgtccatgctttgcacaatcaggctcatataattggggattggttggggtatattgaggatagaacacactgggaagaggatggatgcgcttttgatgtagagatggtgcagtcaaaatttgataccaataatatgaagggtatctaaattgccaggtgtaaatagagccatacaattttcatagatgagtacacagagaccacatgcatctgtacactagctataatgatccacatgcttcttttgagatgaatgtatcagtgctcagcagaggaggtattgtgattatgataaaacgcatagagcatacgtggcctgcatgcacgccataacatcccacacccggttgatggcaccggacacaagcaaagcttggtaatctttgaacggtacactaaccggaaaactgcttaatagcagtcaagttaatctgcatgaggagcctaaagcagcaagagaacgtgtaaattaaacaaggaaccccaaaaaaaaaaagaaaaaacggagaaaaaggggatggttaggggagttactgattgatgatttcggtagaggagatattgtgattgtaggaagacaagacctgattgcatatgctacggtgcaaccagaccagaagcattcacttttaactggggcactcacagcgaaaccaacctcacgccaagccaccattcaagatgggtttgacatgggaaaggtgataacacagatgacagattcatgacttccccaaaaaaaaatcaaatagaaacgaaatgtcgtctaactccacaaacacgagagggtttcatgtacaacatctgccatgcacgcacgctactacagtttatttgacataagctgtaaaagataggaaaatccatcacacttcacaccgaagccatggagatgcagagtatacgtatcaccagacgcttcgaaatgtagtgaaaaagcatgccacggcacagagttagctttccctagtgctgttctttagccactccaggtacttgaggttgcctccttttatgggcagcgcgatgacttcaggaacgctgcattgggaaatcaagtagtgaatctcagatcacgacaagagagaaattttaggtttacgacctgtcagtatatactgacaaacagatgaaaattgatggacagaaaagaacttactcatactcatggttggctttcacgtgttcggtcaacgcatcaagaagagactcccttgtctttatgatgagcagttcttcagcatcagtttgcacctgcaaaaagatatccgctgatcactaaatatctttttacataagggaataggcaaaacgctcattgacctaaaggagtatagtgagagtgcaaagctaaatgaacagctaaagcttgaaatcaacctatcccaaagaaggaatagaaatgtacctttccttcccaccagtaaacagattcaatacctggaaagagggacacagaaaattaaaaactaaataaaatgagtcgatgttaatgtaatgtaagatagaaagtaggccaaaaaatcatgaatcagaataaaactaatagagaggataaatatagatatctcagcttagcaattccattattttgtctctctttagatgaagtcccattatattgcaaagtgcgcgatacacaatagcatgctgccgcatgcatgtaacaacacatcatcgtgtccactccataccacattccagtgcctatgcacaaagaagagctattgccaacagctacagtattttttaataa

SEQ ID NO: 18652 - DNA, 1179 bp, Oryza sativa
attcattaacatcactatgaatgtgggaaatgctagaatgacttacattgtgaaacggaggaagtatattttagccaaattatcataaaactatagatttgagatgatgtatcacaaaattacagatttaattttctcacagaactgcagatttaaggtggactatcacaaaactacaaatttagtaacaaagttatcacaaaagtacaggtctagtgtcacatataaacaatgtacctgcttctttattaggaactgtcacatacacaacaatggaaggcacagtggtggaagtagactccattcgagcagaagctgaagagctgagacttctcaccctgtaaagttcccatactggttatttaccagtccagaaaacaaatccaaagtgactacattactttgatgtaactaggctgtaaatataacaccactcccatcctccatcaaggtaaaaagagtgaagcacttcgcatttaagcacaatcggcacaatagttcctatacatcacttctgtgagcaaccaagaactcaaaccgtccccattcatttcgaatcatatgaccaaatctttgaatcccatcgaatcctatgaacaatagttagcaccggtcaaactgcggaatcctcctagattgattggagaggcgcgttaccctgcgaaggcgccgaggctgaggaagaggagagcgccggcgataggggcgcggcgccggagtaggagcggcgagagcccggcagccgcggcggcgcggcgtggggcggcggtggcggcggcggagagagatccgagcggggaggggaggagtggcatcttctgggagcttcggcctacatgcatgggagttgggcccgcttcggcctttggatgtttgggcttttgggctgagttcggttgggaagatgggaacctaccgaatttttttcggttttagattttttttaaaatatttacagaaataatatatcggcaaaaaaaatttacaaaaatagaccctgccgcccacctctggggcggcaagctgacgtggcaaacgggagaggaacgggcggtgacagagggagggttttttgcaggaaaacccttgccgagggcggcaaggggcccgaatgcaaaaaagccagtcggggccggccattttgcaggcggccccttgccgccctctggccgggcggca

SEQ ID NO: 18653 - DNA, 6226 bp, Oryza sativa
atgtgactattgagttaaatagtgtgtattttttaaaaatttgtttgaataaatgcattatatttttagggttttagttgtactaatctagaagtgcgtattgtagatatcggtaactacgtagatctgctagtttggaatcaatacattaccgttgcattggcttacacaagaagatattacgttgtagatgtttattgcatgaaagagtaatatgatctagttatttcgttgacagatatgtcgaataaacaaatattccaagtttaccatggaccaggaaacgtccgttacgggccaactggggtagatctgtcatattttattgtatcagaaaggggaattgatagaccggctgagaggagtgtaccttctataaaaggatggttaatgaggggtttgagagttgatccacagacaagtgacataacaatcaatgttatagtaagtcgggcaactgagggtttttattgggaactaatgccagttcaaaactctcgagtgtggagatggtatttggaaaatgcattgcaacgcgggtggcctctagctttggttccgtttgttcacccgaaggatccaggtgggcagatgaacatggatgatggcgagggaccaagtgctaaagtaaatgagacttctgtggaggaggtcaacgcacgagaggacgggggcgtagtagctccatgtcacgaccggaaataacccaacgggcgttccttacgtgcgtgtattattccttgtcccaggaggcaaggtacaccaaaagttgatacaatacagagtttaacaagcggaagcgtaaatagttaatttattacatgggcggcgaaggcccagcacacatgaagacaaacgaaaaacagcggaagactagggcgacgaccacaggcgcttgacggcaggcacgagctagacaccaaagccttcatcttccaggaactcctcttctgggtttgggaaaaattgagcaagactgagtacaaccaccgtactcaacaagacacacccacaagtgcagaataaatgcaagggagtacaagggagttataatatagggggttagggtttgcagtaaacagcattaaaaggcacttagttgctcaagctatttggtaaacacgatcctagagctatacaagattattaatcaaggccgtgaacccacacgaacctgccttaacccaaggcctacgatgattcagaccgaactggcaaccaaacccaggtcccagctcgtcccaagccaacccaggccaaccattccatattttagttgttaagcaggttttaagaatttaaaacactaacttgggtacattgctaggcttgcccataaccgagggcgcggctattcgaataggttatactctgatcagaggtgtacatctttactcacaagacatcttcctcacgtgtaaccacgtgccacataccaccacggtatacggacgaaagacgtgacatagttcccaacccatcctagccatagacaagagtaccgacccagccccacctacggccggaacctccgggacaggtaggcaggaccgagcccctagcagcaggacgccagccctgtgccatgacatctcgactaccgggccgcagctcgtgtagccttcatttgtcctagagatgtccatcgacccccgacttcgtccatctccatccgtgtacttttgtttataaccagactgagccacaaactaagccttacccactagacatgtggaagtacggtagtgctttgcaacagaggcccgaagaccggtccttatgtggccgaggtgctactatcaaaaccgtgcaccgcgagcccagcctaaaaccattttgagggttttgaatagagggggaggtgtgaatccaattccacaataatccaaccattccacaatgtccaagtgatatgaatattcccaaagtctagagttataaaaccacctaatgttgcctaattaaacagcgaagcatctacctaaattcctactagtggtaccataaatagagtacccactagttggggttttgtttattctagggtgaacaaggtaataataacaataacaataataataaggtcataacaaaggtaaataggcatggctaaataaaacagtgataacacgggaatttaaataaagcgataatgcaataatttaaatcaaaataattttataaactgggattcaatatgctcaaggatgatgtgacttgccttagtcgctttcccaaacgtcggcttcaacctccacgtagagcggatcttccgaagctgcagcgtctacacgaccaacggaaaggaaaaaggcttttactctaataaactccatataacaagcaggaacaaagcacaaaaatgggttcttgacttcttgaggaaaaattagagacttgaacggtccaattctgagttcaaatggctaagttatggccatttgaagtttatatgttctttaagtgaatatttgcgaatttcttcatttaaattttaatttaaaaaggatttattgcgtcagccgaggggagggggcgcgcggaccgggtccacgggagtggggcccacgcggcagcctcacggtccacggtggactggcgcacccgggctcacaccggccggcgccgtgggccccacgcgtcagccgcacccgagggcgcgggcggctgacggctgggccccacgcggcggccacacggctcgcccggaggcggccaccacggtgcagccggcgggaggcggcgcccgcgcccctatggtcgccggcggcggccataggaacagcggagcggcggccaagaaaggggaagggaagggggaaaagaggcggcggtccacggctcaccccgggtcgacggcgacgacaaaggaggcggccggagcggaggaaggcggcggcgcgactcgggtggatggggacgacggcgctccggcggtcggcgagctcggcgaggtggtggacggggtcggcgacgatgcggcgaagccggagaaggcgacgccgaggcgggagacggtcctggcgagcggagagggccggccggaggtcgtcggcgacggaggagagagagggcgacggcgcgaactcgattccgacggggagacggtgcggcaagtggcggaaacgggcgagggaggcgcagggagggtttaaataggattgggagggagagagggcggccggcggggaaggaaaccagcgcgggaggtccggccgtcatcaatggcaccggcgagatttgcgggagcaaatccggccgtttgaatgcgagagggagagggaaaaatggggggaaagggggaggggatcacggggaataattccccccacttaattgcacacgggggcggcgggatgcggcggattcggcggcggcagcggcgcttggcgcgggcggggcggcggaagcagcaggaggacagggatgacgggtgggccccacccgtctgagggtggcgggcgggcccgcctgtcagcggcgtgcgcgcggggagaggccgaatgggccgcgggggagaggagagagggaggaagggagatgggccggattcggcccatccgaggggagagagatttttagggtttttctttttataaaaccttttcaactttgtttatttcttcttaattattatttgtgctctgaaaattccactaaaatttatttacacattttaggattttaggaattatacaaaaatcctccaagccttatttgacttttaactttgaacattttaatttttggaggctttcacaaggattttaattattctaggcagaattttgaaggatatattttagggtcgttttgggacgtgacactccagtgggcattcaaccaggtggagtggccgacgagggggagactgtcggtgccattgtggatgaaatggagagggaggattctgacaacgagcgtgtagaggaaggtgattcgtcagatgatgagacggatattaatcctgcagaatgggctagtgaggatttttctgggctgatcgtctctgaagaggatagtgtgagatgggagtacaaagaaaatgaggttattcagggagcgatttatagtagagcagaagatatgaaggaggcggtaaaacattttgcagtgtcacttcatagagagttttgggttgccaagtcgaatcggtcgcaatatgaagttcggtgtgttaaggaaaaagatggttgtccctggagagtgcacgcgtataaggggaaatggaaggattattggacagtgtcagtcgttaccaagcatacatgttttctacctggtgttcagaaataccacaggaacattacatgtgcatttgttgcatctgagatgtatgcgcatgtcatcgataatctcacatatgaaccaaggtcaataatccgacacatcaaagagacatacaagtatactattagctatgccaaggcctggagggccaaacagaaaataatagagatgagatttagaacttacgaagcctcgtatgacaatttgccacgcctgtttggtgttatcgaggaaagaaaccctgggagctcttacgaagtgaagaaattcccctcaattgaacatcctggcaagagtgtgctgcaaagggcgttcttagctctacatgcatgcaagatggcattcgtgaattgtcgtcctgttctctgcattgatgggacattcttgacaggaaagtatcggggccagatactaacagcaataggggtagataggaacaatcaggtattgcccttggcatttgcttttgttgagagtgagaataccgacagctggtactggttcctgaaattggttaaaacaaaagttgttggtatgaggccaaatgtgtgcctgatacatgataggcacgctggcattctgcgagtgatagaagagttgcagtttgggagtatggaacgaggataccctggtgtttgggaagatgtacagagtaggtggtgcatgcgtcatatgggagctaatttcttcaagcaattcaagaacaaggagctcatgaacatgttcaagaggctgtgcaatcagaaccaggagaaaaaattcaatgagctttggaagagattagatgagttgacagccaaatgcagtgatcagtgtgcagcggctccatcgaccgccgttgctgaccctcctcaagctcttggacctctcccaacggatagtccaacattggttagaagaactggattggagattcggaaattttctaagtggattctgcatgaaccaaaagagaaatgggccaaggcgtatgacacgggtggtgctagatatggaataatgacaacaaatttggcagaagtttacaactgggtgatgcgcggtgtccgtggactgccactagttggcatagtggagttcattttacatgggacatgcgggtattttagggatcggttccaggcagttcttccctctatgccgaacaacagcattttgtttggaactttcatgcaaaaaaagctagaggagttgcgtaaaaaggccatgaaacatcgagctctagtgcaaggtacccaacagcacaggtttgagatactatgtcaagataaggtaggcaggggtatctaccgcaagagagtgaagcaggagtgtgttctcaaagccgacggcacatgtcattgctcttgtgcaaagccgaagctgctccacaggccatgcacccatgtcattgctgccgcagcggagtgtggcataccagatgcagtatatgtgtcacagtacttcagtaagcaagcaatatatcatacatggagcggcgagatttatgggttcggcatagctggggagttcacagagactaacaatgaagtactcaatattcctgacccatcgaagctccgaggcaaggctggaaggaggaggactcgtcgcatccgcaacgatatggacgagtcggaggctggcagggtgaagcattgcagcaaatgcgatgaacatgggcacacctacaagcattgtcctaaagacaaggagaaaccaggtgcggcggaggcaggactatcaggatcagcagcagatggagctcgccctacgggtgaaggcactacctccactcgaccacgtcctaggcgtcgtcgtgccacgtctggctacgtggtgtagttcttatattctatgttggcatgtggctttgcttgtaattcgtttcgaacttatctatgtgtttatgtttcgtcgtgtaataccctagtccagttagtgtaaattggatctg

SEQ ID NO: 18654 - DNA, 2385 bp, Oryza sativa
aattaaaaaaaaacgaaaaaacgatgttgttgttgccgctcgccacgaccgccggacgcggctgccgccgcccgccggccaccgccggccgcggccttgacacccaccggcccgccggatgagaaggaaagagggggaggaggtggaggagaggggatgaggaagagagttagagaggagagatctgtggagagggggagaaattcgatccgctaagttgtaattgtggaggagaggataagggatagggattatatactacgtgttcaattttaatcacggttagtattaccaaccgggactaaagatctatctagaagatctttagtccttggtgatctttagtcccggttattgacaccaaccgggactaaagattctcggccccctgacatgcatctgataggggatgaactgggactaaagatcatctttagtcccgtactaaggatcaaaatttttataaccgggactaaaaataatctttagtcccggttctttttggaactgggactattgtggattttgccagaccgaccaaagatggttcctccaccagtgttacatactaattacatattaagtggtgtgtaagtgggatgtaactactgtgtaaatttgtaaatatataaataactacccgctgcatacacatacatgcaagtgtgaactcagaaaagcagcgggcagcatatccaattgccataaaactgactgctatggagccaaaaaactggcgacaaaaatatagtaaaaccgtaatttattagtcccacaaactcactctacttgcacaaaatgatacttatcacacatcgtacccaatattctcaagtgcaacaagacaagctttgtacgatagcagcagcagagatctgtgattggcagctgctagctcccaagatcctgttgcagcgacagagagatccacaaactcactctacttgcaccacatgatacttatcacaattcacacatcgtaccaaacattctcaagtgcaccaagacaagctttgtacaatagcagcagcagcagcagagatcagtgattaggctttaaatcactgatcaagatgagtggcgcaacggcggactgggcatggtggctcggcctcgtcgccggcgccgtcccgctgctcgccctcgccgtctggcactgcaccgacgccttccacagcgccgccttcgcgttccgccgccgcgggacacgcgcgaggctccccccgggccacatgggcctgccgttcgtcggcgagaccctcgccctgatctggtacttcaacctcgcccgccgccccgacgccttcatcgaggccaagaggcggcgctactgctacggcgacggcgacgacgacggcggcatctaccggacgcacctgttcggctcgcccgcggtgctcgtctgctcgccggcgtccaacgggttcgtgttccggtcggcgccgcccggcagcttcggcgtcgggtggccggtgccggagctcgtcggcgcctcgtccctggtgaacgtgcacggcggccggcacgccaggctgcgcaggttcgtcctcggcgccatcaacaggccgggctcactccggaccatcgcgcgggtggcgcagccgcgcgtggcggcggcgctgcggtcgtgggcggccaagggcaccatcaccgccgccaccgagatgaagaatgtaaggcgccgtcttaatttgtcaactgagaattcactgggtttgtgtaggtgtagcacctactagtatttaaagaaaagattttacaactacatgcaaattatcatgatttttttaaaaaatatggatatctatcgcactacaaaatttcaatttaaaatatagctcctgtaaagagaaacgaagaataaaaatcccaacaagtagtaaaatgaggcctgttagtagtttagggattaagttctccggtcaaatagttataaaaactacaattaacaatttccaggataaaaaaatcttagagctccactacagtgctctctactagtagtagaaaacaatctaaaccattgatcttattttatcgaatggtttaaatctatttataccgccatcctagtaacggcagtaaaaatgtggagagacattattgaaaaaaataggtgctggaggggtataatatcatttagctttgactaaactcttttttctttctttttttggcttttttgatggaatatgagcgatatcaacccaatgtaggaccacataacaatttacctgaaaaaataaataacaaagttacccctaatcactgtattaataaattattgatttacccttaaatagtactactagtattatactaccattagagagcaccagatcattgctcaaaatcataaatacatctcgttcatctcctatgaac

SEQ ID NO: 18655 - DNA, 730 bp, Oryza sativa
  unsure (1)..(730): unsure at all n locations
tcctgcagccccagaatattgcactccaaaggtttccctgatcagtggtgcgactgggttatgaaggtagttagaggtggaaaagtggccattaaagtaaatgatgaggtgggtccatattttaacactcataagggattgaggcaaggggatccactttctcccctgctgttaatttagcagcagaagcactcactctattggtgcagagggctgagaacaattccttggtagaaggcctccccattaatgagaataacaaagtgacaattctccaatatgctgatgatacaatttttatgatcaaggatgaccctgaacaagccagaaatttgaaattcattttatgtctctttgaacaactttctgggctgaaaatcaactttaacaaaagtgaagtgttttgtattgcaaggctgttgaaagacaatcaatgtatagtgagattttcacttgtaaaataggtactttgcctatgaaatatttaggtgttccaattcacaaaaaaagattgctcaacaaagactggactccaactgaaaacaagatggagcataaattgngatgttagcaagccagattttagtccattggggggagattgattcttatcaatgccagcctcagcaatgtgcccttatacatgttatctttctacaagctccctcaaggagtcagagaaaaaatagactactatagaagaagatttctgtggcaggaggatcaaggc

SEQ ID NO: 18656 - DNA, 3280 bp, Oryza sativa
agatcgtggagaaatgaacactgtcgcatgaaaatcaccgtggtcaacgatgtactcctacctgcatctacttctgcacggtcattacacacggaggaggagtagaaaaacgaggagccgtaaatgccaaggctcggtaagtccaagcgtgcgtcggcgcacgcggcacgtgggctccacaccaggggcaattcggccactccacccaggtaagaaaataaaaagaccagactgtgtgctagtagcagtagtactgctatttttgtgtaatatgtggctatgtgctagtattgaaacgataagaaacaatggggctttatactttatctagcaaatcaaagatcgacgtgatcactattatttcttttgttacaattcaggctagttctaaaattgagtaggttttagtatatacttcctccgtttcacaatgtaaatcattctagtattttccacattcatattgatattaatgaatctagacatatagaatgacttacattgtgaaacggagggagggagtaacttttttgttgttgtaaatctacacaagatttatctaaattcaatagataattaactctattacattaacgtaaacattgcttgctacctgatgtagatacatcatacatggtgctttggacaaccaaattaataacaggaggtacttaattaatgacaaaaagtaaagacattgaaataattatatcttcaactcaccgtaatggacaaaacatttaaaatagcccgtttaaattaagactagaattattttgatatagatgtatttagcgtaccattttacatgcttcttagccatttattagaatttaagttagttgaaaattatagagaatcaagggacctatttagtagagatccggcttcaattctcaccttaggccaaacaatttcagctccatctggaaaaagagggtgaagcgggctctcataaaataaactaagacatgaagtcgggtttagactgtttcataactccattccagatctaattcttgaagttaaacttataatttagagctctatcaaacatatcctacatgtattcattcatagcatgacgtattagcgtttattatagtgcaatatagtcctctctccgtcccacaatagttatcattctagattatttaggatggattaaggtttaattaaaaaatttataataccccgtattaaataatatctaatgagaagtgaaaaggttattgagggtaaaatatgaaaatttttgaatataaaatgatttatgggacaaccagtactctatattaacaagtactatttgagaacaaaacttaaatagtattataggacggtatataagtattataggacggagatagcgtttttttctattcgaaatatttcaaaacggggagctatgctccgttccgactgcaaaaccgcagtcggcggaagacaacagaacaaaaccggcgttgagaaggggggaggggcaatcccgtcattccacgcgagcccgagttgcacggcaccaccaccgccttcttccttcactcgacccgaccgccgtctcgtccgtctcccccgcttcctccgcctccaaaacccccccatcccaacccgacctcctcctcgccctcccctcgcgcttcgcttcgctccgatccgaccgccgccgccgccgccgccacagcgagaagagagagagggagatggcgggcggggagaaggtggactacgtgttcaaggtggtgctgatcggggactccgccgtcggcaagtcccagatcctcgcccgcttcgcccgcaacgagttctccatcgactccaaggccaccatcggcgtcgagttccagacccgcaccctcctcatcgaccacaagtccgtcaaggcccagatctgggacaccgccggccaggagaggcaagcctctccccccccccccccccgccaaatctcgcaacaattccgctctccagatttcgatcctgctgtttcgcgtcatttcgttactgttcgttcatcatatcatttttctcccaattttttccggcgttcagatcgctggattagtgagctcctccgtgatacgcgcgccaattgattcaatgctagctggtgggcttacgtcacacttccatttagatcgtaggtagcagtagtagcgtacagcaacgcagcgagtggttggtagaggtggtacgacactacactagtcctagatctctgctccccgttggctgcaacggtcggggttagcttgcagtgcacactgctacctacctggtgattgggcagtgtgatgtgcgactcacctactctggagtctggatctgccctgaattatgctggtggggggtgtggtttactacatgcaaccacatttagttgcgtatgctgtcgaatttaggtgctcttgtatggtggtgggtggctgggtgggcaattgggcggatactaggagtactaaatatggagagtgcgtgtgcatttcggaagtatgtcgattatggttcatgtggttggttgtaatttgttggcacgtgaatctgacatagcgcccgatgaatgggggttattttgaattcgaagatgtccattgctgaactctgcacacttggtgtcctgtcctgctgtatataccaaaggtccatgggatgtttatatatgctttgacatgacccttaaatgtgattgtagttagtacttttactccctccgttttaggttataagactttctagcattgcccacattcatatatatgttaatgaatctaggcacacatatatgtctagattcattaacatatatatgaatgtggccaatgctagaaattcttataatatgaaacggaggaagtacgtactttgatgaaaagaatttgttgtgcccgtgtgctctgtgttgtactcttttgataagcttaaccaatgcatggactgaggccagtgtcatgctccaacttaagctgtgtatttccttcaccaacaataactctcgtgttttagttatggctgattcattcctttcatgaagccacatcatctcaactgtttcggatctttggatgatcgatctaaggcgcaaaagcgcctagctgcacagcaaatcaacattgcacctcttgttagcattttatcatgttattttttcaagcaatttgaagggtttccatcacgtttcataagtattctagtccctagcaagtgtgcagcaatgtattcttttttgttctgatgacaccactatatccatcttagcagtcaggtacaatcttgtggacga

SEQ ID NO: 18657 - DNA, 2550 bp, Oryza sativa
cagggatcaatatataagttaaaaactatttttctctgagctagttttttagctagttacttgtctcaactagacaggaacttgcctgcgaaattaaaacattgacaggtactaaccaagtccacttatcaattactactaaatctttgaacgcttggttgctcaaacagacatatggtcattcaagctggtcagattcatgaatagcttttccaaggcattttcactgaatgtcaccactggatatgtaaatgcactggctctttttttttttaccggaaccactgcaggggaggcccccgcagttaatatattatattaaaaagatcataagtacagaccaaaaactaaaattgcaatgcatggctcatttgccaacatgatcttcacggggaatggttggtcgcaatgcttgttccataatcttttgtttgaggaatgaactaaaactttggtgccacttttgttcagtgcacagtactttctttgagctatacacattccccttggtgtgtaactgcaaccagttcactctagtttagatgtctagctgatattaccataatatagttgttttttttttaattctggttgacataagagcaaggataatagtgagctataagcaagctatatgcttatgtggaagagagagataaacaaaagtggggagtgttggctcttatgcaagagctaactacacacaagctccaagaaatatgcattaaattcatagtgagaaagagagaggatgaaaaaaataaagataaccttatagctaacctattatacatgttagctttaacattgactaatactccctccgtcccaaaaaaagtgaatctaggactgaatgtgacatattctagtacaacgaatctagacatacaggatgtgtgacatccagtattacgttggttttttatgagatggagggagtagtaagtagtgagctctactattaaacttgctctaagccttgttgtttttactcagtaacatacatattgaaatattgaatttcacattcatatgccctagaagtgaaccaaggtttggagaacttgagtggagccagcctaaagtgcttttttttttctcttgaaatttgtctggaggtttattagttatctcctaaggaagaactatttagttccaaagtttgatggttgttctcattcttatctaaaatatcttctatatcaaccaaactagagaattatctggttccctctctgtactgaccactttttgtgattttaaggtccatgacatcatcccaacttcattgctactgggtttttgagttgcccatatgtatttatgtacaattacctgcaaaatatctgtatggtggttcaatattttaatagagaatgagttatgatttgcaacagttttttttttcttctgaaatgttcccctaagccttcctacttttgatattctctataatcttgtcattgtattatttctgactactcaaatgtgtatccatggtaaccatagccttaaaattcttttatgctgcttcgtttgctttgttttccctgtcatttgaactgcattctgttctgcatttgagcacatgacacacaataggtgtgcgtgctgtattatccatgaaatcttagtcctgcactttagagaacttctctatttttactgtcatcatgtgaagaaacagtactccaagatcacagtgagacaaaatatatacgtattttctgtatatatgttgtagcactcaaaatgtgtgatgaattttgtggcagtattggcattcatctgttttgtctttctcatgtagcttacaaacttgtttctttcatgaacacaacttactaacctgtcatgcctatttacttcaactactgcaggtatagagctgtcacgagtgcatactacagaggagcattgggagctctcctagtctacgatatcaccaagcgccagagctttgatcacatccctcgctggctggaggagctccgtggccatgcggacaagaacatagtcatcatgctggttggcaacaagagcgatcttgaagacgagcgggccgtgagcaccgaggatgccaaggagtttgctgagaaggagaacctcttcttcctggagacctccgctctgcaggccaccaacgtcgagaacgccttccagaccgtcctgtcagagatattcaaaattcacagcaagaagaacatggcagcggacccaaaagcaaacggcgctgccccatcgctagcagggaagaaggtcgtcgtcccgggcccagcgcaggagatccccaagagcaagtgctgcagttccatgtgatcttactctactcagattcagctgtatttgtgtgcctctttttgagaattttcacgcgatctttctggatgtacatccctgctcaaatagctctaggctgcgagtattgttggactattggttgtttcggtgatcaggtggacgggatagcttagaatttgtgacattttgtcacttctctcagctggagtagggtgcgagcagaggagctctatttttcataggagtggg

SEQ ID NO: 18658 - DNA, 3303 bp, Oryza sativa
ccgccgccgccgccgtcgtcgtcctcaacctcctcctcctcctcctcgtacgccgccgcgccgccgccgtccatgtacgacctcatgttgtcctctgcaacacaacacacatgatgttctacgtgttaattaccattgcaaaacaaaaaaaaagtctctaaattcacgcataattcagcaactagctacaaaatgcgtacaaaaactaaatgaattgtacatgtttttggtgcatgtatgatcatgcatgtaaagttggcttggaagaaatagaattatggtgtaccttgttgatcagaggtgtcatggatgatggccatggaggagcctctgcagctgggcctcttcatgagcccaattcttgagagaatcaacaatgaagagagaagatatacaaaatggatctgagaggaagaaactagggaacagtgagaagaagaagaagaagaacactagctagctgcaagaggaagaagaagaaagcttggatctacaagagcagctagctggcaatggagagagagagagaaggaaggaagagagaaacaaactggtgcaagaggccaaggagggtgtataaataaaagcatttggttgggttggggcatgtgggtggtaccaagatggcatgtggcagagatatttggtgcctggtttgttagcatttttttgacaggtaatgcccaacttgtttaatgtgctgtcatcctaattcctcttagctagctagttaattcagggttaattaattaattaattgtggtttgcggtgctgtagttttagttttgggaatgcacacagcatgtactactctgacaaaaaaaaacccaatcctagctatgaatctggacaggatgtgtcttttttggatggagaggttatgtttctgccttcaagaaatttaaaagagagaatccatggatgttttattttctctaattagtctacaatttatacatttttgtgtatatatatgtatgcacacaactctgaagtagctatatgtaatactaacatcatggaccatgcaatacatgcctaaaatgtctattttttgccattttaactccctcgcctgaattagcgaatcatgctgttgatatcttggcaaaggcttcgcagtaacctagcttaataaccccatccaatatgtataggaatggcatgtgttactgatttaataagaactttaattactcccaaccaaaaagtttgctccattcaaccgatgaaaaaaaacaaacgatcgagtatatcgttgtgcaatttacgaatgttttaaattcttttgttttggagtttttcttgtcttctaaacttattcggatttcttcaacatagtgagtctaatcatgctggtaaattagttagatgtaactctttcgtttttatagcaataaacgatacaataaatatttggtagtcttataattcacaggcatatatatatgcatgcctatggaatccacaaagtatcctgatgggttaataatctaaccacggttaagcatgactccagtttagctaacatgcaaatggaactgtaacgaatataatatttctcctaactttgttttgagttttttaaatgtaggaatgaagactatcaagtgtagacaattaccaatattttttgtccttctacattgcccttacatgcaagtaatgtcacaaatactaccaagtcaattataacagctaggactcattacacagaagtcatgacttaattaatcaaatgtgaacacacagaattagtgtagcaccacctttaaacaagtctttcttttattaaccacagttaatttgacagatatttcgagtttctatacacaaacctaggttatttttttaacaccatagatgaaatcatatttagttttctttcacttaattttatgatttgtttagatgtgctcggtgcttgcttgggttgattgtcatttgtcacatgcatatagttttataaattaaagtgtgcgtgatccatgtacattggtccggcgtatgcatttctttcatcaaattaataaagcgcagctgcgcgcagggcatgcttttttttttctttgcctttttttaccatcttctaagaaaagctagtacgtatatacttcaacttaaccgattaaattgagagtccccttgtgttatcacacaattgcacggtaatttgcaggtacttgtagaaaacgtaagtttcttacctacactgtccacatctatgctcgttggtacataggagtataatccctccgtactcgtaaaggaagttgttttgaacagcgacacgatctccaaaacacaactttgacttcttgtttctataaaaatatttattaaaaagtgatatatgtatacttttatgaaagtatttttcaagacaaatctattcatataatttttatattttcaaactcaacaacttaagagttattcatgatttatattcgtaaggtttgacttaaacattgtcttaaacgattttcctttacgagtacggaggaagtatacatatggtcggatcagatcctgatctcctccttgaatttctctctaataatacttattcccccttaagctcattaattcgaaccatttaaacggctacctgagggcaattaacatgaaaactatatattattcgaccaatctattcataaacattaactagttccactatgcttagataattaattgcaaacagtattatgattgcaaaatgcaagatatatatatacatatatatatatattaattatatcctcatttttgcttgtacactctttggtactccatcagattccatattttcggtcgacgttgaatcgttttttggtcagatctatggaaatttctgttgaaatattaataagcatcttagacgagtttacctctataattaatgttgccgtggtttccaacgtgagagaaatacctagtttaaattaaggcatttaatatgaacataacgataaatagacattctaattaattactttttggttgatgaaattatatccaaaacgatgcacaacaagcagtgatgtcactgacacgtgggtctcattttactatagcctactatatttgttcgaaatataacaattttgagctttgtattctaaatatgtagtcaaaatttactatatatacagttccattaatttcaaaattgagtagcaattttgtgttagctataaatacggtgtccgtacgtagtcgatggacggtcgagatgcgaagggatcggtcggctcacgtggtgtcgaaacgtggcgtcgactgtgcggccactgagc

SEQ ID NO: 18659 - DNA, 6074 bp, Oryza sativa
tccgttcgctcataaaagtaatatatttaacttttatgataagatttggttaaactatcaaatgcttagtttaaaataacaatatcataaacttatatagtactttataaatttattttcatacaaaatagactgttaaagtttcaaaattttactaaatccgattctaaacatcaaatatttttgaccgagaaaatataaatattattatgcgccatgctttagtgacggtgccagagttagaaaagagttcaatattgctgtaaaagaaaaaaaaagttcctcccggggagggggagctggaatacttcgtgaaaatttaagtccaaattctgctaagttcgataaattgaacccttttcgaccaaaagtatatctacagtgcaccctccttgtggacgacgatgtagttcaattcaatagcctcaacgagtgcctggagccatgtatatatagccaaaacccatagcatcaactgctcttatatatatgggaatatatcctgtgcacactcctttcatataaactagcaaatgtcacagaaaattctaaaaaaaattacacacatacttccaatagtattacacgtacgtgtgaaatcttatcttcaaattcattatattttagccataaaaaagacaaaattctgacagatttttaccctttaatctgtcatatttttcaacttttttctacggttaaaatataatgaatttaaaaacaagactttcagatatgtatagtacaattaggagtagatgtttaattgtttctagaatttttcatgatatttgctagttagtgtgtacggagtgtgcatgtgaaatttatgcgcataggatatgtacttatatatacattaattttctataaaagggaacaccctaacagtatacattaaatactctcccgtaactaattaattaccagttgcaagcctttctatgcatataatataatcgaaaaaaaaacaaaaacccacttgcaagagtctgccccattcacacagctatagccaattaatccatcaggaaacgcacgtacgagtacgtcacaaatgtcagcaattaattaattaactgtccatacgtgtgctctacgacgtttgcaaactatatactcctgggtttgtcagcaaatttgttcgatctctctcgatcgtctcaagaattaatgtcagcatctgatggacgatgatgatatgatgaacggtgaaagagatcgagatcgagagagagagagagatagagagatagagagatagctctatatatgtccatgcctgcctgctgtaatgggcactcaaatctaaatgacgatatatatgacgcatggcaccaaacagagatgcaaacatgatgacacagctgataggtatgcttgtactacatatatatctatctctcacaagaaacacaccaagtggctgagagagagatttgcaattgcaattgcatgcactgtctcactttttgcaagttgcagacttgcaaactgtgcagacaaagttttttggatatggagaggcagatggatgagcttgctgtaggtaagattgaactgaatgtggatagctagacaccaacagcgcagcactgcacaggtgcttattttgatattttgacctcagctcggcattgaggtgcttaatattgttcaaaaacttgtatatacagtgttctttttggtgtgtatatttatatctaactgcaagctataaagatatgcatttaacatttagcattttagtatgattaggaattagctgggtgggtgtgctttttttttctataaatttgatcaaatctaaagaattttgactaagaaaaaaattcaaacgaattataatatgaaatggatggagcatataagaatggatataatgtataattaatacaaatacaaaatgactaaatgagccatgcgtgtctcggatggcgatagccacttgaaattaataaatgtacgcgtgccaatgacaaataaaacaaatgataaatatattatttgatcttcatcttatatatccatcatattatattcgtacagttacatactggcaacgatttttttgttagctggattcacaacacagtcgcaaaaataaaatcaaaagatgaaaatggccaagataagaccatgggctgccaaaggaagtttatagttgggcccatacagcggccaagttgggcctacgaaaacatgggccttttggttgatggacgacatgaataaacttgggaaaagtacaccgaaggttcctcaacttgtcatcgagatacaaaattgtctcccaaccacaaaaccagataccggaggtctctcaactaacagttttgtctgacgtgacgggtgagtcagcgtggaccccacgtgggccccgcctgtcagtacgccagctcatctctctccccctcttctctccttcctcatctctctccgcttcccccctctctgcaaggcagctagcgggtggggaggaggtccagtgaggacgacacaggagaaggaggcggcagcggctgcgactgcgacttgagaagggagaggcggctggcggcaaagcggggtcggtgcgggcggcggatggcggggaagcagctggctagctgggcgcgagcggtgggcataagcggcggtgggaggagctgcgcgggcggttcctcgcactctctgccaccagagccgctagctctcatgtgtggacgctgacgttgcccgccgccgtcatcaccacggcagctggacaccgacaccaatgtggaagcggtcccctccggcgattgcacctacttcagcttcgattccaactagcgaaagagccgcgagtcgtgcctccgcgatggcgctagctcgtagggaggtcgaggcaagccgccaccaccgccagactccccaagctcctgggagttcaccaacaacggcgaccgcccctcttgcacattccttggcgagaaaatggggatggccggtcgagctcggtgacgacgccgcccgcggccgcgcgcaccagcctgctggccctcctccccacagcgtcgcccgtcgccgtcgtgagaaaacagatagagagagagaaagggataagaggagaaacgctcacacactcccactggccacacagttgagggcgctggcgcgagatctgcggccatggacgacgacggcggcagtgtcctcgctctccccgtcggcgccatcttcctctcccacaacgtgcctgcccactgcccgtctgctctgtcggctggccgctccccgcgctgtcgcccggtcctccggcaggcctgtgcagcaggtgcatctgccgccgctccgcccgccgccggccgcgcgccgccgcctgcccgcagctcctccccccgccgccgcctcgtgggccttttgggtggcggccagcgggggagtccgcacgccgctcctcccccagtggcccctcccccgctgcccgcccgcagctcctccccccaccgccgccgcgttgcctgtcgtcgctgtcaccacagttgcgtcgcccgcgtctccatcgaattggagagaagcgagagagagatgaggaaggagagaagaaggggagagagatgagctagcgtactgacaggtggggtccacgtggggcccacgctgactcatcccgccacgtcagacaaaaccgggctcaaaaccgccagaggatctcaagcgaacggttttgttagttgagggacctccggtatctggttttgcggttggaggacgattttgtaactcgatgacaagttgagggaccttcggtgtacttttcccaataaacttctacagaatataagtccacttactatccctcatctttacatagagtttaaatgacatccctaaaccgcaataatagaaatctgcaccctccatcttcataaaaccattcaagttaggttctatggcagtttggatgaacggtttcgctgaagtgacatcctattcagtaaaaaaaattaaaaaatatatgggacccatctgtaagtgtcatacattttcttcctcactcatttcacttccgcaatcgctcagacgtggcttgcgctcgatgccgttctcgtcggtcccctcgaggaaccaaagagccgaacaaggaatatgatttagacacagtttaactgttgatctgaccacatcgtgcatatattcagacgatcatggcgacgcaatatttcgacacctctgaacattgcagtacagtaccttgagattcagaagagcaacctcgatacccatcgcagtttgaaccactacacatggagcaaaaacgaacaaaatgttcttgtatgtgattacaacaacaaaccgcatcgctgatcaatgtctcattgcactacagaattgggtgattaaatttgtgattgctgaaaatcatctgcatggttataaatttaaaaagaagaagaagaagaagaaaatttggcctgatcctgtgtttcagaagccagttttcagacgagaaggtgaggaggatggatggccaccgccgctaccccggcatggccttctccatcgtccgccgcatggccaccgacggcaccacgccccacctccggccctcttttcctactgcgacgctagagacgccaacggggccaccgaggtcgaggctcaatgccaccaccagtggctgcggctgcagcacccacccaggccccagcgcttagttttgaggcaggagattatgtctatcttcgtggcactccactcaggggagttcatcattttcagaccaaaggcaaattggcaccacgctttgtaagaccacacagaatcttggaacgaagaagagaagttgcttaccaggagcttccacccaacatgactagcatccatgatgtttttcacatgtcataactgaagaagtgtttaaaagtacctgagggggcgagtcccgataatatcgaaatccaagaggacttgacgtatgtggagaagccaactcgccccaaaaccagtgagagaagaactagaaacaaggtaatcagattctgccgagtttattggagtcatcacttggaggacgaagcaacttgggaaacagaagatgagttaaaagccgcccatccgcaactcttcgacagctcttccgaatctcagggtcgagattctgtttaggggtaggtttgtcacacccgaaagtttcccatttttccttggtccctaattcattaataaattacctagagaaaacatttatgttaatctggattgtgaattagctgaatcagcatggtagaattttcttcgaaattccttatgtttaaatgcattaacaagatttttagaggaatttttagagcagaggtggtaacatttataaaccaaagaaatcatcaggagtcaattaaacaaaattccttcctctccctcctttacccgtgagccgtttccggttcacacctttcctatacccatcttcgaactcgcgccgccgctgcatcggccaccgcgtcccccattttcttatcatacccggcctcacactgttcacgctggtcgtatccctatccaattctacctaccgttgtttttatcctctccaaaagacagcgccgccaccctaactagccgccacccttcctctgccgcgcacactgccctagccgccatcgggcccactaaaccaccaccgcctataaaagccaccccacacatcccctatttatgtttccttttttctcgccgtgtgccgccctagccgtcacccccttcctctcccgtgcgtgcctgccctagccgccgccctccctctgccgcgcccttgccacctctaccgctgccatgcatgccactgccgtcgccggtgagccctcccctcaccctcatctctcgccagcatgttttgctatcaagatcatcccctccatctaactaatctatcatgtgttttgccctattcgtcgtcgtcgtcgtccgcggatcaccgccgcagccgctcctccaccggttgctgtcattccccgatgaggcccccttccgctccttccctactcagtgtgcgcctgccgccaccgacgtcttgccgcgccgctgccgcctttgctgtgagcttgccg

SEQ ID NO: 18660 - DNA, 5638 bp, Oryza sativa
tagtaaaaacacagtaaagcttccaaaattcctttctaaatcattcaagctccattttaattcattcaagtctcaataaattcataaaaatgtctagaatccattaaaatagttttgtttcttgtttagtatatttatagcatgttttgagtgcgtgctttgtttgtcgtatagaattccgcagttccgaagctcccgtttattatgaagtggtcactaaagttcctccagctcaggagcaaggcaagtcatacatacgcattgatcatattgtacctattttgtaaattcctcgcttttttcttaaaatcgcattgttttataatgtcacgagggatggatacgtaatgtaactcagcctttgttattctatatcattgatagcttgggatataaaatgattagatgattggtttaggtgatgcttagccatgcttagatcaattagtacactatgggttccacacgaattcttagtccttaatttaatgatggaataccaccatgatattaattaaactaaaacatgacaaatggttggttgtgggtccatggttttgatagtagcaccccatggcaattaaggacctgttcttgggaaacactggaggaattacccgtacttaccacaagtcaacgtgggcaatgattggatttggagtgtagcttctttctaaccgagtaccaacgatagggtgggcgtgatgaagtaggatgggtcctgcgacgacctctgctacttccaaatccacctaggcacgagtgggggttgtccactgctggtttatgggtgggggcaaaacctgatgtgggtgcgatttgttaggaagggttatatgaagggtcctgtcagaacctctttccaaggtagcatggtggtattgaggcgcatggtaccatgtcgtgggctgtcttgtgggtaaagttgtatacctctgatcagagtaaagctattcgaatagtcgtgcccgtggctatgggcggtcaaccagattcactgtgattagtctcaccttaataatttgatatattgaactggtttagtgttgggcatgtttcaatgtgatttagcgttgagcagtgatgtttaatattgattaatttatatctactattttactatattcaaattgtgatatgaaaatgttgcttatgcaaataacccatagctctcctttggtattattctgcatcgtgccttctattggttgttgttatggcttgttaaatacagtgggtagtactcggtcttattttatttttcccccaacacttagaagcaaagtattattcggatgaagattattgggaagagtaggcttgttgcggtcttgcggacgtcaaggatgcctgtggatttggagacgctatgttttcccaagagatggatgattagctaattcgattatttatttccgctgcatatgtaagacttatttatatttttgtaagacatggatctgtgtattaatattgtcgtttgtgtatcttggctagtctggacagagatttcaatacacattctgcttaaaattcggatcagcgaatttttggacgtgacaggctactagctgggagtctgggacccctgagctctagctcctgcccgcccgtcgcccatcatggcatggtcgtaggacacaaccggcggccttttcttggcttccggtatgtatctatgctgatctagctcatttgtgattagtgaatccataaatattccactgccaatttgtgattttattggcaatgaagtctatccaatgggtgagagtcggttgaatctctctccaaacgcgatgacgagctactcccgacttggtggtgtttgttctgaagatgaagataaagataaagattaagtttttcacgtaaaacgatgtggtaatagcatgtaattaattgagttttaattattacaaacttgaaaaatgaattaatcttatattttagaacaactttcatatagaaaattttcgcaccaaacacaccgtttagcagtttaaaaagcgtgccacgagtttccaaaaatttatccaacctttattagagaaaagaacaggacggtgctagatgcttcttgtattgaagcatgtcataaagattgacaaaacagccgctataacataacagactttgagttgagtcgtgacttctactacctccgtctcaaaataagtgcagccgtggatatccgtatccaacctttgaccatccgtcttatttaaaaaatttatgaaaaaattaaaaaaaattagtaacacataaagtactattcatgttttatcatctaatagcaataaaaatactaatcataaaaaaatttctaataagatgaatggtcaaacgttgaacatgaatagtacaaaactgcatttattttgggacggagggagtacttgttttgcatttgtatcaaattttaactaattttatacttgtacacatgttttatctgtgttcgaaaattttattatgtgatataaacctgtgaagtaggactatccaacgaaaacttactagctacgccattacttgtcgcacatttttttttaaatgtgctaggcatgatgtttaccactctctaagctggactgggattactggtattcaatgaagaccagatcagtatgtcgtgccacccatcattctgcttcgtttgcttgcttgcttacacaaacccacagcttggtgtttacagctgtactaacggctttttcaatagagtacgatcagtttattcaccgaaagataaagtatatatatatatataaaaaaaaagaagccgaccagcttaacggctagtcccgtaacaggcggaggagagagagactttccgaccagcccgttacccatccatccccaccgtccatcccggatcgggctcatcctgatcctgccacgtgtccacgtgccctgaactagccgttacgtcctttcgtccccgcctggtccccgccgtgagacgcacacacgttcgctgccaggtgggtcccacctagccgggcccgcgtgtcagcgtcgtggtggcgtgtccccaggtggtgtgccccacgttggtggaagggaatctgatctaacggctagttttctccgccgccgcctataaataccacgtctcctacccgcctcgccaaccaccacacatccagcgtccatctctcccactagcgcgaatctcaagcacttctgcctcgtcttgtccggcgaagagaccaccacgaccaccgcatcaatggcccgcctcgccgtcgccgccgccgccgccgcgctcgtcgccatcctctccgccgtggcggtgacagcgcagagcccgagcgctgccccgaagatggccccgctgccgccgccgctgaagatggggcccctgccgcctcccccggcggccaaggcccccaccgcctcggcgccgtcgccggtgacggcggcctcgccgccggccccgccgatgtccccggcctcgtcgccatccgacgcggcggctgcggcgccgggccccgccgacgccggcgccgcgacggccccgtccagcggcgtgtccgcgcccgcactcgcgcccgccgcggccgggaagagcgccgccggcgccgtctccgcctccttccgcctcgtcgctgtcgccggtgcgttggccgccgccgccgtcgtgttctagatttagaatttttagatagccgcggcttcgccgccgctgctgttgatacttgtactctaccgccactctgttctcgtttttttccccattctttatttgtttgattaattcgagaccgagagggagattgattgaaaatgagatattattcgggttttttttcaagcggaaatgattatcattacatgcttcatagaagataagtgaagtaatttcgtagaacattatctgaaaaagtttgataaattcttctcccatttgttgctctgcttaacaggggaatattaacaattgaattaaccgattcgacgaatattggctaaagacctaagaggttttgcacaaacaatctgaacatttgtacagagctgaagttgagttctctgaaaatttagtgcttcttaatggtgcctcttgtgccatgcttgtgattatctataatcggctcgatcatcgtcttcacgtcctcttcgatttcgtcaacctgtagaaacagtcaattcgattgataatttctggtgggactcgcatattaaaaaaaaaaatccggtttttccggaaaccatgcccccaccatttgtctcattttaccgacaagttcaaattcaaaaattgaaatcatagctatctgcctacccgccagaaaaattcaaattgaaatttgaatccatagcctacgctgtttttggtaccagaagacgctatcttcattgtagtagtctttatatgattcaaaattattctaaaatacttatcttattgtagtagtctttatagtagtccaaaaatactttcggcagatgagatagttccaaatattgaagcaatattctcttttggaaccatcgtatcttatctaatctctgaaccaaacacataaggggatgtttagatggggctaaaactttttagctcatgtcacaacccctaaaaatagaatgatcccatcccaggacatctcttcaaccaaacacatgcctaaagtattagttatctcatgcatcatctttcatttaaatttcttcctatgatatactctcgaatatcactccactatccacatcatttaataagtgccaatatagccttttttttccataaaaagtcttaatgtatgttaaattatctatatcattgtagtagtatgtattttgggacggagacattagtagaatagagtagaagcaacataaaggtcagggtttcagtgttgcttaaagccatggagtaccatcgttttcagtaatccagtgttgggcaaaatagcagatttcttactcctctgttatggaagctgcaaaactgtgatcagataaggattaattaatggttagtactaaccttgtggatgatgtcgtgggcgagatgagcctcctcggcgacctccctggacgcgcgctccaccagcgccgccgcccgccgcagcgccccgtgctccggcagctgctccgcctccgccacctccgccgacgccttctccaccgccgcggccacctcctccaccacctccgccgccgtctccgccgcgtccttcaccatctccacctcgcctgcaattaacggccatccaacgaatctcagatcgtgttcctgtccgatatgaattaatcgcaagaaccaattcgtgtgtgttttatgtgtgtctgtgttgtttttttactttggattcggagaagcgtcgcccacttggactgcaagaacggcgccatggcggcgaggacgacgaccaatcttgccctggcaacagaattaggacaagacggaataaaatttcgtggtaaaattggaaagcgcaactgattgggtggtttaaatctaggtgtccacgaatattatgcacatacaaataagttttcataatgagtttagttttcataacgaatattatgcccagaaatattatgcacatatattcgtgaagatgcgagtgcggtgttccgtgtgcagtggcgttgtgctcctctgccgtttaatcgaagaaaa

SEQ ID NO: 18661 - DNA, 4163 bp, Oryza sativa
attaaattcattccatcttcaaaccaaacaacgtgtaaagtgcattgtatatcatgacgtctctcattttttagtttcctttcagtaccaagtaattgatccaaacatatagttaattaaacctctccctgcttcttaatatatgccaaaaccaccatatctcaaatattatattttctagctagctaatactagttcgcaataaacatttgatgcctgcactgccaagtgccattacatacaagagaatccccagctggagcacatctgggaaagtaggcagctgcaggcagtacaattcacaagctagttttggcatcagcaaaagcctgctcctcctgcatcctctccagaatctcatgcactgcagttgcaatctcctccacagacccaagcttacatccatcctccacctacagttatacatccaaatcacaaatcattattcttcgcatcataaatcataaatatctattttgttcacataaaatatatattaatacattttccttaagaacaaaaaaaacaaatttgccacctctaaattacttttaacatttgtcaaataaacaaggtagatgctaggatttgaagtcgggtgggttggttggatcatgaaacagatcaatataaaatataagaaaaagaaaaatcgaacaccattggtggttgagactgaccttgaggctgaaggagtacatggccatggcggcgacggtggtgacgttgagatgcaaggtggtgagccctagctggtggagcccggcgacgagcttgagcagctgcctcggccgccgccgcgcctgcaccttgacgctggcgtggccctccaccatgctcgcctcgatgtcggcgatcgccgcgccggcgccgccaccggcggccgtagtcgtcgtctctgcaggcttgacgacgatcctgctgtgtgcatcgccgccgccgccatggccggaggtggcggtggagtactgtgggaaggcgaagaagccggcgaagggggagggagactcgccggcgccgccgtcgatgtggtccttgatggtccttctcgcctccagtgtttggagcagctgctctagttccctcacgtagttgattgctcccccaactatggatgcttggtcaccctagaaaagaaaaagaaaacaaaatctatcaattcgttttccatgaaggtgtaaaagtaaaacgatgttgaacagatgtaaattttgaaatgtgggtttgatctgatttatcttctgatggtgcattgattttgaaattcgataaatttagaattgatatgaaaacaaataaaaagattaccctttgggcgtaggaaggtggcatgagggagcggagcacggcgaggtactcgttcatctggcggcggcggtttcgctcgacggcaatgtgggtcatccgctggctctcgatctcctcccggttcttcgccgccttcgcccgccgcctctttctcttccccgccgccgccgccgccttcacaggcggccgcgccgccaccttagaagaagaagaagcatgctgatcctgatccacctcccactcatccacgccctggatcacatcaagagacgcctctgccgcgaacaggccgggatcgtcccagctcccgccgccaccggcggctgcgaagacatcccacggcgccgccggggcgccgcccatcagcccgccgccgtacccgccgaaatggccgccgtgggagtaaaccaccgcctccagcgccatcaccttccaatgccagcaatggcgtgcggtggctggccggtaagtgtgaacgaacaccagcccgcaccggccggcggcgggggaggaagacgacgacgagcgaggtgaagaatatgggaggagaagacaatggtggtgggtggccaatggagatggaggaagctaagctaagctagggaggggttttatagagtggaaattggagcaagcaaagagccaaggttagggtagctatagccaagaaattgaaatgaaggacgacatgaaggtcccacaaaggagaaagattgggggtggctggattttgtgcttgggggaatgagacccaatgattaagtatttgcaagtagctaattagggggttgtagtgttcaattaatctttggttttctatgcaattgggcagggcaagaggggtgcatgtagagagatttgatagagaggtttgtgggaggaaaacattccttcttgccttgaatgtttatgtggctttttctccttaattgtttattgatgattgtggactagtgtctagtggttgtatttttgtggtttaggaggatgtgtaagcttgctagcttgttgaacttgatttgctatgcttgtgttaggaacctaggatcaaataatggtgagtttttctccagataaggataaccaacgatagaactagcatgtagaaattttgtagagcctgactagataacactagcatcccacatactttggtgtggcagctcgagcaactatatattgacgcagctgattccaccaccgggttatagtaaaaaagttggtaactaaaccacattttgccatcactttttggtgtagtacacgcatgtgggtacggtggaaccaaccaaccaaccgatcttatatgatgttttcagtatattttctgcgtacatatgagaagtgtgtgtgtgtgtgtgtgtgtgtgtgtgtgtgtgtgtgtgtgtgtgtgtgtgtgtgtgtgtgtgtgtgtgtgtgtatatatatatatatatatatatatatatgtgtgtgtgtgtgtgtgtgtgtgtgtgtgtgtgtgtgtgtgtaacactatgatactagactaccgtctaatatattcttttctagtgttttacgctaacaaaaatggtccactttttaacatgatcatatcccttataggttgtgcacatctcgatcacgaaatgccaaaaatctgaacagtgacaatagatcatgtctactgcacaaacctaagtgatgaccaaaagaagttttcttgagtgacgaaacccatcatatgtggctggcatccaacgtactacgacattgtagcgtgacatacccaacgcccatttgccgcgcaccggttattaagctgatcagacacctgcctagtgtcaatattattaattgtttcttggtccgtgactagaatagtagtaaaaattgctggcaaaccaattccatcttattgtgatagaaattaagagaaataaataagcttaatttagttaatatataacaaaagttatttgtaaaattccaaccattctatttatttggaaaatatccaaaagattaaacgagaatagaaaatttccacctcgcctaagtagagatattttacaaataaagaggaaactaataaatttagttagaaaataagataaaataaaatatttttgataccaaaatatttggttttttgataacctgctacacttttgctaccattttttcggggcaataatgcattgtggatacacacaccaacctaaccaaccaacctcaaatggtttgatcttgtagtgagcatttttcatatgcacaaaaagtaaattttggcgcaatactactacaatacaactagataccaggtaattatatatactacaatattttgatttttgaaccactacagaaacacacaaaggatacgacactataggtcctgaaacagttaaaaccggcacctatagtgcttttcccaccacaaacgcatacccacagagcaccatcggttagaatcgacacctttgggaagaaataggggccggttctagagaaaaactagcaccaatactatatgtgctagtttttttaaaaaactgacacctataatatattataggtgttagttaataaaaaaccgatacctataatatattataggttttggtttttttaaagaaaccaacacacgtaataaccaagctgagctgagccgagccggccactcacgagtggatatggagagggaagggccgagtgggcgtccttatccactccactcacctcccagccacgagggcgctgcagtcggcatcgatctgctcggaggcggtgcgagccaccaaggccatggcgtgcaaggtgctgctgcgggtggcacccgcggaagagaatcggtagctgggacgatcggtggagcagtgccggtgcctggg

SEQ ID NO: 18662 - DNA, 8850 bp, Oryza sativa
aattcctgcagcccgtgtcattgttgcatgtcctatatcatctttagttttggaaaaatgacaactcgaatgacaatattattagcctcaatatttacgagcatctgaatgtgttgtggatcactatatcatgactccaccacgtacacagcttcaagtagttctagattagaacttacaggaccgtctataatagagtcctacatactatataaaccagtaatatgtgatcgagttacgtacgctggaagtagataattaatcacgaaagagaaaaatgaactcatatgccagtgagctgaccacactattgcgacttgtaagcttgacgatagagaggggttggagccttggaggtggtggattcagcagccggcacggtcaaggtcatcagagatgttagatccaaatgccaagtactccagaagagttagggaggttggctggaggcatcggggactacctcaactaaaaaaaccattttttgcagacgttggttttttttcttaggcgggtatcgccctagaagataaatggccgcctacgaaaatgacatctgtgggggtgagattattgcccgcctgcgaaaatagattttcgcaggcggaccttaagaagtccgcctccgaagatacctttatttttgcaggtggacctcttaagagctccgtctgtgaaaatatatttttgcagtcggagcttttaagaggtctgcctacaaaaaaggtggacgatattaaaaatgccgctgcccaccaccaaaatcactaagtcccacaccaaacacctctccctctccgcctctctctctctctccctcgctcctgtcttcccctctctcccacctctcctctcccgggagatatggcggcggcggctactggtggcggtggtggctgacggcgcgaaggtggcggctaccagcgggaggcggagggtacatgggtgggcgacgtctcccctcaatcctcccagatccggtggaggcgacggcggaaggcggcggcggtgcagaggtggcggctaccagcgggaggcagagggtgcatgggcggaggtgtctcccctccctcctcccagacccagtggaggcagcacagtgggtggcggcggccctctctaccgaatctggcacggcatcccctccggatctggctggcgacgagcgacctcccctccagatctggttggcggcggtggtcctcccttcggcgatgactgtgatgcatttgttttgattgtgaacgatgttgcttctatgttaatttgtgatgtttctgtgaatttggattaactgggataggaaatgggaactagattgggaacgagaagctgtagcccaccgaaacgacggtggctgcccattttttttttaacgtaggaaactcttttcgcaggtggaccagttacccgcctgcgaaaatcaactatttttacaggcggttgagttgcaagcggaccagttgcccgcctgcgaaaacttgtttagcccgtctggaaaaacatttttttgtgtactacctattccttggctttctcaacaacgaggaggggcttgtgcagcgcttccttcccttctcctacatcggcattgaggcaaatgcccacaggaaataatatgatcgtggagataatagtacaaattttaataaatgaatttattactccctccgtctcattttaagtgcagttgtgggttttccgtgtccaacgtttgaccgttcgtcttatttgaaaaatttatgaaaaatatatttttttaaaaaataagtcactcataagtactatattcatgttttatattgtaataaaaataaaaatactaatcataaaaaatcaaataagacgaacgatcaaatgttggacacagaatcccacaactgcactgaaaatggaatggaggagtaattgctacatcctccgttaaaaaaaaaagaagactttattaattaatatatggctatatgcaggcagtttgacacagaggtagtagtagaatccagtgttgtcttatattatacataatcaggaggatgactacacttccaactctaccacaccctccatgtgacagtgggcaggcaactatagcttagcaagcttaggtcatgcatgtgaatatcttgtacactttgtacagtgattttaccctggcccagctactattatgtccatgtatgtacgttcttgttgcatccggcgccgctgcagcagcaatgcaatgcatcatctctctatatgtaaagactacactggagctcatgtgatgtttcactgcaggcaggttgtgtgcctttcacaggcccctagtatatatgggtgccctaactatagcttgcttgatgtgatgatgtttcttctgccaatttaacagttttatctgtttcagcaaaaatgtttttagctttccaaatttttggaaactttctagaggttgagccatcgtttgactggtcaacttaagtaattaataacctctataggttgaacctattggttgatactacaatacaagttttgaagaacacgtacggccggtgcattattttgcaatctaaattaacaagttgcggaacaaaaactaaaaactagtagaaattatacttcaatgatcacctatatgtactgaaaacttggcgtgcgtgcataaacattactatgcaatgataaattcatacatatacatgatgcttcacgtttgccggcttcagctatgagccaagaggcccctgttgcaatttggaatgaaatgaatagcataaaattaataaagatatatatcacaatatcgcggagaagttcatttggtttattggggatcaaatatataacaagatcttgcttgatgttacaggcatgatttacattgttgtttgtagcttcagcaaaaaaatagccgtgtcgtcagcatcaaacaaagaagctaggggccggaaagcgaaagatgcatgcacacacccattttttttcacctgaactgatctactttccgaaccttaatttgtcatctagatcgatttgcatttcattatacaagccattttttcaaggggtcaattgaatccatgccattacaaataaaccgatttacataaatactactatatttcatctatctgtatcaatgccattatattcaaattcacacaaaatttcaaccgtgccactactaccatcctgtttttcatcacatccttttctctcatcctccttcctcttttttttctctcctctccgtcccatcgagggtcgaagccggccgccggcgagtgctcatggcggtgtactctcctcctcttcaaccagtgttgtaccatacagctgcacagctggagacaaacccctcccgcagcagcaatggcggccgaccaagttcggtgatcagccaccgcagccctccctagggtggagccccaacctcaaccttccctacccgctcccgcccacgcagccgaccgtggtgtcgctgccggccccgcgctcgggaggacccgcgcttccactactaccgcaccatcaccacgttagatctaaggtggccttccgcttcccgaatgaccagggcttcgagggcggcacgaacggtggtgtattcgtagaacaggctcaccaccctagtgctagcgcggtactcggggcgctcgagaggcacacgacactgttgctctactccaatcggctcgttggctcgctcccgccatcgctgggcgggctggctgctctccggatgctccacatcagcgacacctcggtaatgtcgagccctagccttgtcgtgcttagcaggctcgcaaacctcaccgtgttcgagctcgcgtcctgcaacctcaacaacacgatcctgaggagcctcgggaggctcaccaaggaaaggggagggcgtggggattggaaggacgaccgccgccaccgccgtgaccaatggcttcgccaacaatgtcctagagacgcaccctcctcgccaactgctgcatttgaaatgaggtggagagagatggggaagaaaataagaggggatgatggaggaagaagatggaactgacatgtgggtcccatatctaagggtattttggtctatatgatgacgaaaaacgtgacggtgataacgtggttctaattttgcgcgatttcggatggtatggatacaaatagacgaattgtaatgttatttatctgaatcactatatttttggaatgctatggattaaccctttgttatacataataacttggtaggtaccctccaccttaaaataaatatatatatttaacataaatatagacgtagagcgcttatatcaatacttgcgtataaaagttaatttattttgggagggagagtagcatatatttgtgcatatatacgtatgcccattaaatacgaagagatgtgcattttgtttttcatgcatagattgcataaatagtcggtcatttgttgcatttgaaaaaacaccacaagataaggctggagacaggaattacacgtctgacaacacgcgattctctaaccacagtgccaatcgatatgcgtctgcatctgtaagttgaagaataataacaaatttaatgtcccctggtgctagctaggagtatttgtttatatcatttacaaacaaacaaataactaattaacgccaattaattaattttctagaaaacaaaattatcaggagtacacttcacttggacaggtcactgaaaccagtgactggttatgtgcccttaactaggggcggcagaacaccggattggcttgcggctgatagttttttgatggccatggtattggatctggacaaaataaatcccaaaatgattctctcttccctgtctctgtctctgtctctctctttttttttcctctctttttttgctgctctcacacgcctggaatctaatgtggattgattaaatccttcttttccgatggcatcactttctgatgcacacagcacaaagagatactcccttccgtcccataatataagggattttaagtttttacttgcaacgtttgactactcgtcttatttaattttttttgaaattattatttattttatttgtgacttactttattatctatggtactttaagcacaacttttcgttttttatatttgcaaaaaaaattcgaataagacgagtggtcaaacattgcaatcaaaaactcaaaatcccttatattgtgggatagagggagtagtatatagtactgatcatttcttgctcatataacatggggttgtttttattcagtataaaaaattaagttggctagaagatacaagttttccctcttttttttttggtttttctttgggagtatatgttcaggggatcaagaagtgctgtgtacgaccaattatataaaaagaaatgcagaggcagaagacgagtacaaattaatgtcaaattacatagtatatatcaactgtatacatggtacactacttgacatgagaaaataatcatattaatagaaatgttctaatgtacggacctttccatattaaataaatattgtaaggatcataacgagattaatttggtccacctcaattagattcaaaataaattttatattttttaaatggtcattttcaaagaataaggagaagaggtttttcataggccgatttcttaaaaaccactcttaaaatgattcgcggttccaataaaaaaaattgattcgcggttccaataaaaaaaattgattcgcggttccaataaaaaaaattgattcgcggttctcataagaaaagaaggtctgtaaaagttggtttttgtggacaattctcttatggaaagtgccctggaaataaagaaatattatttcaaggaaaaaaaatcgcaactctttgctatgagatcaaatgatgacaaattaaattatatatatgaaattgtagctcaagttgaaattgtttcctatttacatggtttaaggggttcgttgagattttggatgtgctagctctatttcaacatatagatggacataatccaaatccaaaaggttgtttctttttgtgaaactacagcatttgtaagtacttgctcaactaagactgctactatcatgatgttctctacttataaaagctctatttgattttttttgtttgcctcagatcgattactaactgacatacgatgttatatttgttctcatcaaagatttaaggcgctttcaaccttgcaagctgccctttatatgtatcaagctcactatattgttctaattctttcctgaacaatttaatttggacgtactacatgaaaacagtaccataagaacaatcacacagaattaaagcggtataaactaaagtatgtagtacatgttataggtattatattctccttgttttttgtaggataagaaaccttccaaaaaggaaaatttaaggtatgttgttggtatagtactatatatatatatatatactattcttatgttttctaagaacattttgtttcttcaaggacaattaattatgtggaccaattgttttgatcagcctatgatataataataaatacatttgctttccataatacataaggtggtcaatatatatgttgcgaacagctagctagtcatcaaaaaaagttgtagggactagggccggtgacattgtaacaaaatttggtactaacagaaaaggaaatcttgctgttttgtgtagatgtattattagcttcaatttggtcatttaatgtattttgttttgtttgtttcatgatgtcttcaattaatatacatgacatactttcactatgaaatctcgctgatttctcgtgatatttcgctatctcggtgcctctagagatattattaccctggtaaaaaaatttgagttcagtcaatttctttttatttattgattaaattattcaaaccacttctaattcaaataaaatatgataaaaaacaatttctctcagcgagattttcatcaagattttgacatttcacgagatttcgctgtgtcaggccctcccaagattttagtctttaatttcgttttattccagtagttagtacatacaatgacaagaacagaatgtgctctttaagtatttaaggaaaaagtatatgtttattctgctaaagaaaatctctaactaaggaacttctctcaaaaattttcatcccactttcctgtcgcttcgctccctaatggtatctgttttttttttcttttttctatttgtgcaagtctatgcatgccaagtctttttttatgttgtagttttgtggagcaatagaggaaaatatagggtacaaaacaaaatactttagaagttatgcaagaccactttcatgcattttcatatcttgaggatttaaacatgccttcactgtaccaatctatgatagttcaggaaagtgaggcaaataaaaaatcttttaactgtttaaattttcagcgaaataattcaggtaaataaagcttagcactttcctataaaaaataaagctgtttaaatgtgtgtatccagccttcaatgttatacatccttcattaatttacatggggtataaccctaaaaagaattacatgggtatatgaaataatattaattagtaccaattaattcttaactagtgctatgtgtgaaaacaagattgttaattaatctatgcgaatcttggggtgatggtgtgtggggtgtaatagaaagatttcattatatctctcatgcatatgcatgcatggtttattgcggcgtgagattacaaagtttggaggcatgctgttcatatctctgccgtctgtgtattggtcagcaacctatcagcactaccctatctgcttaattaaacaatttatacaaacaaagctgctagcttaagaaagaaacattttacaaagattaattgatgttgtcctaaagtaattcaaggtggtttcattatggggaaaagtctgaattaccccctgatacaattatggttgtcagaattacccttgaacacaactaccatatatttagcatcccacctttttaaccggatgaattagcccataacttaatctagagagatttttttctgacgtgatgtacatgtggcaatccagtcagtaaaaaaaatattaaaaaattctataggctccacatgtcaatgcatcctccatgttcctctcctccccgacttgaccccagtagacaacgacggcgaggtgacatggacatggactctgatgaggcgtggccttagccactgccacacctcttcctaggctcgacctgggcaggcggcgacccgtggagcagatagttgcaatggaggagcccatcgtgcccccaatagcaagagaaattatggggaaggggccaaggtaacgatggtgccagtggccaaagcgaaggaggtgacaacgatgacactgatcggaggtgatggagtggcatggcaagcagctcgaaaggaggggacgatggcagggagactctcggaggaagaggtgatgggacagatgtggcgcggcatggtggcctgcccactcgtccatgaaggtggcggttggaggtggaggaagaagccgagctcgagctcccctcatggaggctggtggaggttgcggccagtgaccgagctcgagctcactcatgaagggaagtagaggtagatctcgagctctcttcgggcaggtggtgaagactcgagacatgtgaccgatggacccggagctcgatcgggatggtgcaaccagcggtcatgtggaactcgcggctggtagtggtggatctggtcacaatggagggagatgggcatattcctcaccggcaccacagtcctctaacttcacgatccccatcatcgtggcaaggcctc

SEQ ID NO: 18663 - DNA, 695 bp, Oryza sativa
ttattcttagtgttaactcaccttctgttcttttttttccttcactggctcaatttatctcttctagatgggagttgctgaatcctgacgcagggattgtttaccttccgcacccaaggccaacagatggggcagtgatgtccttcagtgaactctgatggcagctatatcattcagacatagaataaagtcaccagtacattctgtggcttaagaacttcagagttcatatatactattgctaggtgcaagactgattaagaaaaagctgagaagcaacaatgcatgatatgtatcacaccaagctgagtttctttaaatgtgttattcagttgttgttccacatgttttgtatatacgtaaataaactctaccaagaattcctgtctattaataaattgtgagcttttgtgagttgaggaatttctgtctattaataaattatgagtttttgagttgaggaggagccgaagttgcttagccgggtataacaagctcatcaacgataacccctcaagtagcgcagttcaccatgggtggatgagcagtgtttgctcctctaatgtggtgtcatcttgtgttgtggcgaagttgagctgttgtgccacgtgatgagctaggcaacgataatcaacagtcttgagagcccaaggcgaaagcattacccccggtcttctggccgtggcgatgttgac

SEQ ID NO: 18664 - DNA, 3509 bp, Oryza sativa
ttgattagcatgtgatgtgcatgtgtatagtgagtatgcataaaacatgctatgtattcataaatttaatctctactttatcctttatcattgaaatgatcaatatcatatatttctaacccttgtatcgttgctcaactttcatatctttctctacaatcactatgtcccattctataaatttttactgaacatatgtctgtctaaatagcattctcacatatgtgtgtgtgtgtgtgtttacgtagtatgctaattaacacatgaatcgacaagattaatcaggcactcctccactcttttcctaacaaaaagatatctttcatcttttcctctctctagtcactggaaacacccattgcaagtcttgcacaagtcaccttatccattttcccctccaatctcccaccacaagtcttgtaagtgcagttcgatcatgtttctgccaattgccttcgatacatagtgcttccctcaccatcaccatgttggcactagcaagacccaccagtcatcccctcccaactacctccctctcctcttcatcttacatacatgatgttatcatctcccatcttcatcaactcggcactagtatcctcacactcccctctttgaaaggttgatcagtggagatcttttactgctatatcctaactcccgcttgcgaaccacatagaatctctcacacttgccattaaccccactcaccaccctcttcttcgtcctcgcggctccagcaataatatcacttgcacctgatcacctacccgtctctgccacccaagctttccctctaaacctgatcttatagtgccccctaccaagggaaataatccggcctagggctatactaataactttgtttatttaaatttgtcgacgggggataaccgcagactgtatattgagggttggggtacgttggtacgaggatctacacgatacgacatcaagcacatagaagacaaagattatactggttcagaccccttgtaaggtaatagccttaatccagttcatatgggattatgagaaaaaaccacagaatacaataaagaacaacagaacttcgagattactgatgagatccttgtcgagagcgtcttgacgagatttatcggtgagtaggcttcaagttcgtccagatcgcttaagttatggcgggtatcttgtgctaagattcgatgttcggtacccctcaaggggtctctatttatactgcagatcaccttagtctccgagtaggactcggagacaatggaccccgtacaataagataatatcgtcatcttctccaaatacaactctgacaccttctattcgtagagattgtttcctcaagaacttaacaatttcctttaactcaaaaggatacttcccgtatacttgaggatatatcgtatccacatatctcatgactcctaggataaagggtatgttttatccgtaaccctgacaaaattttcatgttttttttgtaggatctaaaatggattaaactttaaagagactacaattgggctcaacccttaagtacccttgtcttgtctcctcgctgcccctacctccatcccatcataaagccctaaaacttaatctagaggagctcgccggagttaataagtttgagtcgctatcattggagtgccataggagaagacgctgccgtcggtgagttcttccgtccgtggctttcataacgtctaagaagccgacggctaatttcaatctacttacagtagcataaacaattgctggacatagatggagtaagtatttgtccaaaactccaaatacatagctaaaaggttactactatatagagagtaataattcattagtcacacaattaaactcactcacaccaaatgaatgatacttatcacatggaacccaaatattctcaagtgcaacaagacaagctttgtacagtagcagcagcagggatcagtgattagcagctgctagctgccaaagctcccgtgagattaggcttaatttatactccctccgtctcataatataaggattttgagtttttgtttgcactgtttaaccactcggcttatttaaagaattttggaattattatttattttttttacttactttattatccaaagtactttaagcagaatttttcgtttttatatttgcacaaatattttgaatgagacgaatggtcaaatagtgtaaccaaaaactcaaaacttgtataatacggagtgagtatatcacccacccactgtactattccgccgtacgtgcaacctcaattcactccaagatgatgagtggcatgcagacgccagtagtggccgtgggcgccacggactgggcgtggcggctcggcgccctcgtcgctggcgccgtcccgctgctcgcgctcgccgtctggcactgcaccgacgccttccaccgtgccgccttcgcgttccgccgccgcgggacacgacgcgcgagacggctcccgccgggccacatgggcctgccgttcgtcggcgagaccctcgccctgctctggtacttcaacctcgcccgccgccccgacgccttcatccaggccaagaggcggcgctactgctacggcgacggcgacgacgacgccggcatctaccggacgcacctgttcggctcgcccgcggtgctcgtctgctcgccggcgtccaacgggttcgtgttccggtcggcgccgcccggcagcttcggcgtcggttggccggacccggagctcgtcggcgtctcgtcgatcgtgaacgtgcacggcggccggcacgccaggctgcgcaggttcgtcctcggcgccatcaacagcccaaactccctccggtccttcgcggaggtcgtccagccgcgcgtggcggcggcgctgcggtcgtgggcggccaagggcaccatcaccgccgccaccgagatcaagaaagtaaactaaccatactcctacttgcttctcatggatgcaacgaattatatgttgcttttcaccgatcgatcgatggatccatcgagatcaggtgacgttcgagaacatatgcaggatgttcgtgagcatggagccgtcgccggcgactgccaagatcgacgagtggttcgccggattggttgccgggttcagggcgctacagttggacatcccaggaaccgcgttccaccacgctcgaaaggtgacaccctgtaaattaatttttctctgcttggatcggatttaacaacagtgaagctagagatggtagaacgtactactgtacacatgaatttgtgcatgcagtgccgtaggaagctgaactcggtgttcagggaggaggtcaagaggaggaagttgaaggcgaagttagaggagcacgatgatgttatgagcgggctgatgcggatggaggatgagcagggtcggcggctgggcgacgacgaggtggtggataacatagtctcccttgtcttgggaggctacaagtccacctccagcgccatcatgtgggcaacctactacctcgcaaaattgtccgctg

SEQ ID NO: 18665 - DNA, 1281 bp, Oryza sativa
acaaggaaccagaacagttacagagtacctgcacgagttcaaccgcctcgcgcgatacgcccctgaggacgtgcgtaccgatgccgagaggcaggagaaatttctgtctggccttgatgatgaattgaccaaccagttgatctctagagactatgaggattttgagaagcttgtggacaaggctatcagtcaggaagagcagtgcaacaaaatgaaccgaaaaagaaaggcatctcatttcagaactctctaggggaacagtcagaagcctcgcttcatgacgggatatcagggtggaccttccaccatgattatccggcaacattgtccctaccacccggacaatttcaacagcatcaacaacaatggcagtcacagaaatagtgagcagcacagcctcaaccctactccaagtccactaatgattccagctcagtcagttcagtcagctctgccagctcagccagaacagcccaagaagtttggagaaaacccgaactctacttcaattgtcacgagcccggacacatggttggtaagtgcggaagcaagacgtgctggactcaagtttgttcaggcccgtgtcaatcatgtgtctacagaggaggcgtagtcagcaccagaggttatattgggcacatttcccgtgaactcgacaccggcagtaatattgtttgcaactcattccttcatttccaagtgttttgctagtgcacatgggttatctttagtgaagcttaagataccaatgcgagttcatactcctggaggtggcatgaccacaactcactactatccatccgtgacagttgaaattcaagggttgatttttccagccaacctcattcttctcgaatccaaggatctagatgttattcttggaatggattggctaacaaggcacagaggagtgattgattgcgctagccgcaccatcaagttgaccagtgcgaaaggagaagtggtaaccttctagtctccaataccgcagaagccagggatcagtctgaaccaggccactggtgaagaacaagaggtagcagtggagaaaaccactaagaagttggaggatattcccatagctagagattatccagaggttttcccggaggatctaacatcaatgccaccaaaaagggatatcgagttccggatcgatttagcacccggaactgcaccgatccgcaagaagccttatagaatgggagccaacgagttggcggaagtcaagaagcaagttgatgaacagttacaaaagggatacatcctcccgagcacgtc

SEQ ID NO: 18666 - DNA, 2300 bp, Oryza sativa
ttcctgcagcccttctcgtcccttatttcatttcatcttctattttaacatatactttaaagtacaaatgtatagttctatactctacgctactcctagtataaaaccataataatccaaccatatttaaattcacaattcaaattcgattcttttaaaaaaaataaaatggaaatacaaatcctagtagcatgtattcatagctcgggtgaaacgagcttctgctactgtagcgcttccatgcattttctcacatgtgttgatttttcccgtcttctcatccacccatagaccagctacttctctcacgaagcaacaaccaagcaaaacaacaaaaaagctgcatagcacatcgcatgtatcactttccccattcttctaagtcccacaatcgcagctgctagtgctaccctgctactactttctcaattttgcagcctgcaacaacacttgaatcatccagtgcctcgacgccatcgcatgactcggccactgggccatgtttttcatcgagttcaggcagagggtgcaggctagaggagactccaggtacagcagacgcgtcggccgggaaggagcgtcgggtagaggaatgcacttgagggatgacacggtaggcagggaggagccgcaccgggcgggaatgagcactgggcaggggaggtgccggcggaccaagaccacgtcgggcagctcccgagcttttccaaccgtggatgggggctgtgcagtagagcccctgagactgggggcttggaaagattatttgggtgcctacctaatttaggatccttgatagggtgtcacatcctgatttttgtttcaggatttataaattatttaataaattattaatagaatttatattaaatgttctttaatttacaagtgaagttaaatgtgggaaataaaatttcctaaatataaagcatggatggatttaatttttattaaattctccatgattaagtcaactctctgaaattttctcggatttttcagagctcaattcctaaatgatacaaagaacagttcagtaattatttgatcattaatgatctaattataattgttaagagcttttcttgtttaaaatccttaaattataaattgttgtttaaaaggaattattagaaatgattttaaaagcttaaaagagaagatctaattttaatttgctaaatctcaacataaaattgggccagataaaattttgttaaatactttgcttaattctataattcctagatttttctgggatttatttgagctaaggaagtatttttaataaatggaattgcatttaagaaataattttaattgaaaaaggtttttaaaagtctgttttggctttgggccgaaagtcggcccaaaacctctctctttcttctctctctccccggcccagtcggctcaagtcggcccgcagcccagtccgccgagccgccgctctcctctctctctctcgctgtcgctgacaggtggggcccgcctgtcggacccgtcgtcttcctcgcgtcggccgccgcccgaaaccctagccgagccgcgccgccgtctccttccaaattcggccgcgtctttccatctccggccgaatcgtttgaggggaaatgatcttctcgatctcctcttccttttctcttttggaatcatcgtctttttcggtttggaaatccgtggattcgagttcgattcggatcgacttttctccctccaatccgacctttccttctcgccgccggtcgccgtgggccaccgtcgccgctcgctagcccctttaaaaggacccccgagctctcctctacccgccgccaccttcgccttcgtctctcgtcgtcggaagcgctctagcgccgtgtaacctagcgccgccgtcgtcgccgtcgctccagccgtgcgccgccgccgttccagtcgccgtcgtcactcgggaaggccatcgtcgggatcgccaagttgccgccgtcctcgtccgccccttcgccattcgccggcgagcgtgcgccgtccgagccgtctgagccgccgccgccggaggtgacgtcaccgccgacgtcatcgtcgccctctcccgtgagccggtcgtggaccgttcgatctcggccgtcctttttggacagggttgatctcggccgtccgttcccgtgaaccgccgccgtgcacccgatccaccgcaaaccctagccgctgacgcaataatcattcttttccttttcaaaaataattcattattgcgtcataattcaattaaaatccatataagtgttttaatccgatttaatctttaaaaattcaca

SEQ ID NO: 18667 - DNA, 3082 bp, Oryza sativa
cgccgctatcctctctctctctgtcgctgacaggtgggacccacctgtcaggttcatcttcctcgcgccgccgccgccgcccgaaaccctagcgctgcgccgccgccgccgctttccaaattcggtcgctcctttccttctccggccgaatcgattgaggggaaacaatctccgcgatccactctatcttttctcttatggaatcgtcgtctttttcgctttggaagttcgtggattcgaggtcgaatcggatcggtctctttcctccgaaccccgatctttccttctcgccgccggtcgccgtgggcctccgtcgccgctcgctagcacctttaaaacgacccccgagctctcctctacccgccgccaccctcgcctttgtctctcgccgtcggaagagccctagcgccatggatctagcgccaccgtcgtcgccgtcgctccagccgtgcgccgccgccgttccggtcatcgccgtcgctcgggaagaccgccatcgtggtcgccaagtcgccgccgtcctcgtccgccccttcgccgccgccgaagactgccggagcaccgtcgccgtcgtcgacccgatctccgccgccgcttcttcctcgtcgccggcgccgtccgttgcccttccgccgttgttttggtcaccagtgagttcgccgcgtcgccctctacccgttggtgtcctccgtttgcgtcgtcgcgccgtcgttcgccggcgagcatgcgttgccgagccgccgccggtgctgacgtcatcgctgacgtagccgctgacgtcatcgttgccgtttcccgtgagccggtcgtggaccgttcgatctcggccatccgttttggataagatcgatctcggccgttcgtttccgtgaaccgccgccgtgcacccggtccaccgcaaaccctagccgctgacgcaataatcctccttttccttttcaaaaataattcattattgcgtcataattcaattaaaatccatataagtgttttaatccgatttaatctttgaaaattcataactaattcattgtaactcagtttaatgtggttcaagttgcaaaaattatataaaataaagatctacatattaaaattgtccataaattgaattaaatttatttaatcctttttaaatgggctttaaatagatttaatcttgtaaaattcataataaattcatttgaagtcagaatgaggccgttcaagtctcataattcatctaaaattatgatctacatgtttgtttactttttatgtattgtttatttggtttttattagtctttttcttcgttttgcgtgttagcttgtcgtttccgtcgttgcgaaggttcgcgagtgcgccggaagtattcaagaagattaattgaagaccgattattgcaaggcaagtcacaccgatcctaaacacaatcctttgagcatgttgatcctatatttaaattctctatttatttcaactgtgcatttattttcgaatgtcaccgggtggtgtgaacttattcctttgttatggccaatttgcattgattactttattccttgataccttgggttattataacttgactagttgagctatatatattggttcagctagatattagatatgattgcttagccatgcttagaaacagtagcacactattgggataacttatgactaactattatttaatgatggcttaatgatagttcacgatggtcaatcgtgattggttaattaattacttgccaactaaaacttgataatggtgggttgtgagcacatggttttgagagtcgtgctcatgacaattaaggaccggttcgcgagctactattgtgaaacattaatcgtgccaaccacaagccagcgtggacaacggctttaccttttgtatagcatgattcattgcggagcaccagactgagaagtggcggagataagcccacgggggtcgctggggagtccatgccttgtttataagggggtgattatgatccaggaaaggtgcgctgtggtggattgtgttgtgcaaggggtattgtcacagctcctttccgaggtaccgtggtggtactgaggcacatggtgacatgttgtggggctgtgtcttgtgggtacagtggtacacctctggccagagtaaaactattcgaatagccgtgcccgcggttatgggcgggttgaacaatgtttttcgtgattagtctcacacctctcacaataattatagatgctatacctggtaataatttgcttagctcctggtttggagattagatctgtacagccgggtatggttgcttcagaatggttgggcctgtgcagcatgggcgtgttgttcagtgttgattaaaattaatgattaaagtactctactgttttacttgtcttaaatgttttgctaaatgctgtttttgcaaatgagcctatattatgccaacctttggtatccttgtgcacttgcatatttgctgtgtggcttgttgagtatgtcatatgctcattcttgcaataatcaatcaacctcagttgaagaaaaaggatccagaaggagaagacgtctggcttataccccagttgagttgcctgtgggagtggagccggagcttcgctagattttattttccgctgcagttttcttcatggtggggactaagtgcctcttaagtaaatacttatcgttttagttaatttgatgaatctgtatattaaattgtcagtttgtgtacctcggctgattcctggacgaggattttatgcacaaataagttcggaaattactagtgaatttccgggcgtgacataggggctctgctggattgagttttttagcctcaacacccaaaatctgtttaggggctatatttagtgtccctgctggagatgctcttatgtaggctgacattgattgccccccataatcagttttggttgtgcactagacgatgcggaccggtatcgatgtggttcttaatttcttagagggggcgagtgcggataccagtgagggggaacctttccgatatgggtatgatccaaccgatactaattaggttgtgtacgttctgtaatactccatccgtttcagttt

SEQ ID NO: 18668 - DNA, 2010 bp, Oryza sativa
ataaaatagctctgcattttacatggtgactttctttactttaaatacgacttgtaactatatgtccatacatttgtacaggaggaacaatcaactctgttactgttgaatggctggagcaaaccacgacaaaatcaaacaagtgatggctagaaaagctagtttcgacaacaatgttacaaactcattagtttcagaacttttagttttatcagacaacttgtatttcagcatttggaaatttaacatactcatattgtcatcattactttgggtatctgaaatatattatgtcttattcgcggaaatatcagacatcataattcttgtgcgcatgagttgcaagggttttgccatttaacatatatttctactcatgttgcaatagtaccaaatgatccatccaattactgatgtaacacaatttcttttctataaaagctagaagaaattcatttcattgtaataatacttattgccacaaaaatattttagtggcaataacccatatgatatattgccacgattaatgctatgtggcaataacatatattagatattgcaacgaaactattttgtggcaagcacaactaatgccacgcacgaagtggtggcaataattatttgttgcaacgatgttaagtgttgcaatatgtttttttgccacgattattttgtggcattatcaaagtttgttgccactagataaaaattgttgcaataacctattgctactgtttctattgccacggctagcaacggttttaaaatggtggcaatatgtatctattgccacgattttagcattgttgccacgatttttttcgtagcaacaaatcattttcctagtagtgatagagaggtttacattttaaaagagagcgattaactttgcaaataaagtttaaatccaagttaaaagaaattaagagaaggcaacatcacttcaacagaagaatcgagaagagtgcaactaaaatattttgcaaaacattttccctgaaaatttgagtctgtcaatggtggagaaaccctttgtagtcccggtttataacccccctttagtcccggtttccaaaccgggagtaccaatccgggactaaagatcgctatctttatctttagtcccgggtgaaataaccggtactaaagatcgatcttaccaaccgggactaaagatcgagctgacctttttttttttgcatggccctgtgtacttatacatatatatgttatgcaaatgcatatgtatatatacaaacaaatttactatatatatatatatatatatgaccaaaatatatttacattatagaaaatgtgtacacatgcatatagaaacatatgtagtcatgtattaattacaatccattatatgtcctagatagctacgatttcgacgtagtagtagtactcgctgctagctcagaagctaaggaccggtgaattgtgtttccgtcgtagtagaattcacccttgggatcaaggatttcttcgttgatgaatcccatgagttgttcttgaaccgccgcgataaattccttgtgtgtggtcaggttatccctcatgcgaataaactatatgaatgtatgaaattgattagtaattaaacaagaaatcgttacgtaatgaaattttgaatttatttgtacgtacatcgagctctcttgtggtgatgatttggtctgcaaggcagtggcaatactcgcacacgtaatagctgcacaagttagttccctgcttttgctttgcgcactacaaataaatgacaaacaacgagagatctaattaatatacacttgtatgtatttgaatcggagaaatataaatatagagcatgtgtactcacaggaaatttgaacttccgcctaagtctttctctccatttgccgcggaccaaatgacggaatcgataccaagccctacatggagtttaaagctatgattcgtagtagcaattaacataacaagattttcttaattaacagaggaacttatgacggtacctgt

SEQ ID NO: 18669 - DNA, 1701 bp, Oryza sativa
ttttaggcggcataccaggtaaatcatctgggaacacatcgggatactcccggactataggaatctcttccaaagttatttggttcagtcttgaccttaaggactcagaagacaatgcatgaacagttacaactcgaccatcattgctggtgagagttacttttctgttggcacagtctatcacacctttatatctggctaaccagtccatccctaggatgacatcaaggtctttggattctaacaggataagattggccagaaatggtactccttgaatttctattctgacagagaggctacgttgcaaagagagtgcttgattacttggggtactaaccatcaaaggacgtctaagatcttctacttccatcccatgatttcccgcaaaactcatagataagaatgaatgtgtagcaccagaatcgaaaagcactgttgcaggaactaagttaacaagaaacgtacccaaaatcacatctggagcatcttgagcttctgcagcagcgacatgattaacacgggcctttggcgctggtgcggtagagttgctctgagcagggacaaccttcacgcgtcggggcttcggacacttgtcagcgtaatgtcctgggtctccacagttgaaacacaccacgggctttctgccttgctccctcttggcaggttgttgctgtgtcgaggctgcaacagggcgtagagcttgattgcggatgttgttgccagcattgttgttgaagaactgacgctgcggacgaacaacagacgaagaacctccctgtggcatggactggggtcctaaagtaagacgcggcctctgactattcccctgttgtgtcttgaattgagcaatccgacgtttcttctgctcgatgcgattgtacttgtcctcctggcgaatagccttatccactaacttctagaaatcaggataatccccagtcatgagtgggtaagaaagctcatcattaagtcctgccaagaacttttcctggcgctcttcatcagtgcgtacatcttccggagcataacgagcaagacgattgaactcgtgcagatactccgtaacagagcgagatccctgagtgagcgacctgaattccttcttcttgagagacaccactcccgatggtatatgcgtcttccggaaagcagcggtgaattcaagccaagtgataggttcagcagtagtcctattcagacggaagtgatcccaccattcagaggcagggccatgcaactgatgggatgcaaatgagaccttctcctgatcagtgcattgaagcaaatccaacttcttctctatggcatggagccaatcaccagcttcaacaggattagtggtgctagagaaaataggcggcctcacacgaagaaattctgctaacttgttttggggaggcgcatagttatttccctggttttgctggttctgaagttgctgcatcatcatgttcattaactgagtctgttgagcaagaacttgggcaagtgtgggattctctccattgttattgttattgttgttgttggggccattcccgttgctgcgagtgagcaccatctggcatggacagggcacaagaagagaaaccgggggaaactacttaggacagagaattactttaacttttattgatcttaactgagtttcattattacaaaactgaagactctcacaccactaaactgtcacgcccg

SEQ ID NO: 18670 - DNA, 695 bp, Oryza sativa
cagtatatgtggatatttttaacatgtagatcttgattttagaaaaatttagcaacttgaaccactcgaaacggatctacagttatttagttatgattttccgaagatttaatctattagaaaaacgggaaaaagaaaaaaccgatgatgacatgatgacatcaccaaaggtggccggctaggatggcaagctcgccggagattggatgatcggctgcgaatttggaggacatgtacgcgtagaggacgacgagacgaacccaacggtactcaccctcgagccaaacgacaaacgacgacggccggcgacgaaggggcggcgacggcggctcgggataaccggcgacggcgagctacggcggccggcgacgaaggaggaggtgcggccgagcttctcgtcgctcccacgcacctaatggcggtggcggcaagcggcggcgacggcggagacggctgcgcggcggcgccggagatggccggcgacggcggcgaggctaagcagcggcggcgcggcggctaggaggcagggagaggacgggagttggggcaaacgaaagaggaggactagggggtcctagttatagccttggattgaagagatcggactcctcctacaagaaatcgatccgggaaatcaaaaactcggttttggagataaactcaaaaacgagttcgattcggataaaatactcaac

SEQ ID NO: 18671 - DNA, 9783 bp, Oryza sativa
  unsure (1)..(9783): unsure at all n locations
attcctgcagcccagaactgcatgcagaaggttcgaggggaattttgtcgatgacattgaagcagaaccgagatagagggagaacacagttgccgttgtgacatgtcagggtagggatgaaaacggatcggaaacggacgtaaactagctttatcatattcgttttcattttttttggaatcagaatcaaaatcgaaaaccggaacgtaaatgaaatcgaatattatcgaattcaaatacggagcgaatacgaaacagaacgaataagtaacgaatatttgcagtatattaaaatcccctcaaattgagtttctccaaaatttatatcgtcaattttgtagatggtcctacaaccgtatgtgaaaattgattttcatggcaaagagaccaacatgtaaatatgattattcattttctattcccaagactttttactgtatatatagcttacttaccatatcacttatcataagttcttgatgtataaaatggatatgttctttattttatttcacatcttcaaaacgtgtagtgtctgttttatactttaaacattttcaaatacaaattttataaactacaaagtggtagatctcattgagctctacaactttgatatggaacacatctccatcacatgccgtttgaattgtagatctaagatttttaaaaataaatttggtatttgacaatgaatatttagacccttaaatgatcttttatttagtcagcaagaaagctgtagatctcatcaagcccagcttctaccaatntntntngaantanttngnaanangntntnannantncnattnncntngnanccnnttnnccnccttttnaattngaaaaagtttaagtatacatacgtggtttttctaaaatttgatccatgtctgcagatatccgaataaaattcccagatagtttccgaccgttttccgattacgacggatagtacccttactgtatttatttttgtttccgagaataaaaatctgaattcgtttccaaatctagtaatttccagatagttccaaccgaacctatccaaatccgaaaaatggtccggatggacggaaactattcgtaccagttttaaccctatgtcaggatacattgcttttgaggatcatccaccgtgtaacttctatgcagatgcaaacctttgttttattcatcgattaatcagtttcttcgtcccagtaattcatcgaacaacaatgaatcgtataggccggatattaattgtatctaacgctcaaactagctattaactacgagcgtacgtgaatcggatacaacacttaactacatattacatatatgaagtgatcgactaacacaaagtcatcaacagcatacaaattcaccagtatcatttcaacacagttagtttgaacatatcttcccctgcagtacagacgcagaattattgcagaggatcgatcgatcgatcatatcaccagcagctttaatttctccaagcttttagcccttgcactggtagatgttgaggcagctgcgtccgctgtacggctggcccctgccggggcaggagccgtagcacgccgccttgctctccgtgagcccgttgtagctggcgtaccggctgtcgtagaggatcctcctccgcgggtacgctgcctcctcctcctccaccacgctcgccaccacgtcctcgacgtcagccacccggccgcgcagcacgtgcatcggcaacaaggcgccgctgctgccgacatccaccgccgccaccagcaccaacgccgcggcgacgacggtggcggcgaagaggagcatcagcttcatactgtatgtcagtacttgggctagctgctagctagctgagacgaataaaaatggggtggtttttgtgctgtttagctatgtatttaagaggaggtgggactggattggagggtactggatcgaggaggtggtggtggttgagggcagggagagagaagagcgagagctactctcttcgtcaaaaaaaaaaactaatttttagtttaaatctggatatatatatgtgtctaggttgaaactcagaattagtttatttttttatggagaaagagtaggatcaagcaactgaggcagcgacaggacgcctaacatcgcatgtgaagctagaggacgagagagtccagcggagcgtgtctctcatgatggatttgattagcaagaagcgactgctttctctttggaagcgtatggtatggggttcgatcgtactgtgccatccggcacagggtacgtacgtacgcgtgcaggagttaattaaaacattttggatggtgaggacgaaggattaattaattggcagctatgtacgtacggctgttaggtgcacttgatgatcgttagttaatccctaagcagaacagtgccatcgccatgacggaatttggggagtatacagtcgtttcgaaatatatatttagtttcagattttggattcatcttagggttgttttgtataccatcctgttttttggggatacgtcttgctcccacgcaactacgcaaggtacagcacggtaggacagtagcacagtagcagtagtgccttatgttttcctagcctcagatgcacattggaattccgacttgtggatgcacacgctgtgccgagcttgtcgcgccgactgccgacttgccgccttcctcagagacgccggccgagcacggcctaataatccgatgggctgggccagcccaagcacggcccatgtgccggtccacttgatgccggccgggaatataataagttcactctaggtcccttaatttgtcgctcagttaatttcgtccctagacaggaaaaccgggtacagcacgtcctccaacttttaaaaccgtgcaatcgagatccctcggcagtatttgaccccggttttgaccaatatggcgcctacgtatattgtttgactaggtcttcgtccgacgtggcacttgcgtggcgcttacgtggcaatttgatccaaatataataatgaaccctatggggcccacatgtcagtttcacacaaaataatgaaaaaaaaggtagggcccatgtagccccacatgtcatctctatcctctctgtttctcccttcttctctctttctcccttcctcggcaagcatagcaggttgggtggtggtcggagcaggccggtggcaagaaggccccctctccctccttgcccgacgacgacgactactagcaccacacgccgccgccccaccgggagatgacgagttggagatgagatagtggagagggaggacgaggggaggccaacgagggtggcggagaggcctcccggcggaagtggatggccagcgagcgcgcgcgaagagagagaagaacggcggccagcggctggagggaagaagggcggtagacggcggccatcggggagaagggtgatgactagcaggaaggagctaggcgacgacgacctcgagcggaggctgtggatccgctcgccgcccttcacccctcttcctcctggcatccttcgtccctccccgagctccatggcttgccgggaagcaccacgtcctgttgcggagtggctcccccatgacaaggtgttagatgcacacggcgagctcagcgcagaggtagtcgacgctggggcgggacatgcggaaggtcgcggcaccaggggatgtgggcagagcggtcgagacatggcgaatccactcgtctccctccccacctccatccatggcaaccctgcagcaggctcccctccccccccacccccagcggggctcccccttctccatgcgcaccccgctccgcgcccctccgtacgacccccgtctccggagctcccgcctccctccgctcccatgggcgccgcgccgcgtcggcgtcggtctcaaactccagcatcttattccgatggaagggagaggtgccgctcgcctctgcctccgctgctagctagaaggtttcctcccacaagtctaccgccatagcgtcgccgcggcggcattcacgccactccccccatcccactccatcaggagccgcgccgcgaagaacagaggaagaagagcagcagcagccgcaggggattgaggatggcatgtggggcccatgtaggccccaccattttttattatttggtgtgtgaaactaacaagtaggtcccacgggtattattatttttccaaatcgaattgccacgtaagcaccacgtcagctaaaaccgctatataaatcgtcgagggacctagtctgcaccggttttaatagttgatagaccagttatatatggtttttcggttgaatcacgaaaattggattcgttgacaagttagccattcccaaactcaaaccacaatccaccaaccaccaacaccagagcgaaccgggagcggtgtttggatttgcgccgggcggcccggtggagaaggcgtgtcgccgcgcggccgctatcgtgaggcaacgagctcgctgcttgcctgctcgcacactgcctctttcagcctatgcctccatggtgaagcaagaatgaaaattgatagtatcagtttctttttcccgtgccgaagtgctgatatcactgtgtgttggatttgattacggcatctaatcattaggcaggaaaataaattattgccctctaatttttttgaggcatccactgcatattcttgagacaaagtttttgagaaagcaatttattaataatagggatacaaagttattgtctcattaaaaaaaaacttatgccctagaatacagctttcaccgtaagaaaaaaaaaagtacaacagctgacttacactatcacatagattataatttatcacatacattatcattttaattggcacattcgtcatcattattgatgccaaaatccatcaaacactgccattgcttcaacaatctgctgccatccagtcttaaagggcaaaacaatttacacaactatctccaatgcaaggcatgacctacattcttcaataattcttccgatcccgttaaatgcttactatgaaggtatagaacacgccataaccaatagacttgtgaagtgagctaagataagaatagtgtgttgtttttcttttcaccacccaaggagatcgacatccgccattaaacgtttgatcatgttttgtgtgattgcctgattggtgctgaggtagtgggtaagttctgtatataggttcaagtttgacctggtgcctagagaggagagttgttctactcaggcacaaattgaaggtgcttgatctactcaggcacccagcgaacaactcctaacttcatttgatatagacgaaaaaccctatctgttgaaagtgtcaaaaaaatctttagaaaaatcaagatccactgcatcacccattgatttgttagcaatctctacaatttccagctttttgtgaggatcaagtatgaaagcaagagaattaaatatgtggaatagcagtgaagtatttgagaaattttgcttccatgagttgaacaatgggagctcaaattctatcaaaccgattttcttcaaacacaaatgacaactgctaaagccattcaatcaccaaacaagatgtattatagtgaactcaagatagttggattatggcattattagatggctttaagaatttacgcaagcatgtagtgatgtcccataattgctccgtaaaaatcaaaatctcaccatcaccatccttattgattgaattgatgaaaacaaaaattaattcctcatatcctttcacatgacgcagcaagatgtatgttgccgtcgggattacctagcccgttgtgagtgttcttgccatactcgtcattgtgtcgcccctagcacctagcatcgatcgtgcccctttcgttgctagatccacagctcgaggcgagtagggcactatgaccatggatggtttggtgacagtaccagcgcgtgggagcttggtctgcttgatgccgaaattggtgatgattgtgggctccacactctccctagaggcgatgtcacgatggactcagattgggatccaggtgaaaagttggtttcgggtgtctagaatggtgacagctgcatcctttgatgccatgaccttgttgaaggcgtcgcattggaagcccccggctccatgtacggcgtgataatgttgggccgtcggcctaaccttccttcctcccgcgccctctctccctccttgtcgggccggcccattgcccctcctctcctccctccgggtcatcgacaggtggggcccaactatcggccccgtcttcttcctctagccgcctgcgcccggtgggcaaccgccgctcccacgtcgccgtctgcgtctcccgcgcccactccgcgtccacgcgccgcgcccacatcgtcgtccgccgctcctccgcttttcccgcttgcgcgcacgcccgcaaatgggcgggattcgatttgaatcacatcccctctctctctccactcccccacatagccggccaaatcggccacctccccggccacgtccgcccctcccccgcccataaaaaccctcccccgggccccctctctcgtttcccactctcgccgccctttctagtgcttcctaccgccaccgcaccgcgctcaccgagctccaccgccgccgcccatctccggccgcgcaccgccgccgctagagccaccgccgcgctgcgcaatcgccgccgtcgcgctcaccaagcccgcccgcacctcggtcgccgcctggttgtcgtcaatcgctgccggagcccccttctccccgaaagccggtgagcttccccatcccctccgcctccggccgtcaatggcgtgcgccgtggtcgccttccctactcctaaccccctttatgctctctactaaggtgccgtcgtcgcctcctcttccgcgcgcgcctccgctcccgcatacgcgtcgtcgcgctgcaccgccatctgcgctgtcgcccccgtcgccggccactgccgctggccggtcgccgggcaccggccgccgccgtgagccatgcctgggccggccttggcgccgcccgtccccagctgcccgctcggcactcggccgatcgtggccgtccatcccatggcccgcgtggccagccacgtggtgccacgtcagcgccacgtggtacaccaccaccccggccccgtggacccggtccacggtggaccaccccctttgagccactgacctatgggccctgcctgtcggtgctcctccctccccccccccttcgctgacatcagccctgggcaatattgcgcaacaaattgattaaggactttttctttattagaaaaaacacagattatcttctaaaattcttatttaattcattcgagctccattcaagtctcagtaaattcataaaaatccctagaatccattaaaaatggttttgttctctgtttcagtagtcttatagtgtgttttgcttgtgtgctttgtttgtcgcatagatctcggccgtttcgtcgatccacggttcctcgaagacgttgctgaggtctcatcagtgcgagagcaaggcaagtcatgcattacaattgattatattgtacccaatttacaaatatcccgcatttctattaaatgttgtattcttttacaatgtcatgtgggatgagtcctattactcagccatatattgtttaccttatgccattgataacttgggtatcaaaatgattggatgttggtttaggaaatgcttagccatgcctagttcaactagtacacaaacggagatcacattattacatagactttgtctattagcatagctttggattggtgccaccgcaatggtgttaattaattaaaatacactgaatggtgggctgtgggtgcatggtttcgctggtcacacccatggcaattaaggaccggttcacgggaaaccctaggagacttaccgtgcttaccacaagcgggagtgggtaactgcttgatctgaagtatagctcgaccctttcctaggcaccgatggtgagggtaggcgtgatggagttgggtcggccggggtatccggttgtccagctgccggattcatcgcggcgcaagaggggaccgcccactgcctttttaggggtgggggtgaaaccttagcatggtgtggatggttatgggagggttatgcggagggtcttgtcacaatttccccctttgcagtatcatggtgatacttcggggcatggcgacatgtgtggaatcgtgtcttgtgggtagagttgtacacctctggccagagtaaaactattcgaatagacgtgcccgcagttatgggcgatcaaccagattcaccgtgattagtctcacccctagtttagcttaatgaactgttgtagttcaggtggttggttgggcccgttgcaacatgtgtagcgttggacagtgattggttaatattgactaattactacaattgttttacatctttcaactactgtttttaaatgtatgctttattgcaaatgaacccttagcctcctttggttatatcctacatcatacctcctcttccggtatgacttgctgagtacagtgagtagtacttagtcttgctctcttttcccccacaccagagttgaagttcttctcagttggagatgtctcgaagaagttggtttcgtcgctgccgtcaaggatgcctgtggaatggaatcgctcgctgcaggagtcaagtcttcaagcttagctcgcttttatcttttccgctgcatttgtaatcttttatatttttgtaagacgtggatctgtatgtcaataattgtcgtttgtgtaccctggttggtcctggacaagggtttaatgcatattcagcttagaaattctggttcgtgaatttctaggcgtgacaagttggtatcagagccgaccttgaccgtaggacaagccaactggaaaacctaaaagccctctgaaaccttttcatctgcatatgctctttgcacttggatttgtttcgggaaaattttggggtatgttcttttgatttgtgggaaaaatcttggtcgctcatttaattggatttctcgactagggaaagtttattcggaatttattcgacagtcggtcgggaattattgggtgatatgcactaagtagtgtataggttcgatggggagattttatgcatatcattataactatgcatctattttatgcattaatttattgtttagtcagatgcattagtatctttatctgggttcatgaaaaatgttctatgcataaaaatcgccatgctcagttatttgtttgagtcatttgttgctttgtttatttggatttgagcatgtgttgattcctatcccttgtctattttagatgtcagacctgttcttcgatcgcaagcgtcgctccgagcttcagagtcgccgcccttagctttatcgtcttcttatttttgtttgcttgctactttccgtgcttaggtttgttggttgtgggttagtcggcggtcgatatcatgtgtcagtggtatggctgctttaattaggagttgcgtgcctctttttcggtgttttaatcaagattaagataattgcacctaaatttataagaaagattagtttctaagccccctgttttccttcatttttctcatatttctacatatccccctctagatggtgaagacaggaatggttcccgtgaatccaacaacgtcagtggcagcgaagagcagatcggtggagcacgtgccagtgatgtatctaacagcagttcatctccaccgcatgagaacccaacgatcgctcaggtgttggataatcagactcagatgatgaca

SEQ ID NO: 18672 - DNA, 1981 bp, Oryza sativa
  unsure (1)..(1981): unsure at all n locations
gccatctgcaccatcacccccatcatcgaccgctgccgttggccgatcgccggtcaccggccgccgccgtgtggcatgcccgggccggccttggcgccgcccgtccccagcctgccgctcggccctcggccgatcgtggccgtccatcccatggcccgcatggccagccacgtggtgccacgtcagcgccacgtggtacaccaccaccccggccccgtggacccggtccacggtggaccaccccctttgagccgctgacccgtgggccctgcctgtcggcgctcctccctcccccccccccttcgctgacgtcagccctgggcaatattacgcaacaaattgattaaggactttttctttattagtaaaaacacatattatattctaaaattcatatctaattcatccgagctccgtttaggtccattcaagtctcagtaaattcataaaaatcccaagaatccattaaaaatagttttgttctctgtttcagtagtcttatagtgtgttttgcttgtgtgctttgtttgtcgcatagatctcggccgtttcgtcgatccgcggttcctcgaagacgttgctgaagtctcatcagtgcgagagcaaggcaagtcatgcattacaattgatcatattatacccaatttacaaatatgccgcatttctattaaatgttgcattcttttacaatgtcatgtgggatgggtcctattactcagccatatattgtttaccttatgccattgataacttgggtatcaaaatgactagatgttggtttaggaaatgcttagccatgcctagttcaactagtacacaaacggggatcacattattatatagactttgtctattagcatagctttagattggtgctaccgcaatggtgttagttaattaaaatacactgaatggtgggctgtagatgcatggtttcactggtcgcacccatggcaattaaggaccagttcacgggaaaccctgggagacttaccgtgcttaccacaagcgggagtgggtaactgcttgatctgaagtatagctcgaccctttcctaggcaccggtggcgagggtgggcgtgatagagttgggtcggccggggtgtccggttgtccagctgccagattcatcgcggcgcaagaggggaccgcccactgcctttttaggagtgggggtgaaaccttagcatggtgtggatggttaggggagggttatgcggagggtcttgtcacaatttcccactttgcagtatcatggtgatacttcggggcattggcgacatgtgtagaatcgtgtcttgtgggtacagttgtacactctgccaanggtttaanannnccaanccttnaatntncgnanaataangncncngntnggcncncgncggtnntaatgggcgatcaaccagattcaccgtgattagtctcacccctagtttagcttaatgaactgttgtagttcaggtggttggttgggcctgttgcaacgtggagtagcgttggacagtaattggttaatattgattaattactacaattgttttattgctttcaactattgtttttaaatatctgctttattgcaaatgaacccttagcctcctttggttacatcctgcatcatacctcctcttccggtatgacttgctgagtacagtgggtagtactcagtcttgctctcttttcccccacaccagagttgaagttcttctcagttggagatgtctcgaagaagttggtttcgtcgccgccgtcaaggatgcctgtggaatggaatcgctcgctgcaggagtcaagtcttcaggcttagctcgcttttatcttttccgctgcatttgtaatcttttatatttttgtaagacgtggatctgtatgtcaacaattgtcgtttgtgtaccctgactggttttggataggggtttaatgcacattcagcttagaaattctggttcatgaatttctgggcgtgacacatatcctc

SEQ ID NO: 18673 - DNA, 786 bp, Oryza sativa
ctgcagtggtaagtccctgaagggtccgttgggatggccatgcccgacgccaccttcacatggtgagaggttatttattattaatcaatatatataagcagcaacttgcggaatggacaagtctaaaatctataaactacgagattacctttattgataagttctcaaagggaatatgcagctcacatggtgtccaccgagtgatgacattaacggggcaggtggtttcgtcctgtatttgcatggcgtccatgctctgtgatcctacctgccccgttgaggcgcagctgctacgattgcctgaagggctgaccattgcaggaggaatgtacggctggggatctagggaccgatgtgtggccatgcgttcatccaccttccttgccacctcctcttgcatgctaagctcgtagctcgataccctgtactcaagatctgcaatcttcgcctcggtatctctcttgctcctcattcgactcctgtacgtgtggatgtcctccttgaatccaatcttccaaggaatcacccctttccctcgtgtttgtcctggatgcttgggagtctgcagggcgagtgacagctcgtccttctctctgtcgggtcggaacgtgccctgagaagaggcttccactgcgtccgttagtcgacttgcagcctcgcgtatctgatcgctgaagaccagggagccatcaactgggttgagcgttccaccgtgagcatagtaccagaacttcgattgatccggcatttagcggtggccggttcgatacccctctcaagcaagct

SEQ ID NO: 18674 - DNA, 10060 bp, Oryza sativa
cccttagcttcgggaatgtgttgaagttcggtgtctgccccttcacgatatatttctggtacagatctcccttgatgctatgaaactgttctgccattttctttagagttcaccttttcactatgttctctatacccgcgggaagggtgaatgtctcgagcattgtggtccacagcatctctttctccgaatctgggacaaagctctcatgatctccgcgtgcccttattctgcgccagtacaccgtactgacagacacgttatcctgcacaacccaaccgttgtgtcgtacgtagttcttggctgcttctgccggggcactaggtcggccgtcttcgtccacttccgttatgatgtgttgaccctctagcttcttcgcggcaccttgttgtccgcgtgccctcttctgtcagcggagggttgacttccactagcctcctcctcctcgttcccctccacatccctctccacgttcccctcctggttcctctccgcatccctctccatgttccattcctcgttcaagtactggtttggatcctcgttcccctcttctttgttccagtactggctgcttccctctgcgattgtatcgtacaatatctgttcctcatcgcaatcagccatctgttcatacaagaaatatttgctaagtctataggtcatatttgctttaacaatcatatatgctaacaatcatatatgctaagtctaagtgtcgtatattagaaccctagataataattaaaactataccaatcttgtattaaaactctaacaatcatatatgctaagcctaagtgtcgtatattagaaccctagataatcatatatgctaagtctaattacaaatctaataatcttatattaaaactctaataatcttgtattaaaactctaataatcttatattaaaaatctaatagtcttatataattagtcctatattaaaaatctaataatcttatattaaaactctaacaatcacatatgctaagtctaagtgtcgtatattagaactccaataatcatatatgctaagtctaagtgtcgtacattagaaccctagataatcatatatgctatgtctaagtgtcgtatattaaatctaatagtcttatattattagtcctatattacaaatctaataatcttatattaaaactctaacagtcatatatgctaagtctaagtgtcgtatattagaactgaaataatcatatatgctaagtctaagtgtcgtacattagaaccctagataatcatatatgctatgtctaagtgtcgtatattaaatctaatagtcttatattattagtcctatattacaaatctaataatcttatattaaaactctaacaatcatatatgctaagtctaagtgtcatatattagaattcaaataatcatatatgctacacattagaaccctagataatcatatatgctatgtctaagtgtcgtatattaaatttaatagtcctaattatattaaaaatctaacaatcatatatttacatcacttgcctgcgcgaattctgtcacaccctaaaaatcctaaatatataaattgttgtttaaatggaattattagaatttattttaaaagcctagaagagaagatctaattttaattaataaattccaacataaaatggggccagttaaaatttcattaaatactttgcttaattctataattcctagatttttctgggatttatttgagctaaggaagtatttttaataaatggaattgcatttcatgaataatttaaattgaaaaaggtttttaaaagtctcttttggctttgggccgaaagtcggcccaaaaccttctctctctccccggcccaagtcggcccagtccgcagccgcgcgcgctcgtgcgaccgtcgctgacaggtgggtcccgcctgtcagagtcgtcgtcttcctcgcgtcggccgccgcccgaaaccctagcgtcgcgtccgccgccgccgctttccaattcggccgcgtctttcccgatccggtgaaatcgtttgaggggaaacaatcttcgggatctcctctaccttttctcttttggaatcatcgtctaaatcgctttggaagttcgtggattcgaggtcgaatcggatcggtctctttcctccgaaccccgaggtttccttcgcgtcgccggtcgccgtgggcctccgccgccgcctcctagcccctttaaaaggatccccggtgtctcctctacccgccgccaccctcgccttcatctctcgtcgtcggaagcgccctagcgccgtgtgacctcgagccgccgtcgtcgccgctgctccagccgtgcttcgccgtcgctccagtcgtcgtcgtcgctcggggaggtctccatcgtggtcgccgtcgcgtcgccgtcctcgtccgcctcttcgccgtcgctatcaaccgccggagcatcgtcgccgccgtcgacccgatctccgccgccgcttcttcctcgtcgccgacgtcgtccgttgctcttccgccgcttctttggtcaccggtgagttcgccgtgccgtccgctacccgtgggtgccctccgttcgcgccgccgcgccgtcgttcgccggcgagcatgcgtgcccgagccgccgccggtgctgacgtcatcgctgacgtagccgctgacgtcatcgttgccgtctgtcgtagaccggtcgtggaccgatcgatctcggccgtccgttttggataagatcgatctcggccgttcgtttccgtgaaccgccgccgtgcgcccggtccaccgaaaaccctagccgctgacacaataaatccctttttccttttcaaaaataattcattattgcgtcataattcaattaaaatcaatataactgttttaattcgatttaatctttgaaaattcataactaattcatcttagcttggatttagttggttcaagtctctaaatttttctaaaattgagatctacatgttaaaaatatccacatgtactgttcatgcttgtttatgtgctgttctggtgattttgctctttcctgtttagattccgacgtttccggagagtctgtttttgcaggaaaagaatttgaagaattccaaggccagcaaggcaagtcacacagatcccaaacaaccctttgagcatgttgatcccgtttaaagctattgttttcattcaactattgcatttattttcgaatgtcattgggtggaattaacctattgtttgttatagcccttttgttcttgattactttattccttgataccttgggttattttaacttgactagttgggctttatatattggttcagctagatattagatatgattgcttagccatgcttagaaacattagcacactattgggataacttatgactcactattatttaatgatggcttaacgatagctcacgatggtcaatcgtgattggttaattaattaatgtgccaattaaaacctgataatggtgggttgtgagcacatggttttgagagtagtgctcatgacaatcaaggaccggttcacgagtttcggttgtgaaacattaaccgtgccaaccacaagccagcgtgggcaacggctttaccttttgtatagcatggtttattgcggggcaccagactgagaagtggcggagataagcccacaggcgtcgctggggagtcaatgccttgtttataagggggtgattatgatccaggaatggtgcgttgcggtggattgtgttatgcaaggggtattgtcacagctcctttccgaggtaccgtggtggtattgaggcacatggtgacatgatgtggggctgtgtcttgtgggtacagtggtacacctctgatcagagtaaaactattcgaatagccgtgcccgcggttatgggcgggtctaacaatgtctttcgtgattagtctcacacctctcatcttagtaaaagatgctataactggtaataatttgtttagctcctggtttggaatggtatattcctggtttggagatagatctgtacagctgggtatggttgttcagaaaggttgggcctatacaacagggtatgttgtatagcgttggattaatattgtttaattattacttaattgttttattaaattctgaaatgtttattaaatgctgcttttgcaaatggaaccctattatgccatcctttggtatccttgtgcacttgcatatttgctgcgtgacttgctgagtatgtcatatactcaccttgcaatcattcatcagaggaagagttctacaatgatgctgatggtgtggaggattaggtgtagccctggtcaagctgcctgtggagtggagccgtctgcgccatttatcttattttccgctgcttagatctttattgattgagaggaactatctacctctgtaatgacattttattcgcttattaattagagtaataatggtactctattatcaatttgttattgtgtgcctcggctgattcctggacgagggtttacacacatgtaagcgtttggaattttggatagaaattccgggcgtgacaaattccttcgagggctagctacctctccggcttgagggacaacgacgacgacgtcttttctgcaacatacaagataatgtattagtctaaacgcaaagtaacatatatagtatttcacgtagtgtcgtataaggcgaccgtttgcgtttcattcacattcgttcacgtttcattcacgtttcgttcacgttcgttaacgtttcattcacctttcgttcaatttcgttaacgtttcgttcacgttcgttcactttcgtttaggtttcattcacgtttcgttcacgttcgcgttctcgctaagttcacatttcattcacgttcacgttctcgttaagttcacgttttgttcacatacgttcgttcacgttaacgtacgttaagttcacatttcgttcacgtacgttcgttcgttcacgttcattcatgttcgctcacgtttcgttcatgtggcggcagcggagcggtagcgtggcggcgcagcgtcggtgtggcgcggcggcggggcgtcgcggcggtggcgtgtcccggcggtggcgtggcgcggcggcgtgccgaggcgggggcgacggcgtggcagtggcgtcggcatcgtcgacagtgccggcgcgacgtcgtcggcggtggcggccgcatcgaggtcggggtcggcatcggcgggaggcggagtcggggtcggccgcgtcaacgtcggcggcggcgtcggcaacgaggcggcggtagtttggagagagagagagatcgaggtcgagagagagagggaggcggcggcggctctcaccctagagatgcggcggcggcagaggcgacggaggaagcgacgacgacgcccgcgagacgacggcgagatacgacggcggcgtcggcgcggggatgccttaggcagtggcggcgaaggagaagccgagatcagggaaaaaccttctaagtgttgatggagaagacgggggcgcgcatcgggaatatatatacccgtagatctttagtcctagttggtgagaacaacagggactaaagatattttcccgctatttccaaattctttttaaacccggttagggttgacaaccgggactatagacaatagcactgaatattgaatttcattaaatacgtgtttctaaaatagtaaataatgcattaaaattatttaaagtcgaaaaattaatgacaattacttcgaaaaattattgttgtctgtagtaaattaagtagataatacgtaataagcaaatatatgatttaaacttgttaaaaattctaataatcatatataattagcatatgcatatttaaaattgttaaaaattctaattaacatatgtaaataccacatccatgatttaaacttaataaaaaatctaataatcatatataattagcatatgcatgatttaaaattgttaaaaactctaattaacacatgtaaatgccacatgcatgatttaaaacttttaaaaattctaattatcgcatataactagcatatgcatgatttaaaattgttaaaaattctaataatcatacataattaacatatgccatacaacaattgatttatatggataatcagtacatccaaaatagtttacatcgtgtacataataattacggcaatacattggaggtgacggttgaccgcacgtactttctcctcactactgttccctccttgtgatcgctacgtgagtaaggggtgtcttcatttgataggaggatgctagggtcaatcgtcaccatgaaagggggtttcccatccaactgatcgtaatcctcgtcagtcttgtcctcaaatccgacgatttttcttttgcctagcagaaccacgtggcgcttcggctcgtcaagccctttgcccttctttcctttgctagacatgtccttcatgtaaaagacttgcgttacatcattggcaaggacaaaaggttcgtccgagtatccaaccttgttaaggtcaaccgttgtcatcccactgtcatcaatcgttacgcctcaaccagtcaacctaacccattggcacaagaacagagggaccttgagaggaccatagtcaagttcccatatgtcctcgatggcaccgtaatacgtgccagttgttccatcgtgtcccatggcatcgatacaaacagcgctgttttggttcgtgctcttcatgtcttgggctctcgtgtagaatgtgtacccattgatctcatttccttggaatgtcgcgatcgagccagatggtcccctcactaggaaggccagttgttggttaatcgtctcgttacccatgagatgttgtcatagccacgcgggaaaagtatcaatgtgatgccgtgtaatccatgcatcggacttaccgatgtttctggcgtgaactagagccaagtgctcctcgatgtaaggagccaccaatgaagattgttgcataaccgtgaaatgggctttacggaataaattattgtctaccgtcattattgctttccttccgagagtcccctttccccatagtctcccttcatggcgtgattcaggtaccccgattgggcgaaggtcttcaataaattctacgcagaattcgatgacctcctctgttccataccccttggcgatgcttgcctctggacgagcacggttacgaacatacttcttcagaacgcccatgtacctctcgaaaggaaacatgtattgaaagcagatgcgtcattatattcaaaaatgaaggtggaaatatcaactcaaaactgacaacacattgcaccacatcattctgaagggcttctaatctattcggatcgatgaccttctgcgaaattgcgttcatgaaagcacataactttgttattattgcccggacattgtctggaaggataccccttcttacaactagtagcagttgtgtcatcaacacgtgacagtcatgacactttaggtttgtgaacttattctccttcgtgcttactattcgctttatattcgtggagtatccagacggtacctttatgctctccaagcattcaaacatactttccttctctgccttgctaagagtgtagctggctggactcaagtaatagcttcctttctcctttggttccgggtgaaagtcgccaagttgttccatatgcttcagatcattacgtgcttccagtgtatctttcgactttccatatacacctaggaagccaagaaggtttacgcaaaggttcttagtgaggtgcatcacgtcgattgcatggcggacatccaagaattcccaattgggtaactcccaaaatataaagttctttttccacatcgccgcgtgaccatcttcgctctctataggctggcttccaggcccctttccaaacactactttaagatctttaaccatagcaaacactgttttcccgctgcgatgtttaggcttcgtacggtggtccgccttatgttcaaagtgcttgcctttcttccgtaccaggtggtttgcaacaaggaatcgacgatgacccatgtacacaaacttcctacagtgcttaagatacgtactttttgtttcatccatacagtgagtgcaagccttataccccttgttggactacccggaaaggttgctaagtgtaggccaatcgttgatggttacgaatagcagcactcataggtttaactcctcctgtttgtcctcgtcccacacggggacaccttcctttttccacaacagtttaagatcttcaaccagtggtcttaggtacacatcgatgtcgttatcaggttgcttggggccttgaataataatcagcatcattatgtacttcctcttcatgcatagctaaggggggaggttgtagatacacatcataacggaccaagtgctatggctgctgctcatctctccaaaagtattcatgccatccgtacttaaaccaaactgtatgtttcgtgcgtcctttccaaagtctttaaattttctgtcgatgtttcgccactgcgaaccatcagcggggtgtctcagtatcccgtcctgttgacgttcttcagcgtgccatcgcatcattctagcattccccttgttcctgaacaaacaccttagccgtggtattatagggaaataccacatcaccttagtagaaattctcttctttgttggctggccatcaacttcacctaaatcctctcgtctaatcttgtatcgtagtgcttttcaaacagtgcatgcttctaggttttcgtactcctcaccacgatatagaatacaatcattcggacaagcgtgaatcttctgaacttccagtcctagagggtagactatcttcttagcctcgtacgttgtctcgggcaatttgtttccctccggaagaatgttcttgacgagtttcaataaatcaccaaattccttgtcactaacaccattttttgccttccattgcaagaactccagagtagtatccaactttttgtgcccctgctcacaacctggatacaacgacgttctgtggtcctctaacatccgctccaatttatgggcctccttttcactttcatcgttctcctttgcatcctgcaatatctgaccaatattgtaataccctgaaattaaaaataaaataacatgtttggaattgggccgaatcaatttgggccacgtcgcagtagtccagcccacctcccccacctaataccctagggagaggcgactcccaccttcccagccgacgccgccacacctccccctcggcacctatggaactcacgtctcccctattaaccctactccatggatctccaagaaccatagccctaatcaagaatctgattggaaaaacagatcgaggaagaggagacgagcaggaagagtggtgggttggttttcccatcatattctctcaagttctccaaagaggcttaactctcctgtgcagaggttataggttgttttagggttgtaattcgtcgttattggagggttagaggatgggattaggtgttgtgttttggattagtgtttctgggcgctgtcagctttgctgtgtctctgtatttcgccaattagaggatcaaaatgatttttgctgcgaaagtttataactaggaaattgtagagtttttccttagctttccatattggtaaagtacactttgattgggcgagtagaactccagatatggctgttttaagtgtggcagtctgaattcttgggcagattctgaatcttgtcttgatttgcagtttagggcatctaaatggcagaataaaaatatgggttctacacgaaagttgtaggtctcattctgtagattcccaaaatgtatttatttgcagtcatatcatttttatttttcgagatataaaggtttgaagcaacagtactgtttatagtccaagcggcgttccttgtttttgcgttttgaggtgttgaggccgtagatgcatgttatttactgttctatatgcatatttgagtgtgttttctgaggctttgtttgtgattaggtggtggtccttcagatcgtgtatgataccaacccttcattagaggcaagtgaatgtagctgtgggctgcaggaa

SEQ ID NO: 18675 - DNA, 12294 bp, Oryza sativa
  unsure (1)..(12294): unsure at all n locations
aattcataataaattcatttgaagtcagaatgaggccgttcaagtctcataattcatctaaaaatatgatctacatgtttgtttactttatatgtactgtttatttggtttttattagtctttttccccgttttgcgtgatagcttgtcgtttccgtcgttgcgaaggttcgcgagtgcgccggaagtgttcaagaagattaattgaagaccgattattgcaaggcaagtcacacagatcctaaacacaatcctttgagcatgttgatcctatatttaaattctctatttatttcaactgtgcatttattttcgaatgtcactgggtggtgtgaacctattcctttgttatggcctgtttgcattgattactttattccttgataccttgggttattataacttgactagttgagctatatatattggttcagctagatattagatatgattgcttagccatgcttagaaacattagcacacaattgggataactaatgtttcactatcacttatggttatatttaatggtagctcacgatggtcaatcgtgattggttaattaattacttgccaactaaaacttgataatggtgggttgtgagcacatggttttgagagtcgtgctcatgacaattaaggaccggttcgcgagctactattgtgaaacattaaccgtgccaaccacaagccagcgtgggcaacggctttaccttttgtatagcatgattcattgcggagcaccagactgagaagtggcggagataagcccacgggggtcgctggggagtccatgccttggtttataagggggtgattatgatccaggaatggtgcactgtggtgagttgtgttatgcaaagggtattgtcacagcctctattcgggtactttccagtatcgcgacgcatggtagacatgatgttgaggctgtgtcttgtgggtacagtggtacacctctggccagagtaaaactattcgaatagccgtgcccgcggttatgggcgagtagagcaatgtttttcgtgattagtctcacacctctcacaataattattgatgttataactggtaataatttgcttagctcctggtttagagattagatctgtacagccgggtatggttgttcaggatggtcgggcctgtgcagcatgggtgtgctgttcagtgttgattaaaatttctgattaactactctactgttttatttctcttaaatattttgctaaacgctgcttttgcaaatgagtctatattatgccatcctttggtatccttgtgcacttgcatatttgctgtgtggcttgttgagtatgtcatatgctcattcttgcaataatcaatcaacctcagttgaagaaaaagaatccagaaggagaagacgtttggcttataccccagttgagctgcctgtgggagtggagccggagcttcgctagattttattttccgctgcagttttcttcatggtgaggactaagtgcctcttaagtaagtatttatcgttgtagttaatttgatgaatctgtatattaaattgttagtttgtgtacctcggctgattcctggacgaggattttatgcacaaataagttcggaaattactagtgaatttccgggcgtgacaagttggtatcagagccatctcgactataggataagccaaatggtcaaaccttaaggactaattttccgaaaacatgatttgtgaaaatttctcctttcttccttatctagaattctttgcaaattgtttcattgtctactctcctctctcgttcaacttgagtagttctgaaactagttgttgaaactagaagatgttgatgaggtcaacttatggaggtcagtaaagtggatcgaggaagaaccgaagtgccaactggtcaagatggaatgaagtttgcatcctaccttagaacctatgccaccaaagtgactttgaagaatagttagtaggatagaacgtttgttgcttgcttgtgtgtaggtatggttgcattcccgtcattggtgtggttcaatgatgagtgtgtaactatactaggttgcttgcttaatcaacttgaacaatataatggtctacacacatcagatcagtgttaacctggttaaggtcttgtctttagtgtaacccctctccttctatcttctctaatatgcaacagatggtgaacactcgcgccagtggaagtgaaaacaataacaatgaagggaacccaactcttgctcaagttctggctcaacagactcagttaatgaatatgatgatacagcagatgcagaaccagcttaaccaagggaacaacaatgctccactgccgcagaacaagttagctgattttcttcttgtgaggccacctaccttttctagcactaccaacccagtggaagcaggtgattggttgcacactattgagaagaagttggaactgctccagtgcacagatcaggagaaagtcgtgttcgcttcacatcagttgcaaggacctgcatcagaatggtgggatcatttccggatgaacagagcagaaggacaaccaatcacttgggaagagtttactgaaggattcaagaaaacacacatacctgtaggagttgttgctttgaagaagcgtgagtttagggctttgaagcaaaaggatcataccgtggcagagtatcttcatgagttcaatcgtctggcacgttatgctccagaagatgtgcgcactgacgaggaaaggcaggagaagtttttggaaggtttgaaggatgaactgtcagttacgttaatctcccatgactatgtggattttcagcagttggttgacaaagcaattcgacttgaagacaagaagaataggatggataaccgtaaaaggaaaatgactgtattccaggaggcacaaggtagtagccagaggcagcgtatcaagccactccaaattggtgaatcttttcccgctggtccaggacagtcgcaacagttgaacatcggtggtgagatcaaattagagactaatgaaagcaaagaagttaacatcgagcaagctaatcagccggtgctagttcagcaaggtcagtctcaagagaataacagtagtggaagggagcagcaggtatgtttcaactgttacaagccaggccactttgcaagagagtgtccgaagccgaagcatcagcagccgcaaggtcaggttaacaacattgttgtcacaggagccaatgcagtgccagttgcgtcttcaagagttgtgtcttcaagtgttacaactcagccaccagtttcaaagcggcagtagttttctttaaagccttagaataattatcggagttatggaataagatagactgcagtttacctatgcccttttctttctagccgttccgaatctcgggacgagattctttgtaaggggggtagatttgtcacatcctgattttcgtttcaggatttataaattatttaataaatcattaatagaatttatattaaatgttctttaatttacaagtgaagttaaatgtgggaaataaaatttcctaaatataaagcatggatggatttaatttttattaaattctccatgattaagtcaactctctgaaatattctcggatctttcggagctcaattcctaaatgatacaaagaacagttcagtaattatttgatcattaatgatctaattatttttgttaagagcttttcttgtttaaaaatccttaaattataaattgttgtttaaaaggaattattagaaataattttaaaagcctagaagagaagatctaattttaatttgttaaatctcaatataaaattgggccagataaaatttcattaaatactttgcttaattctataattcctagatttttctgggatttatttgagctaaggaagtatttttaataaatgaaattgcatttaaaaaataatttaaattgaaaaaggttttaaaaagtcttcttttggctttgggccgaaagccggcccaaaaccctctctctctttccctcggcccagtccggcccagtccgcagccgcgcgcgcgcgttcggtcgctgacaggtggggcccgcttgtcggatccatcgtcttcnncaanccnccnccncccnaagccctatcgcaaggcagggccgtcttctgccaaattcggccgatcctttccttctccggccgaatcttttgaggggaaataatctcctcgatctcctcttccttttctcttatagaaactccggtcaatttcctttggaaataggcggattcgagtttgattcggattcgtttttccccaacctttccttctcgtcgccggcagccgtgggcctccgtcgccgctcgctagcccctttaaaaggatccccgagctctcctctacccatcgcctccctcgccttcgcccgccgtcgtgtgtagcgccctagccccgtgagcttttgcgccgccgtcgccgccgccgctccagccgtgcgccgccgccgttccagccgtcgccgtcgctcgggaaggtcgccgtcgtggtcgccgtcgcgtcgccgtcctcgtccgccccttcgccgccgccgaagaccgccggagcaccgtcgccgccgtcgacccgaaggttgccgccgcttcttcctcgtcgccggcgccgtccgttgctcctccgccgttgctttggtcatcggtgagttcgtcgcgccgcgctctacgtcctggtgctctccgtttgcgccgccgcgccgtcgttcgccggtgagcttgcgccgcccgagccgccgccggtgctgacgtcatcgctgacgtcatcgtcgccctctcccgtgagccggtcgtggaccgttcgatctcggccgtccgttttggatagggttgatctcggccgtccgttcccgtgaaccgccgccgtgcacccggtccaccgcaaaccctagccgctgacacaataatcattcttttccttttcaaaaataattcattattgcgtcataattcaattaaaatccatataagtgttttaatccgatttaatctttaaaaattcacatttgaactcagtttaatgtggttcaagttgcaaaagttgtataaaataaagatctacatattaaaattgtccataaattgaattaaatttatttaattctttttaaatgggctttaaatagatttaatcttgtaaaattcataataaattcatttgaagtcagaatgaggccgttcaagtctcctaattcatctaaaattatgacctacatgtttgtttactttttatgtattgtttatttggtttttattagtctttttcctcgttttgcgtgatagcttgtcgtttccgtcgttgcgaaggttcgcgagtgcgtcggaagtgttcaagaagattaattgaagaccgattattgcaaggcaagtcacacagatcctaaacacaatcctttgagcatgttgatcctatatttaaattctctatttatttcaactgtgcatttattttcgaatgtcattgggtggaattaacctattctttgttatggaccttttgttcttgattactttattccttgataccttgggtgattataattggactagttgagctttatatatattggttcaactagatactagatataattgcttagccatgcttagaaacattagcacacaattgggataactaatgtttcactatcacttatggttatatttaatggtagttcacgatggtcaatcgtgattggttaattaattacttgccaactaaaacttgataatggtgggttgtgagcacatggttttgagagtcatgctcatgacaattaaggaccggttcgcgagctactgttgtgaaacattaaccgtgccaaccacaagccagcgtgggcaacggctttaccttttgtataacatgattcattacggagcaccagactgagaagtggcggagataagcccacgggggtcgctggggagtccatgccttgtttatgtcacagcctctattcgggtactttccagtatcgcgacgcatggtagacatgatgttgaggctgtgtcttgtgggtacagtggtacacctctggccagagtaaaactattcgaatagccgtgcccgcggttatgggcgagttgagcaatgtttttcgtgattagtctcacacctctcacaataattattgatgttataactggtaataatttgcttagctcctggtttggagattagatctgtacagccgggtatggttgttcaggatggtcgggcctgtgcagcatgggtctgctgttcagtgttgattaaaatttctgattaactactctactgttttatttctcttaaatattttgctaaacgctgcttttgcaaatgagcctatattatgccatcctttggtatccttgtgcacttgcatatttgctgtgtggcttgttgagtatgtcatatgctcattcttgcaataatcaatcaacctcagttgaagaaaaagaatccagaaggagaagacgtttggcttataccccagttgagctgcctgtgggagtggagccggagcttcgctagattttattttccgctgcagttttcttcatggtgaggactaagtgcctcttaagtaagtatttatcgttgtaattaatttgatgaatctgtatattaaattgtcagtttgtgtacctcggctgattcctggacgaggattttatgcacaaataagttcggaaattactagtgaatttccgggcgtgacagtagcgcccgttccgtcgtggcgcctagcggaaaaactatctcttaaaaaccctagttgcgaaatctgtttctttgcttgttgtctagtgtccgtgccatctcagatctcaaatccccaatctatcgtcgagttcaatcccgaatccaaatccttcccaaatcaaatcgctccgcaaaagtctatttagcctccctcgggttcgatgggccgaatccctctcggcccatctccccctccctccccggctctgtctctctctctctccccgctctaccgtgagccgcgccgagccctccctcccgctctcgctgccattcccgccgatgccgcccaaatcgtcgcgccgcccgcgcgcgcgcgcaccgtggtggccgaccggccagtcaccgccgccgtcagcgcctgccgcgcttgccccgcgtctgccgcccatgtcgccgctccactccaaaccggtccgccgtcatcgccgtcgtcatcgacccggccccgccaccgccgcacgctggcttccaagggacggaggctgagccccgccctcctctctgccgcatcgccccctctccctcctccttttccccaagtggcaaggaggcaagccccctttctctccccccttttcccttttccctcccgccggcatcatccttccctccctgtcgccgatttggccgcgaccgccgagcgcgagctccctcccttgaccgcccaaggtcggtttctaaaccgacatcgccgccctataaacccaggcgccctcccttccttttcccctcccaatcttccccgtttttcgcccgcgccattgccgtcccctctgtcttgctgatcgccgaccgacgccatcacgtgtgccgaaggagtcggtgcgcgttaggacgcggaacgggactccggacgcaccctctcttcctcttccccggcccgaggccggagagatcgctcccgtgccgtcggcccatcgtcactgcgccccgtccgcacggtagtgcatctccccgttctccttcctcaatccatctcttccccttagttctcggtagtagcatgtgtagcctccccgtagctagccggcgccgccccgactgctaccgtctctcgccgtgtgctcgccgccgtcgccgcccgagctcggcaacgcctctcgtcgccggcctccctcgatgcgattcctcctaatccggcgcaaggggtgggttcccgtagccgcgtagatgctctcgccgccgggaatcggcccctcgtgacctcatcgccgtttcccccttctcccgccgtcggttgccgccaccgcaatccgccaccgtcaagcatcccccgtcgaatccgagccattggctcgtctcccctcgtcctgtgcaacatcccggtgtgctcgccttcgcctgaattgccatggttcgctccggccctcgccgccgtcgtccgccgtccgttccgaccggcgtcgtcgtctacctcccaccggcccgcgtggcagccacataggcgccacgtcggcgccacctcggccgtgaccgggtcaagcagaccccggtccgccgcttccctccgccccctcgcgcgcgcggtccaccgcgagccgtgaggctgcgagtgggcccgccgcaccgcgtcctccgcgaaccgcacgcatgcgccgcgcctccctccccaaaccctagcacgccccgcgtgcacctcgctcacggtgagccgagtcgacgacaagcgggtcccacccgggaccacgcgggatggacccggcccaccggctctctctctcccctccccgcccgcgcgcgcgccttgggccgccttcttgggccggccggcccattaagctcggccgagccgcccctttctctcgggccgcgccctagccgcccgagggaagtgtaatttccctccctccttcttttctttttcaaaaaggatttaaataaatccttttcctttagaccaaaaatccaataatcttagaaattcaatatcttcccaaccgtaagtccgtttgactccgttcaacttccaaaattcctcaaatctcgagatctatctaatggcacgcttagaggtcaataatagggctttattttcgccgtttgctgagtcgtcccgtttcgcgtgtagtttcggagcccgaagacccgcagtgcgaggattttgaggatcaagctcaagatctcgagcgaggcaagccacctttgaacatcttgagcctatatttgaacttaattatgttgcttgaaaaatattatgcattgataggatcgcacttaatctgcttgtcccgtctgcaaggcagattagcggacctacctaatttgttgcatttgacccttccattgtaattgttataccatgttcccttgtacccacctagttgcgcctcggtaatcgtgcactctgcacgggtatcgacggtcgccttcaaacttaaaatctgagaaacatcttgggtaaaacttggattttacaaaagacttggaaaacccgacacctgggtcggtgcttgcgaactaaatgaatttccaaaatcgcggaccggggaacgtaccgggtgtacggtttcccgttcttgcacttaaggaccatttccttggaatttcatccgaacacatgacaagtacgaccacatgggtggaatgggacacccctggctgagtaactagcttatcgggggagccatgatgctaagagacatgtggattcgccgggtggtgtcggagaggacccctgggcttcctggcacagtatggtctgggacctaatctggtgttggtctgggacccctctcgttggcatatggtgaacctgtgtcggctttcgaaatgccttgtcatgaaagccttaaggtctctagtcgtggccgttctgcacgggctcgatgatccgggttagtaatgtcgtgtgggtaaagtgtaccccctctgcagaggttattaaaactgttcgaacagccgtgcccacggtcatgggcggatgtgaggtgattcctagcgtagttttgtttgactactgccttgtgaaatttgctgttgtggaatgggtttgatgtttggaaaatttgcggctgatgggatcagccaggcccgggtggccgtttgaaagctgttggccgggtgccaatcttggtcaattcaaaagactaatacattgcacatactccgaccggacgagacgcactgtctcatccgtgtcgtttgagaagcactcacttagttgtttcagaaaagagttcaaataaaatcaattgcaaaaacaacagcctttctctgaagcctgcattaaacacttatttcccatggctggctgagtactcccgtactcacccttgctctatataaataatcccccccagttgctgaagaagatgaagcggatcctgctgacgaggagttcttccaggagcaagccggctacgatgagttttagggtttcggcctagttcccaagtcgcgcctgtgatgtttggtccaagtcttggcttccgcttcccttttgtaatgcagttgtgagctcgggatctgtccgcagcccaacatgactgtactcctactctataataaagagacctctgttgctgtgatattctgtcttcctgtgataccagcactgtttcctgggactggtatcgattaacaggttaatttggagcgtcacgggctagttgcgctcgggactagttcggggcgtgacaccatatatgagagacaccattcacctatacttcaaatacaattttctaaactactcatctaatctacgatccgattacaccgttgtgttcataacaattaaatctttacaacaagatctcacattattatattttgatgaaaaatcacaaattacttttatgatatgtctaaattacttttagatttcactaagttacttcttagacatacaaaagtaaattcagaaagctttaaagtaatttacatatattatagaagtaacttataaaaaaaagtaactttaattaatacactttttcattgaacaaattatcatatatttaattatcatatatataagttactttttgatttgattaaaatacttcctataaattcataatgctctgaggtgattacttttattattgtttttagttaatttcataatttgtgctgattaatttaatttctagatagagtcatgtttttatctctacaacggatttacttcaaataacatgccaaagttacattcgttttgttctaagttatttctataatatatgtaaattacttctaggctttactgaatttacttttgtatgtctaagaagtaacttagtgaaatctaaaagtaatttagacatatcataaaagtaatttgtgatttttcatcaaaatataatcatgtgagatcttgttgtaaagattaattgttacgaacacaacggtgtaatcggatcgtgtaatcggattatagatcggataagtaatttaagagaaaatttcataagaagaaaaaaatatgcacaacctaatagcaaaaactacttgcatgcatgtctgtaatgctactagtacttttctcacgtaactgtccgcgtcgctcgttaagtctaaatcgaaatgcctcttgaaatagtttttgcgattgctctatgttcattttttcttatgtgaattattagagctatttcttctacttcaagtgccaagttttatgtttccatattataaggttcataacttggtgattctacggaaatttagttcatccagattggagctaaaatgaattttatatgcaatttacaagttaacctatttttctgttgattagatattcactaaggcattttccttatattttccagattttaaaaacatagggcccactggtcagtgagagatcttttgcagaaaggtccctagagtgtgggggaatcaaccctcactccaaaaacgtgtctatgacatagtttataaagactcccccattttcttttatatttacgtttcagttcttgaccctcctgtcagtgatttagatgtttacatactgagacctacagttgttcgaattctcaaaacaaagtccctgcttttctctacctcgttcattcgatacagaggctgagcagagccatggctgagctcgatctcgagctcaccggcggcaataggtggctcctttggggttgaggtcaaaagatgaaatgaagagcacgctctcgggattccattcctctacttttctcggattgcggtcatcggagtaacgccggcggcgagtccgagcggcggctgtgcacgggctgctactgcatgtgcgcctatagccatgtagtgatcaaatggatgcatgaatgtggcattaggaagtgctatgacgctcaccgaagcttgaccgcggcttgaaaaggtctggacagcggtgacagtggaggagatggctcggcggcgatggatagcgtcggcttcacggcgacggtttgttccggtcttcgggctgccaaggagaggaggggaatggatcaaagatcatctaaggatgcttcatatgcgaggaattgcgccgaagctcacccgagagcgaggaacggacgacgttggccggcg

SEQ ID NO: 18676 - DNA, 775 bp, Oryza sativa
ggccagcccaagccgactcctccctcctccctaacccctccgggtcaccgacaggtggggcccacctgtcggccccttcttccacctcccgccgtcgaaaccgccgcctactgccgccggtttccccgcttcccgcgcccactccgcccatgccgcacgcccacgtcgccgctcaccttccccacaccttccgctagctcgcgcgcctgcaaatggcgggggatttgctcttttcccccactctctctctcctcctccacttcccccacgtcgccggctaaatcggccaccttcccggcctcgtccgcccctcccgaggccttataaaccatccctccattcccctccaccttttcctctttccaccgctccctcccgtgccctctatcgctcccacgccgccacacccgccgccgccgccttttccactcctccggccgccgctcgccgccgctggagccgccaccgagccaatccgctgccgccattagcttcgccgccgccaaagctaccccggccgccgcatccccatccaatcctgccgtcggggcccgcttctccccgcgcgccggtgagtaccaccatagccgccgccgtcagccatggctctcgctcgtcgtggacaccctctctccctctaacctctcacacttcctctcttaaggtgtcccggagctcggccgccattcgccgtcgccctccggtcgctcatcgtcgccgtttgccgtcgtctcctcccgcgccggccgaaccccggtgagaactccctcccctt

SEQ ID NO: 18677 - DNA, 9096 bp, Oryza sativa
  unsure (1)..(9096): unsure at all n locations
caacgtccgaataggcggaatagctgctaaataatgcaatatttctaccttagtgttaaaatgcaaaagtttcgttgttgctaaaagaaaacgagcatgcagttcgtacttacccccttttttttttgactggagcaaacaaattaattgatgaaataatcgcgttgagtttataccctcattatggttatttattttattacatgacgttgtaaacattttgacacatgtttgatcattcattttattaaaaaacattatcattatttattttattgcgacttggtttatcatattataggtactttgcacaaaagttttaaataacctaaatagtgaaacatgtgtaaaaagtcaatagcttcatctattaaaaaccgaaggtattatcatttaaacatgatctctcccttgacaactttgactattattttcaaacaatgtcaaagtgaatagattcgaaggtaagatattactatagttctttcgattagatttaatctaatgataaataataggttatttaaaaattattgttggtcaaagttgtacaattcagagtcaaaaccgacaagtatttcttaatgagtaactatacgagcataacggtagtagaattaacaccaatggtatataacatgtcaaatggatacaccaactaatcatatttcttgacaatcgcagaaggtggatacatcaagataaaacgtaagtccaagatcatcagttcttttccgaacacagcacagttcattatgcatcaccaacaaaagtctaaataaatattatttgtgtatttttttttcaggtagcacatttgcagtagtaatagttttcacagtcatgctgattgctcttatcattgcactcatgagatacatgagcaaaaagagcaaagctgatgagaccattgactcaacaagatcttctcaaggttgataaacgataaccccccctacaacacatgaattctgacaaacttcagatacaaatcaacctgcacaacatcatctactaactactaactttcattatccaccaagacaacaaggttcatggggaggtgatcaacaggtggtcagggctgtacaagttcagcaagggcgagatcgagaaggcgataaactacgcgaacagcaagatctgccttggctccggtagcgcaggccaggtataccaaggagtgctaccgagtggtcagcttgttgcgatcaagcacatccacaagtcggccatgtccgggtccttcatgagggaggtggaaggcctttccaaggtgaggcaccccaatctggtctgcctctttggctactgtgatgatgggggtgaccagtaccttgtgtatgagtattgtgccaatggaaacctggctcagaaccttctaagtaagaatagttattttgagctttgagcagagctgatgacagttctttttttggtttcaaatttagtggaaaaaatttaggttcagctatgtttggaatgatccttttgtcttgattgacagggagtgactctgtgctgtcctggccagcaagggtgaagattctgagggattgtgcatctgtcttgaggtttcttcacacacaccctgatggatgcattgttcatagagacattaaggtgaggacagtactgaatggttttgtgattctagcaatgtgaaccataaatttgatcaaaccattacccactggtgtcctgttctggttttgcagctcactaacatcttactgacagagagcatggagcccaagttatctgatttcgggctggcgaagatgttgcaaatggaggagactaaagttttcacagatgtgagagggaccattggctacatggatccagagtacattacacattccaagcttacttgtgccagtgacatctacagttttggtgtggttgcactgcagctcctgtcaggaaggaaggtcattgaacttgacactgttgccagggattcccttacaaagaaggtaaaaaatgatacttctaaccagcatatgtttgatgctacgcaatctataacaacctctctaagtatgcaattatgatttcacttagaattttaggagtaatgctcactatctgttctcatattagtgtcatttatgttcaaaattcaactgactatatatgttaagacattttaaattgtttttggaataattatctaaaagaatggaaatatgattgtgctatgaatatgcaacacccaaaacaacaaaaagaagtaaaactaaattctatggaggaaaaaaatgtaagtaatgcaactaaatgcaaccctagaaaaaaaaatccgacaacccagaattcaaagataaaaaatgtaaaactcgttgttttctaaagatagttattgtagtcatcgtctttcaaatgattatgattcaagtgcacacacaacttttccaaatgaaggccagggatgtggtgagcgggaaaaaaccattggacgaattcatagacccccgtgttagagacgaggttaacattgaagatttcgtgttgatattgaaaattgcggtcctctgcgtggcgcattcaagtgtagggcgtccaacaataaaggatgtttttgaggagatggacaaagcattgacgaatacagattcaaaggttagaattacattgtttcttttgatgaactttcttaaacagactgtgaatatattaatttacttgtcattttatttaatgctgcctctaattctgctgatcaggttggcagagcgagagaagagataaacccatccagtacaatccagtatcagtatgcaacggggcttaacatagtatagtgtacatttccagaagttacaaacagtttcttgcatggagtttcagttgaatggaatttccaaggctgcactttgaaattggactgtaagaaagataagagagctatgccaaactagtattgtacttgcaacggtgttggccctgcaactagtggttgcttatgggtgatgtaagtatatatatatatatatatatatatatatatgtacatgagcaagttaagaacctagataaaatagtactagatccattattaaatagtacttgataggattgactgaaatatcagtattatgaaagtacttgaaacttataaatattttctcaacaataaacttacaaatatttaaaactctacactattatgaaagcacgatgcaaacatatgagttttacgattcaggatatgattaaaactggatccctacttgagatgaacttgtttgctttttcttgggacgacgtttagttgtgtttttttttgtgtaagttcccaacttctccttatttgttttccgctcgcacgcttcccaaaccgctaaacggagtattttttttaaaaaagagttttctataaaaaagttgctttaaaaattatactaatttattttcaagtatttttagctaataatacatactccgtccataaaaaaaccaacctccgactattctaggttggctttttttttttaatggagagagtaataattaattactccgtatgtgctaaaccagtacgtctttttgcgtatcctccgaatagtttttcaaagaaaaagtacacccaaggtccctcaacttgtcatcgaattaaaaaatcgtcccccaaccacaaaaccagatatataatatcccttgacttacaaaaacattcactttaaatccttaggtagttttaaacccggttttatccgatgtggtgactgagtcagcatgggacccatatgggccccacgtgtcagtacgccacgtcactctttcccctctctcccttcctcatctctctctcacttttatcctctctggtatggtggccgcccggcgggtggagaggaggtcgccgggcgagacgagggaggaaatccgacggccgacgacgtggcggtggcggcggtgacgcgggagaaagggagggccgcggcagcggcgcccgccggcacgccgccatgtcctccccccgcgggccgccgtctcgtccgtcccacccaaaccttgtcgatcccttcgcatggtgatcgtcgatgcaagcaggctggtgcaggtagttgtacatcaaattgtagtaggcaacgccaacactgccatggccatcgccgtcgccggagaagaagccatnnnnnnnnnnnnnnnnnnnnnnnnngtcgtcgagcagctcgcgccgtcggggcgaggcaccgttcaatgaattgcctcatcaccgggtcgctcaccctgtacaacgcagcaggcttgatcccctgatcataaacaagcattttcttgatcaaatcgtgtccaagaattcacgagaaattctgcaagaatcgaatagatggtgatcactgatcagatcgtacggagatgactcgcttgtagatttggatggggttggagcactcgctgtaggggtaatcgagggtgaccatctcgaggacgcacatgccgaaggagtagacgtcggcgagctcgtcgtaggactcctcgtacacctcgggagccatgaactccggcgtgcctacgcagcgagtgtggtcgccgccgccgccggcggcggagaggcggaacgcagcgaggccgaggtcgccgatcttgacctccctctggttgccgttgacgaagatgttgtcgcacttgaggtcgcggtggatggtgggcggcgagtgtgcgtggaggtaggcgagcccgtcgaggatctgtgcgcaccagcgccgcaccgccgccacgctcacccgccggtgcttctccctgtactgacggagcgtgccggagacgaagagctcgatgacgaagttgagggcgccgcgtggcgcgtcgacccagtaggccagtaggcgtcgaggcacctcgactccgccgccattgcgcggctgccctgcttcgtgctcccgccccgccgcggaggtagtgcggcggcggcagcggcggcggagtgcgcggtgtgcctgcgcgccgtcgaggaaggggagacggtgcgcgcgctcgcctgcggacgacgtgccccctgtgccgcgccgacgtgccggtgccggcgaggccgacgagctcgacgacggtgaaggggaagcagcaggaaaccgcggacggcgccttcctcctcatacaccctcgccgccagcctctcccgcgccgtcgcagccggaggagccgccccctacccgccaccgccgccgccggagaggccacccccgccgccaacgccgacgacgaggcccgcgccctcctccctcgcgctcggagccgccgccgacgacaaggccgagcggcgcggagtcgtcggcgccgcctctccgccaccgctctctcccgccgacgccgcaccggtctcgcccgccgacgcggcgcctccgcagcggtgctcgccttgtcgcccagtcgcccagagaagataagagaagagtgagagagaggagaaaaggagaggggagagggtgatgacgtgcccagctaacacgtggggtccacgtgggtcccacgctgagaccaaaaccgggtcaaacccaccgaaggatctcgggtgaccggttttgtatagttaagggaccccgtatatctggttttacggttgggggagggacgattttgtaatttaatgacaagttgagggaccttcggtgtactttttccgttttccaacggtcctaatggcccacatatgagatcttggatgggcccgatttgaaatcccacggagaaagtcaggccggcccaaacggcccacgaatccccccagctttagccgagctgacctcctcctccttcccttatccagatcaacccgagccaaacccaaacgccatctccaccgtcgcctcgcctcgcctccacctccacctccactaccaccaccgtctccggcgatggaggccgccgaccccaggtgattcggcggccggtctcctccccgccaccgccgccgccgccgccaatggcgtgcctcgcgccgcacttcaagtgggcgccctgcccccacgcgcaccaccaccactctacttcttctttaccgtcgtcgtcgtcttcgtccacctcggccccttcctcgtcgtcgaggtgctccttctcccgcgggggccccttccgcgtccactgcgcggtcaccgccaccacctccgccgcggcgcccgtcgtcgtagaagctcccggcggggggatgcggctcgcgtacgccgccgccccggactcctccgcgccggctctccaggtgacttgcctcctccactcggttggttgattgggatatcgtatcggattggggactatacgttttgctggtgatggtggtcatggaattgagctgcgacgaagctatttttgttcatttgcttttagtgcgctagtggagagctgggcagtaggcggatgtgggattaggttgttggtttggaacattcaagagtgaaattagatcgaacacgcttaccattacatactttacactaagtttgataaaaatttggtatgattgaacatgaccatgagcttcgttggtgaattgttactggaaattccatacttttattgcatcaacataattcttaatggaaatctttgttgaacagttagtgaagtggaaatttttggaaagagatttgatttcattttttttttcacttcgagtgggtataatttttccttttatatgtacaaggtgccaactacgacggcgccagtagcaatacttaggtcccaaacaatgcaggttctaatttgtggccttgtaaaattggcactttctcatatcaccagtagaattagttgattgctaaataatacatccatgtcctaactcgaggacttgcaaaattagcagttcttcgtctgtgatattcactcttcttttttgtaatttttccacctgtttacagaaaaaaattcaatcggccctggcatcagaagtatttctaaatgaagaggctgttgtaacagctgctgcagcagaggcagttgcccttgctagagcagctgctgaagctgcacaggaagttgttcgtatggtacaaaataataaaaatgaacgtaacaccagaccaaaaaaagctgtggtcaactacttggcaaatgaaatacttcgcacggaaatgaaaccaaacattcttgataaatatagtgatggcattttgtcagaggagatagagtcttatggcatcttgagtgatgaagctgaactagacggtgatacacaggacatccctagtatagctgtgaagtctgctcgtcaaactgagagaagagctcggagaacgagggcagcaataaaggctgctaccatagtccgtacttccccaaaacctgcaacgtcctcaaagaagaagcggtcaaagggcgcctcttctggcacaaatccattaggttccttgtggaagatgacgggtcgcagacttcttacagcaaaggaagaggttgagttctcggaaggtattcaggtgagattactacattataagtaatgaacatattaatcccttcatttcattcatgtgtgggtgcactatccgatcctctcagctgaaaagttaggcttatgtgttctgtcctgctacaatttatacataaccactatcaaggtggatatgaaataagccaaacacaaagcagatgtagaaaaaatcaaacaatttctgaatttgcctttcagttttgagccaaagatggtgaacccttatcctgttattaatttgcttctccaagatgatgagaaatatttgtacgtttaggttgcattcgacagtttaagtcagctatgattcataatgtcaacatgggctgactgagttgaaacttaacaaaatacatggaaattggtgatcttcttgaatagtggttattatatgaaaaaaggcatacccttgacttcgtcaatatattcattggtatacaagcttacaatagcatggcctttgcaatgttttttttgtgtcttgcgttgcataagttttgaatattccaatagtgttcgatctacagtttacaggttcattaaagccactggtggaatctgtgaactcttgaacataaattttatattggaacccactattcaccgatacactagaatcagttgctccttttatttagtatagttaccttgccattgagtaagttttggagttaattatgcatacttgtgttggatatgattaggacctcttaaagctagaagcaatccaagctgagcttgcagagtacaatggtggccagccaaccttcgctcagtgggctacagcagctggagttgatgagagaactttgcggaagcgtttagatcatggtatttattgcaagaatagaatggttacatccaatgtgcgacttgtaatatctattgccagagagtttgaaggtccaggaatggaactttatgatcttatccaggtacatgcatgtactttgtaccttttctggttaataagtaataaagcatctgaagtgctgtatttagcaccaacattttatttttaggtcttcattacaggaagggatgcagggccttataaggggtgctgaaaaatttgatgcatcaaagggttttaggttctcgacatattctcactggtggatcaaacaagcaatgcgtaaatctgtctcagagcaatcacagatatttcgcttgccggtaggtccctcatcctttgttttccctgactgatgattcatttgatgctctatttttctgccccattatgccctccacataacctggttagctagtaactgacggcaaattatgttactcaacattgtatgtacaattttgttctaaaatggtcaatggtggagtgaatgcatttccatatcttgtgcgaatacttatgatgaatttaatgttcctactagtcagtgaccagtgcaaaaatgtttgttaagatttcattccatagcatcaatcattgctgacagttggttgttgcaatatgagacatgatggaatatttttaacagtttgtgttgtcatccatttctcatatcatgaaaaaacacttgcatttgttacatattacatatgttttgactttgcttgaactatttgtgcttatcaatgattcgtataaactaggccttttgattgagataatctcagtacatttgattggg

SEQ ID NO: 18678 - DNA, 670 bp, Oryza sativa
ttttgagttgatatttccaccttcatttttcaatataatgacgcatctgctttatcaccttgtgaaagagatccgtattctcgggcatgtgtacctacacaacatgtttcctttcgagaggtacatgggcgttctgaagaagtatgtttgtaaccgtgctcgtccagaggcaagcatcgccaagggttatggaacagaggaggtcatcgaattttgcatagaatttatcgaagaccttcgcccaatcggggtacgtgaatcacgccatgaagggagactacggggaaagggaactctcggaagaaaagcaataatgacggtagacaacaatttattccgtaaagcccatttcactgttctgcaacactcttcattggtagctccttacatcgaggagcacttggctcaatgggtacacattctacacgagagcccaagacatgaagagcacgaaccaaaacagcgttgttcgtgtcgatgccatgggacacgatggaacaactggcacgtattacgatgccatcgaggatatatgggaacttgactatggtcctctcaaggttcctctgttctagtgccaatgggttaggttgactggtggaggcgtaatgattgatgacagtggtatgacaactgttgaccttaacaaggttggatactcggacgaacc

SEQ ID NO: 18679 - DNA, 13481 bp, Oryza sativa
acgttgccgcgagaacgtgaacgagaacgagaacgatcgaaagaacgagagtgagaacgagaacgatcgaacgaattaacgtgaacgagaacgacaacgaacgtgaacgagaacgaacgtgaatgagaacgagcgaacgaacgtgaacgtgaaatgcaatatatatatgttacttcgcatttatcctaatacatattttttgtatcttgcagaaaagacgtgttgtcggagtcgtccctcaagccggagtggaagagctagccctagaaggaattcgtgcaggcaagtgaagtaataatataaatgattgttatatttgtaatgcaattaagaatattagacttgtaattagacttagcatataagattgtgtagtgttctaatattatttgagttttaatataagattattttattgcaaattagacttagtatgtaattattgactacggaattggtgcgactcctagcaattgactattgtagtcttaattagacttagcatatacgcacgaaacacttagcatacatgactattttagtcttagcatgtaatattatttgagttttaatataagattattttatttgtaattagacttagtatataattattgactacggaattggtgcgactcctagcaattgacaattttagtcttaattagacttagcatatacgacagttacacttagcatacatgactctttcagtcttagcatgtaatattatttgagttttaatataagattactttatttgtaattagaattagtatgtaattattgactacggaattggtgcgactcctagcaattgactattgtagtcttaattagacttagcatatacgcacgaaacacttagcatatacatgactattttagtcttagcatgtaatattatttgagttttaatataagattattttatttgtaattagacttagtatataattatttactagctagggttgtataatatacgtcacctagacttagcttatatcacgatttgtaattagacttagaacgtaaggttgtgtagggttctaatgtacgacatttacacttagcatacatgacttagattgttaaaacataaatgtctcgtgacttagcagatgtttcttgtatcaacagatggctgaccgcgatgaggaacagatattgtacgatacaatctgtcacatcctgatttttgtttcaggatttataaattatttaataaattattattagaatttatattaaatgttcattaatttacaagtgaagttaaatgtgggaaatgtcacgcccggaatttctatccaaaattccaaacgcttacatgtgtgtgaaccctcgtccaggaatcagccgaggcacacaataacaaattgataatagagtacaattattactctaattaataagcgaataaaatgtcattacagaggtagatagttcctctcaatcaataaagatctaagcagcggaaaataagataaacggcgcagacggctccactccacaggcagcttgaccaaggctacacctaatcctccacaccatcagcctcattgtagaactcttcctctgatgaatgattgcaaggtgagtatatgacatactcagcaagccacgcagcaaatatgcaagtgcacaggataacaaaggatggcatagtagggttgcatttgcaaaagcagcatttaacaaacatttgagaatttaataaagcagttaagtattaaacaatattaatccaacgctatacaacataccctattgtataggcccaaccattctgaacaaccatcccggctacacagttctatctccaaaccaggattgtaccattccaaaccaggagctaatcaaattattaccaattatagcatcatttactatggtgagaagggtgagactaatcacgaaagacattgttagacccgcccataaccgcgggcacggctattcgaatagttttactctgatcagaggtgtaccactgtacccacaagacacaaccccacatcatgtcaccatgtgcctcaataccaccacggtacctcggaaaggagttgtgacaataccccttgtataacacaatccaccgcagcgcaccttcctggatcataatcacccccttaaaaacaaggcatggactccccagcgacccccgtgggcttatctccgccacttctcagtctggtgccccgcaatgaaccatgctatacaaaagataaagccgttgcccacgctggcttgtggttggcacggttaatgtttcacaaccgaaactcgtgaaccggtccttaattgtcatgagcacgaccatcaaaaccatgtgctcacaacccaccattatcaggttttagttggcacattaattaatcaatcacgattgaccatcgtgaactatcattaagccatcattaaataatagtgagtcatgagttatcccaatagtgagctaatgtttctaagcagggctaagcaattatatctaatacatctagttgaaccaacatatagagctcaactagtcaagttataataacccaaggtatcaaggaataaggtaatcaaaacaaaaaggctataacaaacaataagttaattccacccaatgacattcgaaaataaatgcaatagttgaaaagaaacaatagctttaaacgggatcaacatgctcaaagggttgtttgggatctgtgtgacttgccttgctggccttggaactcttcaaactcttctccggcgaaaacagactctccagaaacgacggaatctaagcagaaaagagcaaaatcaccaaaacagcacataaacaagcatgaacagtacatgtggatatttttaacatgtagatctcaattttagaaaaatttagagacttgaaccaactaaatccgagcaaagatgaattagttatgaatttttgaagattaaatcggattaaaacacttaaattgattttaattgaattatgacgcaataatgaattatttttgaaaaggaaaagaggatttattgcgtcagcgactagggtttcgcggtggaccgggcgcacggcggcggttcacgcgaacggacggccgagatcgatccatccaaaacggacggccgagatcgatcgggtccacggcggctcacgggagagggcgacgatgacgtcagcagtgacgtcaccaccggcggcggtggctcggcggctcgggcttgcatgctcgccggcgaacgacggcacggcggcgcgaacggaaggcaccaacgggtagagcgcgacgcggcgaactcaccggtgaccaaacgagcggcggaagatcaacggacggcgacggcgacgacgaagaaacggcggcggtcttcgggtcgacggcggcgacggtgctccggtggtctacaacgacggcgaaggggcggacgaggacggagacgcgacggcgaccacgatggcagccttcccgagtgacgacgacggctgaaacggcggcggcgcacggctggagcgacggcggcgacggcggcgctagggcacacggtgctagagctcttccggcgacgagaggcgaaggcgagggtggcggcgggtagaggagacaccggggagccttttaaaggggctaggaggcgacggcgaaggcccacggcggccggcgacgagaaggaaagttcgggaaaatcgaatccgaaacaaactcgaatccacgaatttccaaacgattttagccgatgtttccaaaggagaaaaggtagaggagatcccgaggatcatttcccctctatcaattcggccggaaacggaaaggagcggccggattggaaagcggcggcggcggcgcgaaactagggtttcggccggaggaagacgatgggccccacctgtcagcgggcggacgcgcgcgcgcgcgacggcggactgggccgacttgggctgaggagagagagagcggttttgggccgactttcggcccaaagccaaaagagactttttaaaacctttttcaatttaaattatttcttaaatgcaattccattcattaaaaatacttccttagctcaaataaatcccagaaaaatctaggaattatagaattaagcaaagtatttaatgaaattttatctggccccattttatattggaatttattaattaaaattagatcttctcttctaggcttttaaaattatttctaaaaattccatttaaacaacaatttatatattttgaattttcagggtgtgacaggaaataaaatttcctaaatataaagcatggatggatttaatttttattaaattctccatgattaagtctactctctgaaattttctcggatttttcggagctcaattcctaaatgatacaaagaacagttcagtaattagttaatcaattaatgatctaattataagtgttaagagcttttcttgtttaaaaatccttaaattataaattgttgtttaaaaggaattattagaaatgatcttaaaagcctaaaagagaagatctaattttaatttgctaaatctcaatataaaattgggctagataaaattttgttaaatacttctcttgaatctttagttcctagatttttctgggatttatttgagccaagaaagtatttttaataaatggaattgcatttcatgaataatttaaatagaaaaatgtttttaaatcctccttttggctttgggccgaaagccggcccaaaacccctctctctttctctctccctccccggcccagtccgcccagtccgccgcgccccttcctcctctctctcagccgctgagaggtgggccctacctgtcaggcccgtcttcctcctcgcgccgctgccggccgaaaccctagccgccgccgctttccaatccggtcgatcctttccgtttccggtgaaatcgtttgaggggaaataatctcctcgatctcctcttccttttctcttatagaaacttcggtcaatttcgtttggaaatcgacggatttgagctcgattcggatcgacttttctccctccaaccctagctttccatctcgccgccggtcgccgtgggcctccgtcgccgctcgctagcccctttaaaagcacccccgagctctcctctatccgccgccacctttgtcttagcccgccgtcgcgtctagcgccgcctccgcgtagccctagccgtcgctgtcgttgccgtcggttcagccgcgccgcgccgccgttgcagccgccgtcgtcggtcgccgtcgccaccatcgggatcgcgaggtcgtcgccgtccccgtccaccgcttcgccgccgccgaagaccgccggagcaccgccgtcaccgtcgacccgaagaccgccgccgcttcttcctcatggccggcgccgtccgttgctcttccgccgtggttttggtcaccggtgagttcgccgtgttgtcctctacccgttggtgtcctccgtttgcgtcgtcgcgctgtcgttcgccggcgagcgtgcgaggccgagccgtcgtcggtgatgacgtcatcgctgacgtcaccgctgacgtcatcgtcgccttgtcccgtgaaccgcggtagatcaagttgatctcggccgtccgttttggataggatcgatctcggccgtttgtttccttagaccgtcccgtgcacccggactgcctttgatgacgcaataatcctccttttccttttgaaaaatagttcattattgcgtaataattcaattaaaatccatataaatgctttaatccggtttaatctttaaaaattcataactaattcattgtaactcagtttaatgtggttcaagttgcaaaagttgtgtaaaataaagatctacatattaaaattatccataaattgaattaaatttatttaattctttttaaatgggctttaattagatttaatcttgtaaaattcgtaataaattcatttgaagtcagaatgaggccgttcaagtctcataattcatctaaaattatgatctacatgtttgtttactttttatgtattgtttatttggtttttattagtctttttcttcgttttgcgtgttagcttgtcgtttccgtcgttgcgaaggttcgcgagtgcgccggaagtattcaagaagattaattgtagaccgaatattgcaagtcaagtcacacagatcctaaacacaatcctttgagcattttgatcctatatttaaattctctatttatttcaactgtgcatttattttcgaatgtcactgggtggtgtgaatctattcctttgttatggcctgtttgcattgattactttattccttgataccttgggttattataactagactagttgagctttatacattggttcagctagatattagatgtaattgcttagccatgcttagaaacattagcacactattgggataacttatgacttattattatttaatgatggcttaatgatagtttacgatggtcaatcgtgattggttaattaattacttgccaactaaaacttgataatggtgggttgtgagcacatggctttgagagtcgtgctcatgacaattaaggaccggttcacgagctactattgtgaaacattaaccgtgccaaccacaagccagcgtgggcaacggctttaccttttgtatagcatgattcattgcggagcaccagactaagaagtggcggagataagcccacgggggtcgctggggagtccatgccttgttttataagggggtgattatgatccaggaatggtgcactgtggtgagttgtgttgtgcagagggtattgtcacagcctctattcgggtactttccagtatcgcgacgcatggtagacatgatgttgaggctgtgtcttgtgggtacagtggtacatatcacaccctgaaaaattcaaaatatataaattgttgtttaattggaattattagaatttattttaaaagcctagaagagaagatctaattttaattaataaattccaatataaaatggggccagataaaatttcattaaatactttgcttaattctataattcctagatttttctgggatttatttgagctaaggaagtatttttaataaatggaattgcatttcatgaataatttaaattgaaaaaggttttaaagagtctcttttggctctgggccgaaagtcggcccaaaaaccgttctctctctcctcggcccaagtcggcccagtccagtccgcagccgcccacgcgcgcgcgcccccgcctgtcaggtcgtcgtcttcctcgcgtcggccgcctcccgaaaccctagcgctgcgccgccgccgtctccttccaaatccggccgctcctttccttctccggccgaattgatagaggggaaatgatcctcgggatctcctctaccttttcccttttggaaacatcggctaaatcggcttggaaagcgtttgattcgaggtcgaatcggatcggcttttctctctccgagcccgacctttccttctcgtcgccggccgccgtgggccttcgccgtcgccctccaacccctttaaaaggacccccgagctcttctctacccgccgctaccctcgccttcgcctctcgtcgtccgtagcgccctagcgccgagtagcctcgagccgccgtcgccgccgtcgctccagccgtgcgccgccgccgttccggtcatcgccgtcgctcgggaagaccaccgtcgtggtcgccaagtcgccgccgtcctcgtccgccccttcgccgtcgccgaagaccgccggagcaccgtcgccgtcgtcaagccgaagagctccgccgtttcaacctcgtcgccgtcgccgtccgttggtcttccgccgctcctttggtcatcggtgagttcgccgcgtcgcgctctacccgttggtgccctccgttcgtgccgaagtgccgccgttcgcaggcgagcatgcgcgtccgagccgccgagccgccgccgccggtggtgacgtcatcgctgacgtcatcgttgtcacatcctgatttttgtttcaggatttatagattatttaataaattattattagaatttatattaaatgttcattaatttacaagtgaagttaaatgtgggaaataaaatttcctaaatataaagcatggatggatttaatttttattaaattctccatggttaattatactctctggaattttctcggatttttcggagctcaattgttaattttaatcatacaaagagcagttcagcaattgtttaaatattaaattaatcattaaatggtctgattataattttgttaagtactttgagtgtccaagtattttcaagatttttcttgaaattatttgagcattggaagtatttttaacaattcaaagatcatttcagtgattaatttaattggaaaagtaattaaagttcaccttttccttttcgggccgaattaggaaaagtcctctcactctcggcccagtctcctctcagcctgcagcccttttcctctctttcccgaagtctgctttatttccctcctttaatcagtccttggaagtagaagcccagccgaaagtctagtttgcctccctggcactattcatcttcaagcttggacagagccgagccgccggtgctgtgccctgtgcagccgccgcttcctccgttaaatccgccacatcccgagctccgtttgcaaaatttgttgaggggaaatattcctcttatcctcctctatcctctcccccaagaatcggagcaaaccgttgagtattttatccgaatcgaactcgtttttgagtttatctccaaaaccgagtttttgatttcccggatcgatttcttgcgggaggagtccgatctcttcaatccaaggctataaataggaccccctagtcctcctctttcgttttccccctctcccgtcctctcccgtgcaccgtagcccgccgtcgacgccgcatagtccgccgccgccgccggccgggttgcagccgcgccgagtcgccgtcttcgccgtcgccgccgcttgccgccgccgcctttaggtgcgccaaggtgaagagaagcccggccgcacctcctccttcgtcgccggccgccgtagctcgccgttgccggtcaagccgagccgccgccgccgttcatctcgtcgccggccgtcgtcgttcgtcgtttggctcaagggtgagtaccgttgggttcgtctcgtcgttctccacgtgtacatgtcctccaaatttgcagccgaccatccaatctccggcgaggtcgccaacccgggccggccattgatgatgtcatcatgacgtcatcattggttttttctttttcccgtttttctaatagattaaatcttctgaaaatcataactaaataactgtagatccgattcgagtggttcaagttgctaaatttttctaaaatcaagatctactgccggccgggttgcagccgcgccgagcagccgtctccgccgtcgccgccgcttgccgccaccgccattaggtgcgtgggagcgacgagaagctcggccgcacctcctccttcgtctccggccgccgtagctcgccgtcgccggttatcccgagccgccgtcgccgccccttcgtcgccggccgtcgtcgtttgtcgtttggctcgagggtgagtaccgttgggttcgtctcatcgtcctctacgcgtacatgtcctccaaattcgcagccgatcatccaatctccggcgagcttgccatcctagccggccacctttggtgatgtcatcatgtcatcatcggttttttctttttcccgtttttctaatagattaaatcttcggaaaatcataactaaataactgtagatccgtttcgagtggttcaagttgctaaatttttctaaaatcaagatctacatgttaaaaatatccacatatactgtttatgcttttttttgtactgttttgttgatttttattctttcgctttagtttccgacgttccggaggagagcgttttcgttgagcaaggttcggaagtgtttgcggaagctcaaggcaagtcacacagatcccaaacaaccctttgagcatgttgaacccgtttaaagctattattttattttaactatgcattatttttgaatgtcatcgggtggtgaacctttccccgttaattaatggccgaagatgatcttattttcctatgggttataatttgattagcatgaaccttatatattggtttggttcagttaaatgctatatgtatgtttgcttagccatgcttagaaacattagctaattaaaggggattaaatataaattatattacattattcttattaattatggttatatttaatggtagctcacgatgattaatcgtgtgatgttaattaattgataattaaaacctgtttaaggtgggttgtgagcatatggttttgatggttgtgctcatgacaattaaggaccggttcgcgagctactgttgtaaaacatttatcgtgccaaccacaagctagcgtgggcaacggctttatcttttgtatagcatgattcattttggagtgccagactgagaagcggcgagaagtccgtgggggtcgctggggagtccatgcctctggttgtagagggggtgattatgatccaggaacggtgcactgttttgagttgtgttgtgcagagggtattgtcacgatttccccctttgcaatgccgtggtggtatttcggggcatggcaacatgtgtggaatcgtgtcttgtgggtacagtggtacacctctggccagagtaaaactattcgaatagccgtgcccgcggttatgggcgagttgagcgatgtttttcgtgattagtctcacactactcatcaatgttaataatgtgataattaatttgactcctggtttggaatggataattcctggtttggaggtttgatctgtacgaccggggttggttgttcaggtttggttaggcctgagcagcatggatgtgctgtttagtgttgattaaaattgatgattaactactctactgttttacttatcttaaatctttgctaaatgctgcttttgcaaatgagcctatattatgccatcctttggaatccatgtgcacttgcatatttgctgtgtggcttgttgagtatgtcatatgctcattcttgcaataatcatcaaacctcagttgaagataaaggatccagaaggagaagacgtttggcttataccccagttgagctgcctgtgggagtggagctgaagccatcgctagaccgttaattccgctgctattttcttttctttgtaagtatgtaacgttattattaagatggatttgtatattaaattgtcagtttgtgtacctcggctgattcctggacgaggattttatgcacaaattagttcggaaattactagtgaattttcgggcgtgacaagttggtatcagagccatctcgactgtaggataagccaaatggtcaaactttaaggacgaatttttccaacaaaaatgatttgtgaaaatttctcctttcttccttatctagaattctttgcaaattgtttcattgtctactctcctctctcgttcaacttgagtagttctgaaactagttgttgaaactagaagatgttgatgaggtcaacttatagaggtcagtaaagtggatcgaggaagaaccgaagtgccaagtggtcaagatggaatgaagtttggatcctaccttagaacctatgccgctaaagtgtctttgaagaatagttagtagggtagaacgcttgttgtttgctttgtgtgtaggtatggttgcattcccatcattggagtagttcattgatgagtgtgtaactatactaggttgcttgcttaatcaacttgaacaatataatggtctacacacatcagatcagtgttaaactggttaaggtcttgtctttagtgtaacccctctccttctatcttctctaatatgcaacagatggtgaacacgcgcaccagaagtggaagtggaagtggaggtggagctgctaacaatggaggagatcccacgctagctcagattctggcccaacaaacacaactgatcaatctgttagtgcagcaggcacagaatcagcaggcaaacaatcagaaccagaatccacccccacctccccaaaacaagctggcagatttcttacgtgtgagaccccctaccttttcaagcaccaccaatccagtagaagcaggagattggctgcatgcggtggagaagaagttggatttgatccagtgtactgagcaggagaaagtttcttttgcttcgcatcaattgcatggtcctgctgctgaatggtgggatcattttcgccaaggcagagcagaaggacaaccaatcacttgggctaagttcacggaagcattcaagaagacacacatacctgtaggagttgttgctttgaagaagcgtgagtttagggctttgaagcaaaaggatcataccgtggcagagtatcttcatgagttcaatcgtctggcacgttatgctccagaagatgtgcgtactgacgaggaaaggcaggagaagttcttgtaaggtctgaaggatgaactgtcagttacgttgatctcccatgactatgttgattttcagcagctggttgacaaagcaattcgacttgaagacaagaagaacaggatggataaccgaaaaaggaaaatgactgttttccaggaggcacaaggtagtagccagaggcagcgtatcatgccactccaaattagtgaatcttcttccgctggtcaaggacagtcgcaacagttgaacatcggtggtgagatcaaatcagagactaaggaaagcaatgaagataatgttgagcaagctactcaattagtgccagttcagcaggatcagtctcaagagaataacagtagtggaagggagcagcaggtatgtttcaactgttacaagccaggccactttgcaagagagtgtccgaagacaaagcatcagcagccgcaagtcaacaacattgtcgtcacaggagccaatgcagtgccagttgcgtcttcaagagttgcgtcttcaagtgttacagctcagccaccagtttcaaagcagcagtagttttctttaaagccttagaataattatctgagttatggaataataagatagaatgcagtttacctatgcccttttctttctagccgttccgaatctcgggacgagattctttgtaaggggggtagatttgtcacaccctgattttcgttttaggatttataaattatttaataaattattattagaatttatattaaatgttcattaatttacaagtgaagttaaatgtgggaaataaaatttcctaaatataaagcatggatggatttttttttttaaattctccatggttaattatactctctggaatattctcggatttttcggagctcaattcctaattttaataatacaaagaacatttcagtaataatccacatattaaattaatcattaaatggtctgattataattttgtta

SEQ ID NO: 18680 - DNA, 654 bp, Oryza sativa
caataaacctgtaaattttggaacattttgcagcaacaaatacactgacgaagaaagcagtgctggagtgtaagtgggctgacccaccaactcacttattcgccaaataagtgggtaaccagttgatcgatccacttaattagcttataagtgagttcacgggtcaatccgcttacacgcctgtgcatatatgatagtctgcaattttatttttttttttgaagattttgcagcaatgaatacactgaagaagaaagcagtgcacatatgctggtctgcaattgttttctgaagattttgcattagcaacgacactgaacatattttggtcagaagaattttcagcttaccaatcttggtacgttccgatgagccctcgctcgtagatcacgccgagcgtgttggcaacggcggccgtcggcacgacgttcatcacccagacaggatcgtcgacgagcgccgccgcgaagccgccgaggccggcgttcatgtccagcagattccggtaccggcctttctcggccagcccgccgctgacgcccttgtagcgatcgactcgtctcctccacatctcagaatccttgataaaggtgtccaccgtgacgctgcttccaaggctgccgccggcgatcctcggcggcggcgatgtaagcc

SEQ ID NO: 18681 - DNA, 637 bp, Oryza sativa
gtcaacttggtggcttccaaatcaaattaagcacaagtttgattttgcaggggtgaaatttgaggtggtggagttacaaagcacgtactgtacttgctccaggggatgaggcagcgggagcagtgcgccatgtcgaaggcgcgagccgggtaaggaaggcgcttggtggccatgatgccgagcatggccgggacgccgcgctccagggcgaagagcacctgcgcctcgtgcgtgtccttgggcgcgaacgacatcgtcagcacgtcgcgcgacagcaggtacgctccccagctcgcgacctgcacatgtggttcgttcacacttcagagttcagagtagtagacagtgcacattagcatcagattgatttgtcaattgtcatagcaaagaagacacggatattaggaaatgacctaatatcaaataattagaagaggtgaagctctgaacccagtcgtctagcccaccaccctgtggagctagccggaaaacccctgggcatttctcatcaattgtcatagccaacagcttgactcatgcatgagtgtttcccgagtaaggatgatttgtctgatgaaaaaactttgtttacgagaaatcttatttgacgcgttttatacaaccgggctgcaggaat

SEQ ID NO: 18682 - DNA, 1191 bp, Oryza sativa
cgttcataacagagctacaccagggggaagcatcattgaaggtaacacgaccgcggaagccattgagtcttatatcgattacatggccgagactgatcctatcaaagtttcctacgtctcaccaccaccgttggtatgcggtgtcagcacaactgacagaaaaagaattgttcccaatcaagtttcctacgcgcaggctcatttcgcagtgctgcaacatatggctgaagtaaccccatactttgaggagcatttagcgaaggtccgacaggacaatattggtcgatcagatatttggatcaacagagaacatggtgctcgcttcaacgaatggatcaaggatcgtgtagcacagtcgaccgatggcccaagtgagatattacaaaggttggcaaggggtccatcttgggatgttgacacatggcaagggtacgatatcaatggatacacattttacaccatcacacaagatgagaaaagcacagtgcaaaacaatggagtccgtatagatgcatatcaggatcaggctcgatcgagcacatactacggccgcatagagcagatatgggcgctgaaatatctgaaattcaaagtccctttgtttcgttgcagttgggtgacaaggtcgacaaggaaggcttcacattagtggacctggccaaggttggatacgcagacgaaccattcgtattagcaaagcaggtcgaacagattttctacataaaagacctcgcaaacaagaagatgcacgtcgttagggatggcaagcgaagaattgtgggggtggacaacgtcgtcgatgaagaagaatacgaccagaatcttcatgttagacctcagatcgaccttgatgatgatcccgaagacgaagtggcttacgttcgttcggaccattcggaaggcatatcactgtgaatgatgtatttaatttgtattggagccttaatgaatgaattgcatatgtttcatgccattccagttaaaactctttgaagaaatggatttgttaattatgtggttttaaaaaattatactggttattttaaactatatgtgagatagcctattgttaattatatgaatttaaaaaagtaatatgaattttaaactatatgtgaaaaaggcatttgtcaattagatgattttaaaaaaattaataggatttttaaactatatgtgagaaaggcaatt

SEQ ID NO: 18683 - DNA, 3143 bp, Oryza sativa
ccctctacacttgttcttatatagttgtttgcaaaatttttgggatattttgggttcaatgggatggatgaattgatgtgggctgtgatggttgaattattttggaggaaatgtgagttttggtatgttttttatggctatttttttactgcataaggacagaccctctacactgtttttatatggttgtttgcaaaattttgggatattttaggtccaataaggacagtgggggcagttgcaaatgatggtaattgatgcataatttttgagcaaaattgaggccaaacttattatatgtcatgacttgtgtttttaggtacaaaaataatatatatgtgactgttttgggttttgggtcattttgagggaattgggatggatatgcatagaaatctattattaaatgaagttactaaaattatggcatttaggagaatatgaagtgtcccggtcgccaaatctggtttggtcgggttactgtctgcacggtaccgaccaagacaaattggtaaaaagaacatttcgttcaaatacaacatttgtagaaatctgttatcgttaccaatatcctagattgatttcaaggtcatttctttatggaaccctgttgggggaagtccctcgatagcgggaggtcgtgagacccccctttcgtgggtttggccgggggaagaagctcgcttcatagaaatcacgtatccgcccctaaggctgctaatcaacttgcacacaattggattatacaggttcgggccgctgtggagcgtaataccctactcctgtgtttgggattatggttaagtgttacaaggacgtcttccctccgtatgagttcaggttttctcagaatcatccccttgttcggtgggcaaggtcctccttttatagttcaaggggataccacatgcaccgcctctatctacccttccatgggagggggacccactttaccttgaccgggtcacgatccgtgccttcgcttggaagctaagcagcagcccttccttgagtgggacccagcgccgccccctgcctggtacggggggcagccctgtcattctctcataaatgagtgaagacttgtggtggtcctcctccgaatgacgtttcgacgggacgggtcatacctatctctactccaccggatacagaggcgacatgggggggcacagccgcccattcaattggacgtgaccggcgacaggcccgtcatagactggtcacgtcctaattgacgggggtcagctagacggcaccacacgactgcccttactgcattaaacacagtgagggacagttgggcaccgcacatcgatggctgttcagcctgggtccccttcccgctcgttccccccgccacatggtagctgggcgagggcctcagggcaaagcagcgcgaaagcccgaggggcacaacgtggcaccccgaggcccccccggccgcttctgtaactcatgaggaggtgagcgtgggtgaggcgaggataaaaggatacggaggcaaggactttgccttcttcctttcgccaactgcccacttgccttctcgctccttaagccctaatattctcgccacttcacaatatcccgcgcgccaagccctccgccgcttctccaccagccatcatggctcaagacgctggtgacacagtgctcccggcatcacgcattacggcggatagacaccttatcctcccccgtaagatcatgccggaaggcgccgtcgtgagggcgggggagtggcggccgcggccacggtatctggagcgatccgtgcacctcctgtccttctctatggcggggttgattccgccgttctccggattctttcatgaggttttggatttctatgaaatccatgccttgcatctcgcacccaacgccgtgatgacgctggccatcttcgcacatctgtgcgatatgttcatcggggtgcgcccgacgatgcggctgttccagtctttcttcattccgcagctgctgcaaggtgcggtggtagggggatgttacttccagccccggccaggcacggcgggacaatacatcgagagtcatctccgcaagaaatgggaggactggaagaaggactagttctacaccgcgttgccggaccacccgcgacttcggcttcccgccggtcctcccgaaagatctgccgcatggctggcggtttcggaactgggcaaggagtacgacgcgatgtgggatcaccttaggggcctgcgaagcctgggcctcacaggggcgatggtctttggtgactatttccgccgccgcatcgcacctctccaggatcgatcccgtggtgtgtgggagtacactggtcccaacaaccccatgcgtacgcatgtgggtgcgcgctgggactggggggaggaggacgcgaagatggtgattcaacgggtgctgggcctagactccgccgagcaaatgctaattccagatgagatccttcccctccgctgcgaccgcgaccgggagagcatcttggccgtgatgtcggtcgtcggcgttggcaggggctggtccagccggggcggcaccggtggtagcgctgccggcatgggtggcggtggcgcgaccgcaggcgggagtcggacatgcggacccggcgggggtgggagctccaggtctcccggcacaaaccgcggacccggggacgactcagctagcgacccgaaagagaaacggaagatttccgaatctcgaccgccctctcctccgcgtggagggggcgccgagcgcgtggcggaccgaccgccagcgggccacaagcgccccgccggtgctgaggccggacggaagaagaagcggctccggaagataggtcaaacggagccgtgtcgggggagcttcattgagcccccgaagtggacttttaaccgccctccctgcaggtacaactgccggcacccacttcgatgctttttactcatcttaggtttcttgttccctccgtttcttttccttcattaacgcgatccgggttctcttgcagcgagattccttcccagggggtctcggggttcgacccttcgcggcggaccaaatccgaacgatcggagcggccctggcttggccgatccaaggccgcggggccttcacagcccctcggcggggcccacggccgcataccgggt

SEQ ID NO: 18684 - DNA, 2655 bp, Oryza sativa
ggctcgagcctgagcccgaggccgaggccaaatctaccctaggacccgaggcggggggcgagagggacagccactcccccttgcatttggggcgcgctcggggctggtcgtgccgaaggagggccgagagcaggccccagtctcgcgggggatctagcagcactctgtcgtcccgggggtggaccggcgacgtataggtgctgaaacccacctcgagccgccttgaatggtccaaggatgtctagcccccagaccgcaaaaggccaggagagtgggatgacctgcaaggcttgggctggctggtggcctcccttcgcccaggggcagagagagggcgaaaccactcgaacgggtggaatcctccctccgcgagggttcgcgacgggaaggagttggggagtcgtggcgacggtgacgagggccgtggctcccactagagtccccactcctggatggggtgggggtaaacgccaccgcctcctccacctccaagacctcgaccatgatcatcaagggccccgggaaacttggggcagaagaaaatgacttctcttcaaagtgtgcgactgccccttacctggcgcgccagctgtcgggggaagtccctcgatagcgggtggttcggccgggggaagaagctcgcttcgtagaaatcacgtatccgcccctaaggctgctaatgtgcttgcacacaatcggattatacaggttcgggccgctgtggagcgtaataccctactcctgtgtttgggattatggttaagtgttacaaggacgccttccctccggatgagctctctcgcccttgttctcctagagtttaggttttctcagaatcgtccccttgttcggtgggcaaggtcctccttttatagttcaaggggataccacatgcatcgcctctacctacccttccatgggagggggacccactttacttgaccaggtcacgatccgtgccttcgcttggaagctaagcagcagcccttcctggagtgggacccagcgcagccgcccgcttggcacgggaggcagccctgtcattctctcataaatgagtgaagacttgtggtggtcctcctccgaatgacgtttcgacgggacgggtcatacctacctccactccgctggatacagaggcgacgtgggggggggcatagccgcccgttcaatccgacgtgaccggcgacaggccggtcacagactggtcacgtccgattgatgggggtcagctaggcggcaccgcacgtctgcccttactgcattaaacgcagtgagggatagttggggcgccgcgcattgatggctattcagcctaggtccccttcccgctcgctccacccgccacatggcagctgggcgagggccccggggcgaagcagcgagagagtccgaggggcaaaacgtggcaccccgaggcccccccggccgcttctgtaactcgcgaggtgcgggagtagggccaggctgtagagccacgcggctggatgggaagatgacttccccttacttcacatacccccgggcccatatctccgacaaaccccattcccataaattcagtatccaaagatggttgctgtatctatgggaataaaggttccataacgaaatgatcttggatgcaatctaggagtttgcttatgataacgttagggatcttggataggaagggttttggttgcctgtgtgttctatctgcgtccgcctcgtcagcagatatgtagcatccatattccttagggccggagcagacgggatcttgacctcgacatccatatcccactagaacctgctaccgttgccactatcttatggtagtgacattgatagcaagttcgagtgggatactgatgtcgacgtcgagttcccggctgctctggccctattgagcatggatgctatggttccatcaacgaggcgaacacaggtaggagatagaggtatatcaaaccatcagagaatgtgtgtagatgcaattttgtgtttaaaaagtactttctccccgtacaacagtgacataggacatgtcgcagcaagacgaaccgatgtcaacgaccactacatcgagccggaatcctagggcctagaataagattcctaaggaagtctacaccataatagaggtggacgatgttggatatccgatggctccgacgaaagctgtcaaaaagttccctacgatatgcggaatcctagggaggcggaacttcactattctgaaggaccacatcgatctggtccctcaagaagaaaaagaagaggcctggaggcagttcaaggaaagcttccgataccctacagagcccgaggcaggactcaagcggcaggctatccgcaagatagggaattgttggaaaaatttcaagacaacgctggtcacggagtacgtcctcaaccccgcccagccagaaccatttgagaaatacccattcatcacccgacccgtgtgggatgagttccatgcccaccaaaccaacgaaagagtctcgggtaaaaagccaggcctaccgtgatctgcaggcaaggaaccttcacccgcaccggcttggcaccggaggctacgcggggaaacaggcagaacgggacaaggaggatgaagctgcagcggaatctaacaccccgcaagtgcttgctgatatcccgttccagcgg

SEQ ID NO: 18685 - DNA, 1057 bp, Oryza sativa
tgcttggcatccataatgtgttctacgtctctcagttgaagaaatgtttgagagttcctgaggaacaggcaagtccggatcacatcgaaatccaagaagacttgacgtatgtggagaagccgactcgtatcctcgaaactagtgagagaaggtccaggaacaaggcaatcagattctgcaaagttcagtggagccaccactcagaggaagaggccacttggaaaagagaagatgagttgaatgccgcccatccgcaccttttcgccagctcttccgaatctcggggttaagattccgtttaaggggggtaggtttgtcacgccctgaagttttccccttcttctttctttaaaaattgggttaaataaatcgtccgaagaagttgttctaattaacctagagttaaatccctaattaataaatgcaattcataattggagtcggcgtggtagaatttttcttgagttccccatgctgcaatacattaacaggatttttagtggaattttcagagccctataagtaattttaaccaattaaaattcattaaccgcaatatttaatcccaggaaaatccttttcctttttctcttttcttttcctccctttttcctttgttgggccatcggcccaaccttccttcctcccgcgcgctctctcccaccttgccgggccggcccattgcccctctcctccctccgggtcaccgataggtggggcccaactgtcggccccgtcttcttcctctggccgcctgcgcccggccggcaaccgccgctcccacgtcgccgtctgtgtctcccgcgcccactccgcgtccacgcgccgcgcccacatcgtcgtccgccgctcctccgcttttcccgcttgcgcgcacgcccgcaaatgggcgggattcgatttgaatcacatcccctctctctctctccactcccccacatcgccggccaaatcggccacctccccggccacgtccgcccctcccccgcccataaaaaccctcccccgggccccctctctcgtttcccactctcgccgccctttctcgtgcttccta

SEQ ID NO: 18686 - DNA, 953 bp, Oryza sativa
ttcttcgtctaacgcgtcctaactataccctaggtcgaactgaatgctgagagacaggcctcccaagaggtctgctcgcaaaaacgcgaggatgacatcctcacaaaagcgttgggaaacggagaacaccggggacgaacaaggggcattggttccaatgttccatggaagtttgggtttccccaatatgcgtggcattacaagaagcacaagctttccaaggcgcagaaagctgcacgcattaaggcccaaattcgggaggagcttaaagaagagcttagagaagagttcaccgccgagctgttaggtatggaggctcggatggaggcacgcatcagggataggtcgatcgatgccactcccggtcccatagtacaagtgagacccacgcagaggcgtagcagctgcgcatcaactgaggctccggcagaacagcctaaaggccccgccgcggtggaccacataccggtaaaaacaacttaataacgcatatattgtattagcaccacaatacattgcaacatatactaaggacactaatgaatctatcgcaggaaccgacatcgtgtaccctagtcgattgggtgacaccaggatttgcaattcctgccatagagggtcaagcattcaagcctacaccggagacccgagtgtatggggcgcagctgcaagccggcaatgccaaagttcaggtggacttagtgaagcccgattgggttggctacactatcccacactcacctaatgacgagattctgatccttggggctgcacgtgggactttattcaatggcccaagcacagcattgagatcaatataactccaaggctagcgccaagttctcgtccgccgccgacgcatccccatcaaactgttgtatctctccctcctgccgttgaacaaagagatgaagatctccaatgtcacgcccaaaaatttaagaaccagaatt

SEQ ID NO: 18687 - DNA, 1639 bp, Oryza sativa
tacttgaaaagttaaaagagcaccaactatatgccaatttcagcaagtgtgacttctggcttaaagaagttcagtttctcggtcacgtcgtgaatgctcgaggagtagctgtggatccagcaaatgtggagtcagttaccaagtggaccccaccaaggacagtcactcagattcggagttttctgggacttgcgggctattaccgccggtttattgagaacttctctaaaattgccaagccaatgacccagctattgaagaaggaagaaaagtttatttggtctgctgaatgcaataggagttttgaagaactcaaatgacgattggtgtctgcaccagtgttaattctgcctgatcagacgaaagatttccaggtttattgtgatgcatctcgccaggggctaggatgtgtgttgatgcaagatagcagagtggttacttatgcttcacggcagttgtgtcctcatgaaggcaactacccgacccacaatctggaattggccacagttgttcatgctttaaagatctggcggcactatctcatcggtaaccgttgtgaggcatatatagatcacaaaagtctaaagtacatcttcactcaacctgatttgaatctccgacaacgaagatggttggagctaataaaagattatcatatggaatacactaccatcccggcaaggctaatgtggttgcagatgccttgagcaagaagagctactgcaatgttgcatgggtagagaaattatgttgtgaggttcaacgtgatttggaacacctgaaccttagtatagttgagcacggaatcgtggctgccctagagacacaacccacactggtggagcaggttcgcatagctcaggcaagcgatcctgagatagcagaactcaaaaagaacatgagggttggaaaggcccgaggttttgttgaggacgaacaaggaacaatctagatgggagaaagattatgtgtacctgaaaacaaggagtaaaagacctgatactgacagaagctcatcaaactcagtattccattcatcctggcagtaccaaaatgtaccaagacctcaaaaaaaagttctggtgggtcagcatgagaagggaaatagctgaatttgtcgcactctgtgacgtttgccagcgagtaaaagcagagcaccaaaggccagcaggtttgctacagccccttcagattccagaatggaaatgggaagaaatcggaatggatttcattacgggtttgcctaggacatcatcagggcacgattctatttgggtagtcgttgatcggctcaccaaagtggctcacttcattccggtgcatactacctactcagggaagaagttagcagaactttacttggcaagagtcatgtgtctacatggtgtacctaagaagatcgtgtctgatcgagaaagtcaattcacttcaaagttctggcagaaattgcaagaggaattgggaacccgtttgaacttcagcacagcctaccatccgcagactgatggccagactgagcgagttaattaaatattggaggatatgttgagagcctgtgcacttgattttggtggagcatgggacaaaagcttgccgtatgctgagttcttttacaacaacagttaccaggctagtctgc

SEQ ID NO: 18688 - DNA, 691 bp, Oryza sativa
tcgcttacatatgtgtttctaaaatagaagttaatgcattaacattatttaaattacaaagattaatgacaattacttcgaaaaattattttgtctgtaataaattaagtggataaatcgtaataagcaaatatatgacttaaaattaataaaaattccaataatcatatatacttagcatatgaatgatattattaaattggtaaaaactctaattaagatttgtatgtacatactgcatgatttaaaattaataaaaattgtaatcatcatatatacttagcgtaggaattatattaaattaaatgttaaaaactctaattaacatatgtaaatgccacatgcatgatttaaaccttttaaaaattcgaatagtcatatataagtagcctatgaaagatagtaaattaaattgtgaaaaactctaattaacatctgtaaatgccacatgaatgatttaatacttttaaaaattctctagttaattataattagcatatgaatgatattcaattaaatgtagcatatgaatgatagtaaattatgccatacatcaattgatttatatggataatcaatacatccaaaatagtttatatcgtgtacacaataattacggcattacatcggcggtgacggttgaccgcacatactttctcctcactattgttccctccttgtgatcgctgcg

SEQ ID NO: 18689 - DNA, 3475 bp, Oryza sativa
  unsure (1)..(3475): unsure at all n locations
ctcatccggtggtccaaaatctgcaagatttggggatacaatttctgtgggcaggaggttagcaaatctatatatttttttttcagggctacatgcagaaggtctagtaccgacataaaggcagaacacactgttaccggtgttacaaaccttcaatgaatccatatatccagccaggtgacaaagatcatcgagatcatcaagactagtggtggcacctgtagacggggctgcacgggcggagttggggttgggagtagggcgcaccgcgcacgagcggcgcactgaccacgaaggcaacctgcattgtccttgacgaggagtttgtggccgacgttcctgttgctgccctgcagaatcctcttgtacagcggtgggcagctccccgactccgccgcctccgtctcctgcaggctcaggtcctccacgcggcggatgcgcaagccgatcgtggcgccagcgctgccataatcctccgttttatattataagactttctaacattgtctacattcatatatatatatatatatatatttggtaggaagctaaacacttaattttactaaataatagtatggtttaaaatagcatcaatcttaataggaccataaatcagttggcaagctagaaaatagataatgaactatagtatgtcttgctgcaatccacagagacattctgctactcatatgctcttaagtgataattaattagttgctataattagttgttgatatataatggagtaccgtctatcataggagtatggaggcgtacttgaattagttggcaataatcaatatccgaccgcgtcggcaggccgaacgctgcaggctctcgcagcatgtgaagctccaggacaactggacaagactcacaagagtgaccaccggcagagctcgcgtcgcgcacttctgcatgattgcattgcatccggagatcgattttgctaaacatctcccgcgtgatttttttcctggcatttagatgaccatatgccccgaggcccgacagcccggcccaaagcacagccatttggcctggcccaagcatggcatggtccgactggtgtcgggcctgtgctggtatgacctgacagttgggccgtgtctgggccgatgccttggcacggtggccggcatgacacggcacgatcgaagaaaaatagtagacagacctaaaatatagacttaattaaccatataaggcaaggtccaaagaaaagaggaatacgaaaaaggcttttttttcagccatatatacacatcccaaagaattgagggatgcaaaatagacttattatgtggagaagcacgatgggttgtcgtgcctttgggccggcacgtcacgacccgagtcttattgggccgtgcctgggccatgtgtgcagcccgtgggctagcacaacatggcccgacgtgtaggtcgggctgtgccggcccgactgacctcggcccaggcggccatttggccatctatagtatacggtgtgagggcacaaaccctttgtccacatcggctaggggcggcggctgccctcgtcgcccatcggttgctcgtcgtccgtcgctgcgcttgtgaccaactcgtatatacgtgactcgcgctcaccggtgctcctccaggcctcccggtggctagagtaagcgagcaactaactcagagagaaagagaggggagagaaaggagagggaagtggagaaagaaaatgagatgatataagaatcacttacatgttggtcccatgttgtgatgttgatgccacgttagccaggggcgaagccaagatttatggttagaggggtgtgggcagggcgaacaagtgataaatcagagtaagcaatactgatgataaaacaagacatcatgtattctgccctaaaaaagcttgaatttagctttttagttgtatcgttggatgtttgatagtttgaaacttgagacaccatgctcgacagcgagatgcaatgggaggacggagagacgtgtgaagccgaagcaatgaagacgaggagttgatttgcgttgtctctccgtctctttcttattaattaattttctaaccatatttattcatcatggactaattaacatgctaatgcgctagttagtatagaggggggttggatagggtgttggctctccagcaccccgcgtagctgtgcccatgaggttagcgaaaaccactctagaaacaggtgagggagtcattttgcacggtttcaatggttagagggatcaatataccctattttttggttgagggtacaaatcaaatccgaactatattcgaaggatcaaattgcatttttttcccactaattagctcggcctatcataatggcaaaagggcttggcccatacgctttttactccaggccccgggccacagcctagctaaggtgtacgggtcaggatcggatccactcctgcacatagcgacactagtgcgctgtagcttccgtttaggctctacggtggattaagtttttgccacgcccagaaattcacaaaccagaatttctaagctgaatgtgcattaaacccctatccagaaccagccagggtacacaaacgacaattgttgacatacagatccacgttttacaaaaatataaaaagattacaaatacagtggaaaaagtgaaagcgagctaagcctgaagacttgactcctgcagcgaggcgactccactccacaggcatccttgacggcagcgacaaaaccaacttcttcaagatggctccaactgggaagaacttcaactntggtgtggagaagagagagtaagactgagtactaccaactgtactcagcaagtcataccggaagaggaggtataatgcaagatataaccaaaggaggctacaggtttatttgcataaagcaggcatttaaaagtagtagtcaaaagcagtaaaacagttgtagtaattaatcaatattaaccaatcactatccaacgctacaccacgttgcaataggcccaactaaccacctgaactacaccagttcattagctaacaaggtgagactaatcacggtgaatctggtcaaccgcccataaccgcgggcacggctattcgaatagttttactctgatcagaggtgtacaactgtacccacaagacacagccccatgacacgttcccgtgcaccgacatgctaccacgacataccggaaagaggccgtgacaggacccttcgcataatcccctctaaccgatcgcaccacacctcagggttcgccccgtccccagcaggcaatgggtagcccccctctcgtgccatggtgaatccgaaagccgatcaaccgaacaccccgaccgacccaactccatcatgcctatcctaacctgagtacgtcggctagaggaaagctacactacaagctcagtcgtagtccacgctgacttgtggtaagtacgataaattcttccagggcatcccgcgaaccggtccttaattgct

SEQ ID NO: 18690 - DNA, 2486 bp, Oryza sativa
cggcctcgagctgatcggacggcgcggtgagcagccgccaagctcggctcggcttcaaagccggccagccggccatggctagtggcgatggcgcgcacagccaccggcggtgaccggcggcatgcgaggcgatggcagacggtgcggaaggcggcggcgtcggccgaaggcgacggcgtgcgcgcggagaacaggagagagaaaaggaaggggagagagaggtggtcctcaccgacgagctcgggccggagtgggaaacgaaggtggcggcgtcgactggcggcgcggagggatggacgggcggcggcggcaccttgggagggagttgagaggggttaggaatagagagagagagagaccacggtggtcgccattgtcggctggaggtggaaaggatggatagctcaccggcatgcgaggagttggagctacggcggtgatttgcggaaaccgagcggtggacggggtagctcgtacgacggcgaagctggcagcggcgagcgcacagcgtggcggtgaccattgcaatggcatcgtgcggctggaggcggcggcaagcggcagtgcgtgcggcgagcgacgcgagtacggtaggacgcacgggagggggcgacgagtgtgggaaacgagagagggagctcgggggagggtttttatgggcgcgggaggggcggacacggccggggattggcctatttggccagcgacgacgtgggggaggtggagagagagagtgggatgattcgaattgaatctcgcccttacgggtgcgcgcgagctggcgggaaggcgagggcgtgggcacaggaggagcggaggaggtgggtgcggcagtttcggcggcggcggttgccggcttgggcggaagcgggcggcgggaggaagggggaaggcccgacaggtggggcccagctgtcggcgcccgagagagaggagtccgggaggacttcgggtggaggagggaaggaatgggccggcctggcaaggagggtggtgcgtgagagaggttgggccgacggcccaagaaaggaagaggagggaaaataaaaagaagaaaaggaaaagggattttcctgggattctttattgcggtttgatgtttttaattggttataattatttccaaggcttctgaatagaacccaagaaaaattccacatgccgattctgattattatttgcatttattgattaaggaattcaactctaggttaatttgaaccaatttcttcaggcgatttattcaatgaatttttaaacaaggaaggggaactttagggtcaggtggagccgacggatgggagggccggggcagctggagcggagtggcagccatggggtaggtaggaggaataagttcaccggaggtcccttaactcaacagcgagattttttgaggtcctttaaccgcaaaatcagaaatatatactccaaaactcactcaaaccgttcaaagaaggtccgatgacaatatttttgcccagttttactgacgtggcatcctagtcagcaaaaaataaaaaaaataaatatgtggggttcatatgtaagtgagaaaaatgtgtggtctcggttttttttctacccaagcttgggagtggggcaggtggccggcgggaggggcgggaaacggccggcgggaaagcgagggggaggcggcattaggtgttgccgccaccattcgtgtgccgcgtgctcgacccggtgcggggtcggcgccgggcggagcagggttagacgcggagggcggtggaggcaccgcagctggtggaggagatcgagggccggagctcgtggaggtggagctcgagaagcgtgacggcagctacagcttgagaagctcgagaagtgtcgcggcggccgctgctccgtccctttgccatgtcgcctgcagccgtcccccctttgcggcctactccagccactctactcctcccgctgccatgctcgcccgccgctggtcccccctctgccatgctttctcgccgctgttgtgccttctgccgctctcgctcgccgctggtcccccctctgccaacctactgagttctccaccaaatccctccatcgccgttgctagcagatggacttcatccttctctctcggaatcgattttgagggcgacggtgatgagtcccacctcaccgacaacggcaatggaggggaggagcagaagcgttatgaggctctcgatgcaccatccttctctctcgacatcgacggtgatgaggagcaccactgggaggagcaatggtgaagttacgaggttcctgacgcgccctccttctccctcggtactaactctgatggcggcaacccggagccgccgctcgcccgccaccgcgcgctcgcccactgcttgctgccgacgacgccgttgctccgcacccgcactcactcgctgccgccgccgctccgcctgcctttggctgtgcgccgctgccaccgccgtcacctctaacacctctaccgcaggcctagattt

SEQ ID NO: 18691 - DNA, 3460 bp, Oryza sativa
aggtaggataaggtgggaagggagatgggccgtgggctattaacacaggatgaaatgggccgcgcgtgttttatcagttgtgcttgtctccagtgttgggcaacaagtatcaccggaacccggatgcaatcatgcaaaaagtgcgtgacgcgaactgtgccttagctggtcactcttgtcctggagcttcacatgctgcaagagtctgcagaatgcatgcatttggcctgccgacgcgctcgatcggatatttttgccaaccaattcacgcacaccaacaactaattataacaattactcactccgtcctaaaatataaatatttttaacttaatgacaagtcaaatattttaattatcattaagcaaactatcataatatataattaatttttgtttaaaacatcttacttttataaatattggtggtcaaagtagtatctcatagactgtgtcagggtcaaaaatagtaagattttgaaacggagggagtataattaattatcacttgtagcatataactaacagcatgtctccgtggagcatatataactatagttcattaaccttgatcgagacactcttcacgaatagtattatcaacaactaattatagctactgcatttcaagttagtaatatataactagaagcatgtctcagtggatcaagcaagcagacatagtattccctagctagctaacgggagggcgggcggcacgtaagcacccgaagaagagtgatgaagctgcaactcccgccggtggagaaaccaactttggtcggtggctacaacgcgtatatgtgatctttagtcccggttggtaacatcaactggaactaaagatcatctttagtcccggttgtagagatgtcagatgttgtcagggcccccgggatctttagtcccggttgttgttactaacaggggctaaagatccgatctttagccccagttggttggtaacaccaagggaataaagatccccccgttatatatgccttcttcctcctctagcccgagagcaagcttcaaatttctcaaagaaagaggaggtcatgccaaaatttattgtgaaaattttttagtaattatatacaaatcggatatgtctaaaaggttagtaacttcatcctccaatattttttttcttgttatattacttttggagctatgtttcacacatttttttttctacaaaactttgttgtaagttgatgagagagaaaatttatgtggggaagaagaatatatagaaattttattctcatagtttaaaatatgatgaaaattaatcttaaaaaatagaaaacaaactaaattgaaaattaagagaagtacaacattaatattagtttagaacttcaaaaattgttaataagaattgctcgtcgaaagagttttaaattattttatcattactgtttgactgtcattattgtatcaaaatttatttatgtatgatttttttttcatttcatgtagatggatcggcaatggatgtatgctgaccggcggtccaaagagtttatcgagggcgtgcattattttttgagagtggccgaagctaacaagcgtaacggttttatttgttgtccatgcaataagtgtaagaactagaaggagtattctgcatccaggactattcatttttatttgttgtccatcaataagtgtaagaaccagaaggagtattctgcatcctggactattcattttcacctgtttgagtcagggttcatgccaagctataattgttggacatcccacggtgagcaaggggttgaaatagaagaagatgaagtggaggacgagaacattcccgactgggctcagtacgctggatttgaaggaaatcaaacgggcgaggtggacagggatgctggcgataacaatgctgcggatgatctttgtaacaccccagaaactacaaagacatcgggatgctactaaatagacatacatttaacaaagaaggagaaatttcgacagcaactcctctaaaacataagcattgcggaagcgtcaaatataagtatagcattgcaagtagccatctacaaaaaaaaaggagaaaggaacattcagggatgaaataaactaatttcaactctcagattcatctagtgcaacttaacaagggtacaattcctttattataaaaatcatgacaactttaaaaattagggtggcagtgtggaatgcagctgtgcttctactcccgttttccccaagcgagcatgtcactttaagcacctgaaaacactgtaggggtgtgagaataaatctcagcaagagaattattttatcaagttatttaacctaccaaatcattaaattatatttataagaaaacaaaggaacataacattaaatataaaggcaaacatctagtgttcataggttcaagagtaaggaggataaaccagatctgcaaagacctcaggagaaagaagccctctcatgaactcaatagagtatataacttccataccccaaaatgctaaagtgcaatgcaatgcaaatgcaataatattcctgccttcacacccaacaaggtgtgaagctgcatcgtgttacgacaatacacgatgctgtaccggtacggtcgcgaccataggttcacgacataacttcgaatgaaatgcaatgcaatacaataatagaggaaagatacacagccataaatccttccaatgatatcacatataataattactctcactaaaagcataccacattaaccatagttaccgatgtcacgcccggaaattcactagtaatttccgaacttatttgtgcataaaatcctcgtccaggaatcagccgaggtacacaaactgacaatttaatatacagattcatcaaattaactaaaacgataaatacttacttatgaggcacttagtcctcatcatgaagaaaactgcagcggaaaataaaatctagcgaagctccggctccactcccacaggcagctcaacttgggtataagccaaacgtcttctccttctggatcctttttcttcaactgaggttgattgattattgcaaggtgagcatatgacatactcagcaagccacacagtaaatatgcaagtgcacaaggataccaaaggatggcataatattggctcatttgcaaaagcagcatttagcaaaacatttaagagaagtaaaacagtggagtaattaatcagaaattttaatcaacactgaacagcatacccatgctgtacaggcccaaccatcctgaacaaccatacccggctgtacagatctaactccaaaccaggagctaagcaaattattaccagttataacatcaatacttattgtgagaggtgtgggactaatcacgaaaaacattgctcaactcgcccataaccgcgggcacggctattcgaatagttttactctggccagaggtgtaccactgtacccacaagacacagcctcaa

SEQ ID NO: 18692 - DNA, 13035 bp, Oryza sativa
catgtatatgtatatgtatatatatatatatgtatatgcatatatgcatatacatatatatgtatatgcatatatatgtatatgtatatatacatatatgtatatatatatatatatgtatatgcatatatgcatatacatatatatgtatatgcatatatatgtatatgtatatatacatatatgtatatatgcatatacatatatacatatgtatatatatatatatatacatatatgtatataggacactcatatggggcaccatggtgcccgggcaccatggtatcaaatacaaaaaatcactcaaatttttcaaaattttcaaattgtgagtatatacctagttataataactcgattcatacctatacctatcaacaaaacaactcaaatttaactttatttcacaatccatgattacatacctaactaattatatgtatggatgctatatacctagaatcaaaatctaacaaaaataagttcaaattcagttcaaacttgctttgaactagttagtaaagtagctaatgttaatatctaagtaattgaaaaagtttcatactcatttgaattaggtatatactcaatttcaacaatggtgcccgggcaccatggagcaccaaacaaatttactatgtatatatatatatatatatgtcctctctttttgtgcgtcagcacagcacttgtttgtttgttaacatctcctagcaatgttacagctggttgtttgcttaagtttttgtctaaggtgacaaggatttacttgcttttgtttcaataaatctgtgtttggtatccttttgtaatgaatcatgtgggatgtatcaatcttattagaagtttgtgtaaagcatgtgtacaaaatcggcagtgtaagatatttttgaagctgcaattagctggtgttagaatagtagcgggtcggtccaccctagaccaaggaaaccacagcggtccacacggctagtccgcggggatcgatggtccggatcggccagggctgatcggatggccgtgaagcggcgtggccagggcacgggcacagctcaacactggcctcgccgagtgttgtgagtttcaaaagatcttagatggagagataaaaaaaagatcatagatggagagttaaaaaaaaagatcttagatggagatacaatctatatcaaaacggtagagatcaacgagacctataactttgtagatgaaagttttacatttgagattgtttatgtacctaaatatttattcactacttaaaaaaaggcacatacaagtcggcattataggtgccggaatagctaaaatcggtatctatagtacttttctcccttcaaaatatgaaaaaaaaggcacctttaatacactataggtgtcggttcttctaggtgccttttttttaaaaaaaaggtatctttaatatattatatatattatagatgtcggttaattaaaaaccgatacctataatatattatattataggtgccggttttttaataaaaccgacaccctatcaaacgagccgagcgaggtgggcggagaggcggcagtggtgggcggcgccctcccctctactagattcggcgcgaggggaggcagcggcggcggcagcagtagcgggcgacgacgggaggagaggcggcagcggcaggcggtgccctcccctccgccagatccagcgggggaggcagcggcagcgacgggctcccctccgccagatccggcaagaggggaggcagtggcagtgggctcccatgggcgacggcgggaggtggcggtagcagcgtgtggacccccgtttttataacaggaatcaatcgtgtaaacagtaccatttccctggatcaagtagtctggtacatacgaattcatagctgaaataccaaatacacatacacgaatgtgtagtacgaattattacatcataagcctgcaggcatagtcttaaatcatcggaccaagcggtccggaatacatccaaaagcagaaataggtaaggcagcagaatttaagcagcggcatgccattgccacaggcaacgaccgtactaagacctactgggcgccttcgtcttcatctccctcctggtagtaggcatagggatcctccgaagcttcatctcccgcttctaataaattttatatttgcaagggtgagtaccaaccgtactcagcaagccaccacagcaatgatgcacatgatagaggatttcaaaggatggctatggttcatttgcgcaaagcaagttttgtaattcttttcacaagcctaagacctagcaaagactaatcaagttttaataccattgttcataataaacaatgacggttctgtccaccatccattgtgatcccaaggatagcttcccgccattgagtcgttatgattttctaaggacgtccacattcccgcctctcaggaagtggctctatcagcataaaaattatcatgcaatattccatcccactcaagttaaagaatttagagtctagccaagtgtaatacatgtcccggtgctcattaaccgcgagctcggctattcgaatagatttggtttactcacactgcagtggatgtacactttacccgcactccgcgactgcccaacacatgagcctcatcccaacacatgagacgcgtcacggcaaagctttttgataaccttgcattggcagtacccgctccatgaactttacatcctcatgcactctaggcgtcatacgtttctagcagtgagaggagttctggcgctcccgggaagggaaaaacacacactcctacgttgcttcttgtcgttgaacccagtccatcatgattgttctcttatgggtatcctcatgtagtattgccaagccagcctctgaccatccggaacgggcatccgccattcacctggccatccgaaccgggcatctgccagcagactgctgccacatcacacacctaaaagaagaccactacgcatggatactgcctccgctcagctatctactccgctaggtctatacccatacgagaagtgcggttgtacggggggtcgtttcatgcttaacttcatggctcggtccttaattgaccagggacggcactagccttttccggacaccacccaaatcctccagccgccccagtcgaaaacagttgtttaactttattttcctttcacaaatcatgtcatcaatatcatggcaatgtggcgctcatgtctccacataccgcatctcaattaccttcccaaaggtaattgcccaagcatatagcatttgataaatatgagtatgcatgattctagaatagcatttctaagcaattgtcataattgactagagactcatacgtaaacatggttacgaaggaataaggggtaaacaataatcaaggcatggcataattacaagtaggatgttcataattgcatgcaattttatttgtaaacaaaacaacttcgcaattgggatcaacatgttcaaggaatagtgatgacttgccttgctcaaggtcttgcgggtcttggccttcacccggatccgcggctccctcggtctctataattatgtgcgaaagaacaatttgaattcgattagaattcaaacaaaatccaaataaatccaaatgaaagtcgaatgcgaaagttgattcctttattttaactttactattcgcgaactaaggcaaacccaatttcgattcaaactattttgcgggtataaatgttttgttgtcataagtttttaatttaatctacccgagcattatatccatataataggttagagatttttatcgcgagctaaatatcggacgaaatcctagaaatattatatgatttaatttagtctatgactagatgattaaatataatacacggctaaaatccctaggaattaaatccgaatttctaccgtgaattgattacttatagggattacccaaaaaaataatctataataatccataagaattcatctatttgtttagttattaactacatctaaattattatcgcgaattgattccttatagaaattgccaagaataatccataatttatattaaattttgcaattctatgactataattaacctataaaattccaattattttaaattttctaaacttccctaatctccctctaatttccttttttttctctttttcttttcctctctttctttctctctctctgccagcctctcttttcctctccctctttctctcggctctctctcccacccgagcagtggcggcggtggacgcgaggggaacggagggcggctcaccggcggcagcagcggcgacgacggcggcagcgacggtggcgcacggcggcgcgggagtggcggcacggcggcacgagaacggcggcgcggcggcacgggaacgacggcacgggaacggcggcgcggcagcatgaaggcggcggtacggcggcactacggcggcgccgcggtaaaaagggaggtgatggacgggaatgggtgtgggggagaagagaagggctgggggttttatagggtgtgagagagaggagagagagggggcggtgaaggagggtgaggcgacggcggcgcggcagcgcggggcgcgaggcagcgatgggacgcgcgcggcgatgggacggcgcggcgcgacggcgatggcgacggcggtgtagggctcgaggcggcgacggcaacggcacgtggcgacggcgacggcgacggcgacggtgcgcggcgcagcggcgggcgatgggacgcgcgcgtgacgggacgggtggtgacagggcggcagcggtggcgcgcggcgcgaggcgggtcgcgacggcgatggcgacagcgcggcagcggcggcacggggcgcaaggcgatgtgacgggcgagcggcgacggcgacggcggtagcggcggtgcgcggcgcgaggcgtggggcgcgggcgcggtgtcggcgcggcagcggggcagggttaggctaggggacctcgtcgaacacctagcggccgatgaatagtgccgttttctatttacccgatttaagcctatttatttatttaaaattgattctataaaccttaatttttgtacaaatgaagttcactcaatatttgtgttattccaaccaatgggtccatccttgattaattttacccatattttatttttatataattttcttgaatttaattagagttaattcttattccgacacttttcaatttaattgatacaaatatagtcgtaataatattttactcatttctatcctcactaaatattattttaaattgtactttaattatttacttagtcaatttacttttcagggtttattcctaactaattatccattattcgcgatttataaactccgaaataaaaattcaataaaataatcgaacaaaattggcatgatgcaactttatttaaaaagtttttgaagatccgtatttttagagtttagcttttgtcgtcgaatttttagggtgttacacagcgggttcccctccgccagatccggcgggctcccatgtgcagttgttgattgtgtgatgctgatgtgtagttgtcctttttggtagatttttagatgttttttttgggttgctttgatttttgcaaatcgtatacctcaaaggtgcagtgttctaatcagtgtcatcttcatggtgttggttagaaaaaccggcacctttgtggggttctcaaccggcaccaatgacattttctgtggtagtgatttaaagctcttagttcttacaatttctggttacttagaaagtttaaactccaaaatttttataggaggttggttggttcatatataaaaatcgattttcacatatattcgacttaagccgcccgcctaaaaaattctcaaaggtggatgccttaatatctacttgtgaaaatggttttctatattttcattttattaggctccaaaacaaaacaaaaaagtattttgaattttagtgggcatctatacacactcacacatccaagttgcaaccagtggcggatttaacgtgggggtcttgagaccccactacggccactgggaccactggaaccatggagatcgctctaagccctcactaaaaattatttgtatagatccatatgatatgggggctgaaggttctcctagtttgtttagccccaactattattttgttctggatccgcccctggttgcaacccacaccatttttttttgcacgaaatacgcatccgtgtgttttgtaggatttgaactccccacaccatcttttttctacacgaaagatgcatctgtgtgttgtataggatttgaactcgagacttcctagttagtctacacccatcatccttatcatctctatgtcattcttgttttttagaattaatatgctattcttttgatttcttctgtactaatataaaaaatatgagtttcatcttcaatcctttaatcttggatccacatatcacgtgggacccacctgtcatccggcccaaagaaaccacaccatcggcggaccatgcatgtcacgcacggaaaaaaagaaacgtggaaaaaaaaagaacgccaaaaaaggaaaaaagaatgcaaaaaaaaaaacaaaaagaacgtgcatctaaccccgactgctcccaacgacacctctactacgtctctgccgccgtcgacggcctccaccgctgccatcttctccctcttcaccgctcgccctaccctttgtcgccgcctcctcgtgcgctcgcgacgctggcatgatatgccggagaggcggggtcgccgttggccgcttctccactcttccccttcgccaccgcatcaccgtccaccatcttcgtgcgggcggatattgccgaatcatggcaaccgcgtccgacgctgcctccacgtgacccactgccggcgtctccctccaccgcgccgtcctccatctccaccgctccattgtcctgcctccatcatgatccaccgccgccgtcgagaccatatgcctccatctccctccatcgccatggctacagcctcttccctgtcctcacaaaatccccgtcgatgcaaaacttctccccgctaccccctaccccgtgctccacatggcatctgcgcctccgctcgccacccctccctgtgcgtcgggctaccccgcgtccgcgcctccccctcgcacctaaccgcccccctaccaccgttgggttgccacctagcagcggtgtccgctgaagatcgctgccttgattgttagagtttgtctcgaatatgtgtacaaagtcggttatagtttaggacttggagttgtactaggtgtaggactagagtaagagttggactctatcctaggatctctcataaataaaggggcgtgcttgttgtaaccgcacggcgacttagcatagcgagagggagcggctgccagcggcatccggccgtgagtcgttgtaactcggatacgctgtaatatgctggatcggggaggagcgcccataatcagtgccccggagatgaaggcttcggctgaactccgttatcaaatatcatgcctcagtgtcgttatcgtgtttggatctcctatggcgtttcttccacatttggtttccgatgtgatttcggggccggttttataacaagtggtatcagagcctgcgggagatccatggtagaggtacaagggaggtgctccacgccgtgacgactacacaaggtgtctagggacagacatagacgcaaggtggagcacggcggcgataaacggaatttgatcggtggaatcggacactttaggcggcagtctgaaccgttcgatggctattttcaacagggagatgaccagacatagtgcttgggttgatggcggcggaagcgattggcgatccaatcggtggatcggacacttcgggcgggtggctcgaactttccggtgagctactttcaacagggagatgtaaggcctcatgctcggggttgattgaagctagacgcgatcggcgttctaggttggtggaatcgaacactccaggcgaggtggcccgggcttttcgatgagctacgttcgacatggagatggcccgggcctttcgatgagctgcgttcgacatggagatggctagacatagcattcgggtcgtttggcggctgagaagacagcatggtgatttgtcggcttcggctcatggctagattgacaggcggtcaattggaggtcggagcggttttgttttcgacgaactctagtggtaggaacacggcttggtgtggtcgtcgtgtaggtgccggcgggattcaacgcaggccagctctggtcaacggaggcggcggtagctcgtacaaggatggtgtccgagggagcagttatgcgcatcacgcaggagggctgcacacaggggttctgagcaagatgtgcaagtaccatccaatggcacgtagcagtaaggaagacaaaaatatgagattgcttgagcattggattgtgggctgtcataggaagctatgcatggacgtggtgtgcgcacatgcatgagaatcatggtggccattaatgcaaagcagggatatctgaatatttttgttgtcttggaggcaactacatggtggctggtggctgggcaggcacggaaaccgaatccaatcaagcgccagaattggtagtcgaaactgtgttggtccgtctaagtagaggcatggcacagtacgtgagccaaaggcgaggaggtcggatggtagacggaacagtgcggttttttgtttgtcgctggttacggtgtgattgaggagttgttctcaactcagagtcgatgaactcgttggaggccgggtggcagaagagatgacagagtcaatttagactcaggttatctagctaagccgaaaaaggggatcgtgaattaacaacagtaattgagaactaggtttaggcgttcgcaatggattgatcggagaaggtggaggctcaggcagaggtgtacagcagtgcgtggggtccttggcaatagcgggggaaaagcgggggaaaatcgttgagggtgtcaacgtgtctgtttggcagtacaggatatatccagaatctgcggggtttgcatgatggggatatatggaatctgcgtcactgaagaggaagagcgagtgctatggtggtaatttcttcgggtgattcaagcaacggtgaattttctcaaattatcgggtactcagtctaggaatgcaagaaagcttggatgttggatctattagctcggttcattagacgacaaggaagaaatggttctcttcatgtctagtgagtttgctctgtctatttggtgatgacattggttatctggtcatgaattagataaattcaaatcaaagacggaagatgaaggtgaacatggtcttcggggagtctatgatgtgacagctagggagaaattcaattcgcttggcaagacgactgtgatcatatgagagaaggtggagcaatgttctaggtggagtcaagggaagaagttgtaaggatagcggagtctcttgtttacggtgagcctattgaaggcttgtcggggcggctcggcgtgagcggcgaaaaaggatcaactcaagtcttgtacacggagattcgagcaagtaacgaattcaggttagtgtggcatattcgccaaggtggagtttgttagagtttgtgtcgaatatgtgtataaagtcggttacagtttaggacttggagttgtactaggtgtaggactagagtaagagtcggactctatcctaggctctctcataaatagaggggcgtacctattgtaaccgcatggagacttagcatagcgagagggagcggttaccggtggcgtctggccgtgagtcgttgtaactcggatagtcagatacgctggatcggggaggagcgcccataatcagtgccccgaagattagggttgggcgttcagtcagactggaaaatttggtctcgttcttcggtttttcggttagttcggtctttgaaaactcaggaccgaatttcatccaaaaaattcggtctctgtctcagtctgaccgaatattttcacagccgctagagagaggagacggaggcgacgccgaggcggtgccggcgctggaggaggacacggcgttggaggtggaggcggaggtggagggcgctggcgctgggcggaggtggaggcggcgtgcagggcagcggcggcctgcggtagctccaccgacgccgtcggcgcaccccccaccagcacggctgcatgggggaggaggggatgtggtaaggggatgtggatgtggatggagaggatggtggtggtggtgggttggatatggataaggttttgcttgtgttgactactaaggaggtattggacctaagagcatcaccaacagattatctataattttctcctaaaaatttgtagttgggtttcctaaactgaaaataggaagtgaaaaaactcttccctccaacagatagcctaaattcaatccccaaaacttaaaagtgggtcttcctgttaaactaccaagagaaaattctgttttttttctttcacacgtagaaagatcgctatctcccacgcgcgggaacgaaggagaggcgggattgcgtgattgggagcgactttcgcgcccgcatataaacggagcgaggaacccggggaagggaactccaaaactcggataggagagtaggggatctgttgaagctgatttttagactaaaatccctcaaaattagttttgggaatcgtataggtagactgttggtaatgctctaatgggccaaagctatatttcagttttttcggtcaattcggttaaccgagcccaaaaactgaattgaccgaactaaattcggttagtagaaagtgctgaccgaatttgtgaccgaattttttggtctgggtctcgatcatttcggttcggtctttttctatccacccctaccggagatgttggtctcggctgaactccgttatcaaatatcgtgcctcggtatcgtcatcatgtttggatctcctatggtgtttcttccgcatttggtttccgatgtgatttcggggccggttttataacatcgatgactccaggaggcggggctttgatctgttgggagagcctcgcgctgtgtcgaccttctctactctccggcgctggaaggatgggatcctctccgcagggtgaggggcaccgacatccgacgcggaggttctcctcgtcctctccatgttccccagcctcctgctcctagctcctcgggctcctctctgcggtggcagcggtggcgttgggaagttcggttccttccgagcactgtgctggcttgagatcgacggaatcggagtctcttcgccgttgcggggacgtgttgttgtgcagatgagcgggtcttagctcacgacatgtttgtgttgtgatttagtacatggtatgagatttttgttctcgttttagcgtgtgataccagctcagtgaacatgaaataaatgtagaagatgtttcacaatgcagctgaggagaatgttataagcatccgggcttatgtcactgaactgaaggagagagttgcaataccaaaagcagttgctctgtcaggttctgatcgtttatcttgcacatataatcaatttgccgtgaaaaagatatgttgtttcaccactaaaatatgttttcttctgatcttcttacaacaggtcttggagttggaatcgaatgaaggcaaggcaaatgacacggaagaagattcagaggaaaatgcaggatctctacacgatatataaaatataagtcttgactgatgaaaacaactcacaatgcaagagataatgcttcttgtctatttctgattgttgtggcttgaatgctagatttatcccaatctgcttttatttgtctcattgtctgaccttcgattttgtttttgaatttctctagaacatattgtgaattgtgaaaattttcatattgctcttgaacagattgtgcttggtagtgtgaaccaatatcatgcattgcaccttattgtatgatatcagtttgatgtctattgtatgtatattgggatttggaatgaggagtactggaagcaggaagatggtggtggagcatggggcagcgtcgaggaagacgacagacaggtacattgatttctgcccatgctcccctaccgctagatgaaatgattcaatttactgctatttactctttggtagttgtaatacaatgaaagaccaagaacccgagattgcttactttagtgcatatacatgagcttctattcgcgggcttctctgttttcaatttctgttgatcaaccttactgctgtgcactgctttagctcaaacaaaccgagtgacaggagaggaaccggaagtttttgtggtttgtggtttgtagtttgtagggagaggaaccggcagtcgtgcattgatacatatgatagtttttgtgatttgtagcctgagatcaaattaaatttaccaagtcagccaaatttcagagactgcttcacctaggcaatgtaaaattatgaaggccttcacctagcctatgctatttattttatttttattctcacaataggaatgatattgttttcaatgcccctaggctgctcacaccagttgctgccgctgccagttcggacggcccaatgaggccggtgcccttgaatgacaccatatcaggtcctagcgtcagacaagataattcctccgtctgaacgttgcaattgccgttctcgccgactccacattttcttacccataacaaaccatacatgaaaactctttttgccacggcctcaattcatgagcaagtctaatacttcaccttttttcttaaatatgttatcaacgtgtaactccgactcatgtaatggttgctcatgctgaagaaaatgtaacccgtgacaaggagaatgatgcttccatagttgtacaaacctgtccaggaaccaggataagtaccatgtttgttccaaaaaattatggaaatatactctcttagccatcatgtttgtttataacaaggaagctatgcttccattgctgctgcctcaaagaaacca

SEQ ID NO: 18693 - DNA, 2263 bp, Oryza sativa
tccgaaatctgagatttttgcattcattgaagcatctagcagaatgttgttgaccttaatgtctctatgaacgatgcatgtattctgttttgctaatctgtggaggtagagaagcccctggctatgctatcaattacacggaggcgtgtagaccaatctagcagccgggattttctttcgggatctgcaagtttaatcttttcaaataatatctgaacatataactaataaaatatcgggaaaatatggatagattttagaaatcactcagtttaagtgttttcaataattaagatatatacacgcgcgctgacaaattaaaggcaaaatagtcattttagaaaaaaaatcaaactattaattcacggttaaccaacagaaaatgaatatataagtgatcaaaatgaatatatatgtaggtaacaaggcaaaatttagtggagtagaaaggattgagtgaaaacacatgatcttataaggatttttcttttcgtaatataagggttgggaacttgggatatatataccagaaaacacatcatccaagcttccgttctccatgtactcatagatgagtatgttttcttcgttttggatgcagaaacctagaagcctaactaggttcctgtgttgaagagttgccataagtttaatctcgttcataaattggtcaaaaccttggccagatgaagataccgcgagtctttttactgctacatcagttccgcttggtagtttaccctaaaaatatatgatggcaaaacacataaatttagtacatcagtccaaatttaagtctaaacaataataatcagatccttgcgattagcacagttactagtcatctgcgtcgtaagcgtattctatttacccatgctagccaaatgcccgtgctttactacggattaaaacaaattaatagtgaggttttttggacaattttgtacctatagatgttatattgtacaggtgaaatatgatagaatcatatatatgtagatgtgttattttataacataaaagtacatgggtagctagtagaaagcatgatgggtagatggtaaataaaaaaatactatacttggtgaggccaccaccattgccttattttaagggtgtgtttagttcacaccaaactttcccctaactcccaactttccatcacatcacatcatatccaaaactttcctacacacataaattctcaactttttttttcaaactaccaactttccacaaacttctccccaatttcagaaactaaacacagcctaagaagagtatagatgagactatatccggacagtttagcatttgaccacatgataatttgtactccctgctgtcatataaatatataacattaatttaacataattcttttcacaccttcaaattatacaactttgttcacaagttatatacagtaagtatataaaatatggtaagtttatgatattatgacaatattgatgctgggagtactaaataaacttaatgccacccaatgtcaaatattgttgagtggattcgggtaaaaaagaacatattgtcgaatggagggatcagtgctagctatttactgcaaaagattcagaaaagggagtatataataggtcaattggatgtttatagataagacatgtcgttacatctaatcaaattaccttgtaaacatggccaaaacctccttttccgatttcatttgagaaatcacgtgtagcttcttttatctgttgtaaagtatagcgtgaaaagagcggtccaatctcgtctatgatctcagtctcaagttttgctagtttcttttgccgttctgactcttgaattactacatgtacaggtcgaaatcacagggaaatattaattaaacgtaaaaaatcagaacctgcttaagaattagatcggtattataattaaggccatcgcaacaacttaatcacaccttctcttagtcttttgagcaatgcaagtataatcaaggagaaaattagaataacgaaggctactactccaaggacgattccgacgatcttccctgcgctcaatgaacctgcaaatgcaagcaatgtgatagaattatagcatgtaggtgcaaattaatcaccctctctattttatattacaagcaattttaacttttttcccagtcaagttttcccagttttataaaataaatatagtaatattttcactacaaaacaaatatattatttgttgtaaatgtttttctattaatttttctataaatttgttcaaatct

SEQ ID NO: 18694 - DNA, 6546 bp, Oryza sativa
gagggggacctccttaaagggggatgatgccctcctactcacttgaagcgtgtgaggtggagagaagagggggaacacgcacgctcgctcacctggcatggcatggcggcgcgcgcacgacgtgaaaccattgcccggttggtgtcctgatatctctataatactgcaccctcctctgcgccatccctcaggcgtcctgatatctctataacaacgtgctgcaccgggagaaggcagtttgcctcctcctctgcgccgtcgtggagttcggttggcgtcctgatatctctataataacatgctgcagcgggagaaggtggtttgcctcctcctctgtactgcgtcgtcgctcgtagtctactccatccagctcgccagtgtgtaccggcgatcaggagagcaggtctcctctctataataacgtcctgcaccgggagaaggcggtttgcctctgcgccgtcgtggagtccggttggcgtcctgatatctctataataacgtgctgcactgtcctgatatctctataataacgtgctgcaccgggagaaggtggtttgcctcctcctctgtactgcgccgtcgctcgtagtctactccatccagctcgccggcgtgcaccggcgatcgggagagcaggtctcctctctataataacgtcctgcaccgggagaagacggtttgcctcctcctctgcatcgtcactcaaggcagtttgcctcctcctctgtactacgtcgtcgctcgtagtctactccatccagctcgccggcatgcaccggcgatcgggagagcaggcctctctataataacgtcctacaccgggagaaggcggttggcctcctcctctatactgtgtcgtcgctcgtagtctactccatccagcttaataacgtcctgcaccgggagaaggcggtttgcctcctctgtactacgccgtcgattgggagaaggcggtttgcctcctcctctgcactgcgccgtttcttgtagtctactccatccagctcgctggcgtgcaccggcaatcgggagagcttcgacgtcctcatcctatgtgtcgcgctgtcgctcgtagtctactccatcccgcttactggcgtgcatcggcgatcgggagagcttcgatgtcctccgctgggagaaggcggaaataaggtttttgggaagcgcttcacgcaactgctccttattcgttcacgacgactcgtctttcttttcactcgcgtgctgcgcgccgagaccctctaccttcgacatcctgcacaaggagaaggcggcaataagttttttgggaagcgcttcgcacgaatactccctgttcgttcacgacgactcatcttcctctttgctcacgtgctacgcgccgtcgtcaacgcctgcaaccgtgagtaattcctgctgagcaactagtcttccggtaccctcgatacgtgttcaatatattacgcatatttgatctgttgatgctttactgcctagtatacatatgtagatctaatgatggatttatactagtttacatctacaatatcatgatttatttatggaataaattaaattattatatgcttataaattcaacagtacccgcgctgcagggaggagtgccacgccgcgtagtcagcggtcttgttgatcagctccatgacgcggccgccgaacttggcggcgccaccggcgccggtcacgttgttcatgttccacgcgacccacgccggcgcgttcgttaggttggcccggaagtcctcgccggagaaccggagcatgtactggtcgtagtagatcgtggcgtccctgaacctgtcgcagaagaggcggttctcgacggcattctcgaacgccttgcggaggccgttggcgcactcgtcgccggtgtagtcgccgcggcagagcgcgatgccgtacgccgcgtccggcgcgctgccgacggtgtgcgaggcgaagttggagaccctggccacaccgacgagccgcgcggccagcgccttgaggttgtcctcgtacgtggtgttttgaccgtagcggccaccggacaggctgcagttgtagtatagcgggttcacctccggcgaggccactgccaccgcctcatcttcaccacgggccgtccatgccgacgacgagaggacgaccaccggagagaggaagaggaggaggaggggttgcatttggcagtggagagaatatactacgtcttcggactagtgtttgattagctattatatatgcatcagtagtgctatgctgttgctagctagtgttttggtttaatggtattgctttcgctttgctgggccatatatataggcacagtagcatgcatgcaagttttgagaagtggcgtgccaatgtcaatttcttctatgttacaagacaacgcgtttgttctcggtcgaggacctaaaataactagagtaaacgattcgcgcaagaaatttcatgcccctcggctgatcgatcggtgccctatggcttttacaaaaatattatcggcttctcatgcagggggcatgcagcaagttaattacagtaatacggagtatatatgtaaaaattatgggtcgagtcttgctggttgttttcatgagatcgagtcgtttgacttgggaagatcatctttgaggataagatcgatatgtttgcgtaatcgaataacctctctgtgcggccgtgcggccgcggctgggttcgcaaggagatatatatattctgaatccttgttttacatgttcaaaaactctggctagctacatcaactttgtaattgatgacttctttactcaagattatttaggtgactaaataagcacaataagattttgagatatgaagttaaaataatagcatcttaattctaaacaataagtatttaaaacacagctcctctgacttaaaatccgagggatatgagtccctaaccggtgggaccaacctcatggacccacacatcagaaacgtatgtccctctatggtacgttagaggagcctcatcacaagtatctgatagtagttgatagtgatgatgtgtgtagactaagaagtctcaagttcaaatcttatacacggcacatgcgtgcgtatttcatgaaaaaaatagtttggcttgcaacttgggtgcgcagagtgtatagatgcttattaaaattcagaatactttttggtttttttttggcaactacaaaattaaaaaaatgatagatcttgattactatagttaacaacttattttatttgatattttttagaaggcaatttttgctacagaatactgcttatgtatggttttagtcctacgacactgcccaaactcacttttgggggaaaacactctataaacgtggtaatttgccagtggacaccgcgtcaattaaaataataatttctggttgaagatgagagagaaatcgcgtgaaatatcaaaaatgcccttggacacatatgtcagctctatctcctgtctctcttctcctctctctctctatatatgttctctctctgaggcgcatggggcggtgtcggtcgccggggcttgagctcgtcgcggcggaggagatggcaaggatggcggccggcagagtggagcagggcgtcggctgtggcggagcggagctggcggctgaagcaggcggagcggcgatgtcggccgagcgtgtggcaggcggagtagagcgccggcggcgggtgatcgcacggcaggagggaccgttgttgccacaatcttgtgccacccagcatctgccatggatgcgacggtgcggttggggccgaacggcgggggagaagcggtgcacgggcggcgagggcagaagctgcgcatgagcttcacgcgtcctcctcctcctcgaactcgtcaccatcgtcgtcgtcatccgccaccgccccgctccgcgccgccggatctgcgagccatcgcctcgccggcctgcatgctgcgccagccaccgccccgcagcggtgttgtgattcggtgattgggatgagagaagggcggcggcggctacggcggtggcaatgagtggctcggcgtagacgttggggatgcggtgcgggagctacggctcgctcgcgtcgaccgacggcgggaggaagtgcaggggcagggggtgggggtggcgaggcagcggggagaaggagcggctgcagctgctccaccgtgcactgtagctggtaggccgccggagggccggggtgctgctgctgcttgccgctgcctccgccgccgtctgtgcgggcatggccggcggccggcgggaagcgacatgcgggcaggaagaggagaagagatataggagatagagctgaaatgtgagcccaaggggcatttttgacatttcacacgatttctctctcctctttaaccggaaattattattttaatcggcgcggtatccactggcaaattatcacatttatggagtgtttccccctaaaagtgagtttaggcagtgtgctaaggctaaaaccacatataagcagtgtcctataccaaaatttgcctttttagaataggggtgaaaacggtcgtgaaacgtcttaaccatctccataactatattttttttggaaaatggtaaagttggagatggaaacaatattgaaaatatcgatcctttcaaaaaaatattgaaaatatcggaaacccggaaacggattatacggacataaacgtgtcgatatcgatcgaaagccgataaaaaatatcaaaagcattgatctttaaaagcagacatttaattttgcataattatattatataatatgataaaatatattcaaggttacacaatgtaaattccaaattgtgtactctagctagggtgtggttgagaagttgatgtgcctctaaactatagatctatttaaaaaaaagagttcattccactttgggctatgttttattaccaaaatttcactttgaaccatcctttatatccatttttttcaccaaaaggagccacagcttctagcaacctggggtatcacattgccataataagataaccagatcaagttgacccaaggaatgtttgctctgttataaaatttatgcagatgcttcataagaagagccctatttttgaactttgaggtcaataacttctagaccacctttgtcttttggcctacaaactttggaccaagcagcaagagatttcttggatgaattaaggtcatttcccctccaaagacaatgacgtctagctctatctatggaatcaatgaccgagactggcaatgacagagaacacatgtaataagttgggagcaatgagaggaccgaattcaccaatgtgagtctatcaccataagatagaaaagctgaactagcgtcagtcttctctcaattctatctgtaagtggagcaaagtctataacttttggcttggtggttccaagaggcagccccaagtaagtaaatggcagagttccaatagaacatccaaaagtttaagcaaacatctgagctttatcctctgtgagtttcaatggaatcatgcaagacttggaataattaaccttcaagcctgaagagagagcaaaagagttcaacaaggctttaagagcatgaagttgaggggccgaggcctgcataaagatgagggtgtcatctgcatactgaatcacggggaagttatcatcaccagggatcgggataggcatggacaagatccccctttgatgtgccttgttgattatggattgcaacagatctgctcccaaagcaagcaagagggagataagggaaccccctgcctgactccacgtttgcatttaaaaacttgccaggaacaccattaagaagaacagccgaagaagctaaggagaagatcactttcatccaggcattccattgggatgggaaacccattgcagccatcacattgaggatttcctcatactcaactgtgtcaaaggccttttcaaaatcaagcttcaacagcactatttccctttttgaatgcttacattgatgaatgtattcaaaggcccaagctaaacagtcctagatcgatttgccttttatgaaaccatactggttctaatgcaccaatcttaacatcaacacctgcaacctatcagcgaaaattttgcaaagaattttcaccgaaaagttcatcaaagagataggcctataatcattaggagtttgaggcgcagacatctttggaaccagggtgatgtaagaatagttgatggcagcaagatcaacagagccaccccaaaagtcagcacaaagtctgtagaaatcttgtgcaataatctcccaacaagatttataaaaacatccattgaaaccatctggccctgggccttatccacaagcattttcttgagcacatcaactatctcctttgtagaaatctgagcacagagggaggacaggtcacctttatcttcaatctgttcactaagatcaaacaccattttaggcttatcagaaactcccattctatccctgaacacactccagaagatagcagctttcctctcatgatcaaaaacttggttaccatctaaatcttggaggcaggaaatggtattgca

SEQ ID NO: 18695 - DNA, 684 bp, Oryza sativa
ttgatgcacgtggttggtgaagattccatatggcatacgatggaggtattgtgtgcgtatgggatgtggagtcgaatttggaaggagtccaaatttggtatgattggttatataaagtttgtttcttgtactagagggtttcctatggggattaggacttctagtatgagtttggttcgtggctttaggctgcctacctcatgtataaatagagggggagcgtgaggcttcctggtatcgcttttaagagcaattgagttgctagtttagttagggtttcgagtttagtcgagattttgtaaggagtgctgttgttgcactttgtaaacacagagagaatcaataaagttgtcatctactttaagagttcttcgatttgtgtttcaccgggtttcagcggtctaaccgacgactcactggcggtcagaccggcggcatacgggcggtcagactggcggcggcgacagcgagcggcagctgatctcggcggtcagaccggagatctaatctcggtcaaaccgatggcaaccaggcgatcagactgacaggacaacttcggttagaccacgatccgtcgaatttgagggtaacttttatttccgctaaaagttttcggtttttgggtatacctaccattcaccctcctctggttggcttagttcttgtgtttcgatcctacattta

SEQ ID NO: 18696 - DNA, 2045 bp, Oryza sativa
gggggggcccttgactttgaaggtgccggaagaggagcttgcgggggagtaggtgtaggagcacgaggaggagtcggtgcaggatcctgaggaggagtcgatgctggagcctgaggtggagacggtgctggcggagcatgaggaggagacggtgcaggatcctgacgaggagatggcggagccggaggagatggtgcacgagacgccgcttgtcgcccagggaggatgatgtaccgcctgcgccatagaataatggcatggcatgtgtctcgtagatgcgtctcaccgtctcctccagggtaatccagctcgaggtcctcgtacgcgccttcgaccaactcaacttcgaccttggagtatcctgctggaatcggcctgcagtggtaagtacctgaagggtccgttgggatggccatgcccgacgccaccttcatgttgtgagagattatttattagtaatcaacatatataagcagcaactagcggaatggctaaatcttacctttattgataagttcttgaaaggaatatgcagctcacatggtgtccgctgagtgatgtcatcaacgggacatgtcgattcgtcctgtgtttgcatggcgtccatgctctgtgatcctacctgccccgttgaggcgcagctgctacggtttcctgacgggctcaccattgcaggaggaatggtcggctggggatcatgggaccgatgtgcggccatgcgttcatcaaccttccttgccacatcctcttgcatgttgagttcgtagctcgatacccggaactctaggtctgcaatcttcgcctcggtatctctcttgctcctcatccgactcctgtacgtgtggatgtcctccttgaaaacaatcttccaaggaatcacccctttccctcgagttcgtcctggatgctctggagtctgcagggcgagtgtcagctcgtccctatctctgtctggtcggaacgtgccctgagaggaggcttccactgcatctgttagtcgtcgctcagcctcttttatctgatagccgaagaccagtgagccatcagctgggttgagcgttccaccgtgagcatagtaccagaacttcgatcgttccggccaattggctgttgccggttcgatacccctctcaatcaagctagcctccatctgctcccacttcggcatcgcgacgctatagcctcctgaccccaagtggtgatggtacttcttcttggcggcattttctttgtttctttccatcatcgcctgcccttgttcacctgtcttatatgcaacgaactcgtcccagtgatcccttagctttgggaatgtgtcgaagttcggtgtctgccccttcagtatatacttctggtacagatctcccttgaagctctgaaactgttctgccattttcttcagagtccaccttttcactttgtcctctgtacccgcaggaagggtgaatgtctcgagcattgtggtccacagcatctctttctccgaatctgggacaaagctctcatgatctccgcgtgcccttgttcttcgccagtacaccgtactgacaggcacgttatcccgcacaacccaaccgctgtgacgtacatagttcttggcggcttcggccggggcactaggacgtccatcttcttccacttccgttatgatgtgccgaccctcaagcttcttcgctgcacctcgttgcccgcgtgccctcttctgtccaacggagggttgactaccactagcctcctcctcctggttcccctccacatccctttccacgtgcccctgctggttcccctccgcatccctctccacgttcccttcctcgttcaagtactggtttggatcctcgttcccctcttcttcattccagtactggctgcttccctccgcgattgtatcgtacaatatctgttcctcatcgcggtcagccatctgttgatacaagaaacatctgctaagtcacgagacatttatgttttaacaatctaagtcatgtatgctaagtgtaaatgtcgtacattagaaccctacacaaccttacgtgctaagtcta

SEQ ID NO: 18697 - DNA, 5049 bp, Oryza sativa
ggagagatcgagatgcatgaagggagatctggcggcggcggctctcaccccagagatgcggcggcagcggaggaggcggaggcggcggcgaggacgacgagctcgagacgacggcgagatacggcggcgtcggcgcggggatttgccctaggcagtggcggcgaaggagagaggccgagagagatcgatcggccgaaaacgtttaagtgttggtgaagaagacgagggcgcaccgggaatatatatacccctggatctttactcccgattgttctcaacaaccgggactaaagatatctttagtcccggttgttgagaacaaccgggagtaaagaaaagatctttactcccggttgttctcaacaaccgggagtaaatatcttttcccgctatttcgaaattctttttaaagattatagcactgcatatgattttcgcttacatatgtgtttataaaatagaagttaatgcattaacattatttaaagtacaaagattaatgacaattacttcgaaaaattatttttggctgtaataaattaagtggataaatcgtaataagcaaatataattaataaaaattccaataatcatatatacttagcatatatatgaatgatattattatattggtaaaaactctaattaagatatgtatgtacatactgcatgatttaaaattaataaaaattgtaatcatcatatgtacttagcgtaggaattatattaaattaaatgctaaaaactctaattaacatatgtaaatgccacatgcatgattttaaccttttaaaaattcgaatagtcatatataagtagcatatgaaagatagtaaattaaattgtgaaaaactctaatatatgaatgatagttttaaaaatatattaaatttaatacttttaaaaattctccaatcaattataattagcatatgaatgatagtaaattaaatgttaaaaactctaattaacatatgaaattgccacttgcgtgatttaaaacttttaaaaatcctctagtcaattataattagcatatgaatgctagtaaattaaatgttaaaaactctaattaacatacatatgaaattgccacctgtgtgatttaaaacttttaaaaattgtaagtatcacatataactagcatatacatgatttaaacttgttgaaacctctaataatcgtgcgtaattaacatatgccatacatcaattgatttatatggataatcaatacatccaaaatagtttacatcgtgtacacaataattacggcacgtactttctcctcactattgttccctccttgtgatcgctgcgtgagtaaggggtgtcttcatttgataggaggatgctagggtcaatcgtcaccgtgaaagggggttgcccatccaactgatcgtaatcctcgtcagtcttgtcctcaactccgatgatttttcttttgcctgggagaaccacttgacgcttaggctcatcaggccctctgcccttctttcctttgctagacatgtccttcacgaaaaagacttgcgttacatcattggcaaggacaaaaggttcgtccgagtatccaaccttgttaaggtcaacagttttcatcccactgtcatcaatcattacgcctccaccagtcaacctaacccattggcaccggaacagagaaaacttgagaggaccatagtcaagttcccatatgtcctcgatggcaccgtaatacgtggcagttgttccatcgtgtcccatggcatcgacacgaacagcgctgttctggttcgtgctcttcatgtcttgggctctcgtgtagaatgtgtacccattgatctcatatccctggaatgtcgcgatcgacccagacggtcccctctccaggaaggcaagttgttggttgatcgactcgttacccatgagatgttgtcgtagccatgcggggaaagtatcaatgtgatgccgtgtaatccatgcatcggacttaccgatgttcctggtgcgaactagagccaagtgctcctcgatgtaaggagctaccaatgaagagtgttgcagaacagtgaaatgggctttacggaataaattgttgtctaccgtcgttattgctttccttccgagagttccctttccccgtagtctcccttcatggcgtgattcaggtaccccgattgggcgaaggtcttcgataaattctacgcaaaattcgatgacctcctctgttccataacccttggcgatgcttgcctctggacgagcacggttacgaacatacttcttcagaacgcccatgtacctctcgaaaggaaacatgttgtgtaggtacataggcccgagaatacggatctctttcacaaggtgacaaagcagatgcgtcattatattgaaaaatgaaggtggaaatatcaactcaaaactgacgagacattgcaccacttcattctgaagggcttctaatctatccggatcgatgaccttctgcgaaattgcgttcatgaatgcacatatctttgttattgttgcccggacattgtctggaaggataccccttattacaactggtagcagttgtgtcatcaacacgtgacagtcatgagactttaggtttgtgaacttcttctccttcgtgcttattattcgcttgatattcgtggagtatccagacagtacctttatgctctccaagcattcaaatatactttccttctctgccttgctaagagtgtagctggctggactcaagtaatggcttcctttctcctttggttccgggtgaaggtcgccgcgttgttccatatgcttcatatcattacgtgcttccagtgtatctttcgactttccgtatacacctaggaagccaagaaggtttactgtcacgaccggaaataacccaacgggcgttccttacgtgcgtgtattattccttgtcccaggaggcaaggtacaccaaaagttgatacaattcagagtttaacaagcggaagcgtaaatagttaatttattacatgggcagcgaaggcccagcacacacaaagacaaacgagaaacagcggaagactagggcgacgaccacaggcgcttgacggtaggcacgagctagacaccaaagccttcatcttccaggggctcctcttctgggtttgggaaaaattgagcaagactgagtacaaccaccgtactcaacaagacacacccacaagtgcagaataaatgcaagggagtacaaaggagttatactataaagggttagggttgcggtaaacagcatttaaagatatttagttgctcaaaactatttagtaaacacgagtctagaactatacaatattatttatcaaggccgtgaacccacacgaacctgccttaacccaaggcctacgatgattcagaccgaactgtcaacccgaccctgggtcccagctcgtcccaagccaacccaggccaaccattccacattttagttgttaagcaggttttaagaattaaaacactaacttgggtacattgctcggcttgcccataaccgagggcgcggctattcgaatagattttactctgatcagaggtgtacatctttacccacaagacacatcttcctcacgtgtaaccacgtgccacataccaccacggtatacagacggaagacgtgacatagtttccaacccatcctagccatagacaagagtaccgacccaatcccacctacggccggaacccccgggacaggcaggcaggactgagcccctagcagcaggacaccggccctgtgccatgacatctcgactaccgggccgcagctcgtgtagccttcatttgtcctagagatgtccatcgacccccgacttcgtccatctccatccgtgtacttttgtttataaccagactgagccacaaactaagccttacccactagacatgtggaagtacggtagtgctttgcaacagaggcccgaagaccggtccttatatggccgaggtgctactatcaaaaccatgcaccccgagcccagcctaaaaccatttttggggattttgaatagagggggcggtgtgaagccaattccacaataaccaaaccattccatagtgtccaggtgatatgaacatcccaaagtctagagttgtaaaatcacctaatgttacctaattaaacagcgaagcatctacctaaaatcatactagtggtaacatgtgtagagtgtccactagttggagttttgtttattctagggtgaacaaggaaataataacaataataatattaaggtcataacaaaggtaaataggcatggctaaataaaacagtgataacgcgggaatttaaataaagcgataatgcaataatttaaatcaacataattttataaactgggattcaatatgttcaaagatgatgtgacttgccttgctcgctttcccaaacgtcggcttcaacttccatgaagagcggatcttccgaagctgcagcgtctacacgaccaatggaaagaaaaggcttttactctaataaactccatataacaagcagaaacaaagcacaaaaatgggttcttgacttcttaaggaaaaattagagacttgaacggtccaattccgagttcaaatggccaagttatggccatttgaaggttatatgctctttaaatgaatatttgcgaatttcttcatttaaattttaatttaaaaaaaatggatttattgcgtcagccgaggggagagggcgcgcggaccgggtccacgggagtggggcccacgcggcagcctcacggcccacggtggaccgggcgcacccggctcacaccggccggcgccgtgggtcccatgcgtcagccgcacccgagggcgcgggcggctgacggccgggccccacatggcagccgaggggcgcgcccgaaggcggccacgccggcacagccgacgggaggcggcgcacccgcgccccgatggtcgctgccggcgaccaccggcgcggcggagcggcgcccgagagaggggagggaagggggaagcgagtcggcggtccacggctcaccccgggtcgacggcgacgacgggaacggcg

SEQ ID NO: 18698 - DNA, 4021 bp, Oryza sativa
cggcgatagggcacgggcgaggcggcgggaccggcgggaggtaggggatgacgggtgggccccacccgtcagcgagggtggcgggcgggcccgcccgtcagcggcacgcgcgcggggaggaggccggatgggccgcgggggagaggagagagagggagggaggtgggctgagccggcccaagagggggagggggggaaaaagactttttagggtttttctttttataaaacctttttaactttgtttatttcttcttaattattatttgtgctctgaaaattccactaaaatttatttacgcattttaggcttttaggaaatatacaaaaatcctccaagccttatttgacttttaactttgcacattttaattgttggaggctttcacatggattttaattattctaggcataatttagaggatgtattttagggtcgttttgggacgcgacatttacgcaaaggttcttagtgaggtgcatcacgtcgattgcgtggcgtacgtccaagaattcccaatatggtaactcccaaaatatagagttctttttccacatcgccgcgtgaccatcttcgctttctatatgctggcttccaggcccctttccgaacactactttaagatctttaaccatagcaaacactgttttcccgctgcgatgtttaggcttcgtacggtggtcggccttatgttcgaagtgcttgcctttcttccgtaccgggtggtttgctgcaaggaatcgatgatgacccatgtatacaaccttcctacagtgcttaagatacgtactttctgtttcatccatacagtgagtgcaagccttgtaccccttgttggactgtccggataggttgctaagtgcaggccaatcgttgatggttacgaacagcagcgctcgtaggttaaactcctcctgtttgtcctcgtcccacacggggacacctcccttcttccataactgtttaagatcttcgaccagtggtcttaggtacacgtcgatgtcgttaccaggttgcttggggccttgaataataatcggcatcattatgtacttcctcttcatgcatagccagggggggaggttgtagatacacatcgtaacgggccaagtgctatggccgctgctcatctctccaaaaggattcatgccatccgtactcaaaccaaaccgtatgtttcgtgcgtcctttccaaattctttaaattttctgtcgatgtttcgccactgcgaaccatcggcggggtgtctcagcatcccgtcctgttgacgctcttcagcgtgccatcgcaacattctagcattccccttgttcctgaacaaacgccttagccgtggtattatagggaaataccacatcaccttagcaggaattctcttctttgttagctgcccgtcaacttctcctggatcgtcccgtctaatcttgtatcgtagtgctttgcaaacagggcatgcttctaggttctcatactcctcaccgcgatataggatacaatcgttcggacatgcgtgaatcttatgaacttccagtcctaacgggcagactatcttcttagcctcgtacgttgtctcgggcaatttgtttctccccggaagaatgttcttgacgagtttcaataaatcgccaaatgccttgtcactaaccccattttttgccttccattgcaacaactccagagtggtatccaactttttgtgcccctgctcgcaacctgggtacaacgaagttctgtggtcctccaacatcttgtccaatttatgggcctccttttcactttcgcagtcctccctggcgtcctgcaacatctgacaaagatcatccgcaacgtcgttaccatcagcagctatttcctcctcgcccgtttgatttccttcaaatccaacatactgagcaaagtccggaatattgtcgtcttccacttcatcttcttccatttcaacaccttgctctccgtgggatgtccaacaattataacttggcatgaaccccgactcaaacaagtggaaatgaatagtcctggatgcagaatactccttctgattcttacacttattgcatggacaacaaataaaacccctttgcctgttagcttcggccactctcaaaaaatagtgcacgccgtcaataaactctttggaccgccggtcagcgtacatccattgccgatccatctacatgagtcaaaaaaaccgcacacaaataattattcttacaataatgacagtcatacaataattataagatatctttattcatacaaaaatcataaaatattacaccaaataattcttaaaaactatttgtaaagttttaaactaattttaatgtgttttacttcttttaattttcattttagtttgttttctattatttaagattaactttcactacagttttccttctcaactattttataaaaccttgtttagcaaatgaactaaatttctatatattctttcttccccacacacattttctctctcatcaacttacaactaaattttggagacaaaaaaaagtgtgcaaaacataggtgcaaatgtagtatgacaaaaaaaacattggaggatgaagttgcaaaccttttaggcacctccgatttgtatgtaatcaccaaaataaattcaatagaaattttagcatgacctcccctcttttttgaagtaattttgaagcttgctcgggcagctggaggaggaagaagacatatatataggggtgggactttagtcccggttggtagcaccaaccggggctaaagatcaccgggatcattagtcccggttggtattaccaaccgggactaaagttaagatctttagtcccggttggtaacactaaccggggctaaagatcaccgggatctttagtcccgattggtaatatcaaccgggactaaagttaagatctttagtcccggttggtgttaccaaccgggactaaagatcccgggggggcctgacaggtcctgacagcattcgaaccgggactaaagatgatctttagtcccggttggtaacacaaaccgggactaaagatcaaatatgcccgtttcccttttgaaccgggactaaagatcatctttagccccggtttttattgcatccgggactattgtggaaatcggccgaccgacgaaagatggtttctccaccagtggcacgtgggcgcgtgacgtttggctgtagcgtcatcagcacgcagcacgctgcttggtacaaagtacatcgatctcacaaaaatctgaaatctctgtcttgctaaaattctgtcgttcaatttttctcttaaaattatcgatttttctaacgctaggcgcagccgaccggccgttcgtacgtacgaggcaaaagcagtgcggatatcctcgttcggtaacatgcatggagccatggactgaaaaatctaatgggcgattgatcgttcctaatgatccgaaatcgctaagagcaaggataatagtgggctataagcaagttatatgcttatgtggaagagagagataaacaaaagtgggaagtgttggctcttatgcaagagctaactgcacacaaactctaaaaaatatgcattaaattcatggtgagagaaagagagaggatgaagaaaataaagataaacttatagccaatctactatatatgttagctttaacattgactagtacgtagtgaactctactattaaacttgctctaaaaagcgatcagtcgcgcgcctcccctcccgcgcggcgcggccacgtggcacgcgtggagaggggcgctacggtggaacggcgcgggagcggtcatgtgcgcacgtttcttgttttcttttcgttctttctggtttttttccctgattcggcgtttctctttttttttctttcagtatttcttttcgtttttttctggtttttttcctggtttatttttggttttaaacttatacatatataaattttatatctgtatgtatataaagtttgtatacgtacgaatacaaagtttgtatacgtggtgcttttttgttttcg

SEQ ID NO: 18699 - DNA, 8041 bp, Oryza sativa
tgcgccgcattactttcttattttagtaaatttatacacctaaagtttgtacacctcaagtttacacacctaaagtttaaagacctaaagtttataagtcaaaagtttatatacccgattcaaagttgaatttgaattcaaatattttttatatacagtatttcctatacatctaaagtttgtagacccaatgtttataagttaaaagtttatatatcggattcaaatttgaatttgaattcaaatactttttatatatagtatttttatacacctaaagtttagagacccagaaagtttataagtcaaaagtttatatatccgattcaaatttaaatttaaattcaaattttttatataatattttctatacatctaaagtttatatacccaaagtttataagtcaaaaaattatatacccgattcaaatttggatttgaattcaaatatttttttatatatagtatttctatacataaatttttcaaactttattttttttatctttttttaaaatttatggtgtagtatgaagagaaaaaggggaggagaaagggggagaggagcgtgttagaggggatggggggtgaccgcccattagcacacccgccatggactgctacaaaaacgaccaagtgatgtcttgcatgcatcccttttctgtttctaccatacaacaaaagtgattaaatggtaactctacttattaaacatggatgagagagaaatcccttgacctccactgtgcacaaggagcagtgcttttgaaagtcatgttgttctagttacatacaaattatattatagttacatgcaaattacagtgtaattataatatatttatatttgataaacttttagtaaaaaaaattatcgacacgagcaaacgcttcaggtggattagacccaagctatcctagagccaggtgctaaactctggtccaacatgtaaagtatggtaaatgaaggtggtgctaattaagtgaaaatatagtcagccctattttaatgtgctatatgttgcccacaatgaaatttacccacagatgagcaacattttccacaaaagcatgaaacggtccgataggcatcgcccaagcacaaaagaagaggccgatgggcaaaagagctgcatgatgtaaagatacataagatcatcacatgaactgaataatattttctattttcatcggaaaaaaataccattgttgaaaacagaaagtcatcactaagaaaatcttcatgtgctacagaaaatcaaatttctgatgtttagtgaggagtactaatagaactgaaacaatatggcataggtaatttattaatcgaacagtatggcagtcatcattggattccccctgcacaccaaggtttattaatcatggcagtcaatttctgatgtttagtaaggagtactgtagtaggctcttttgttcttctcctcctccaaagccggcaactgggcaacaaccagtagcacaatcgaacaaggaagatgacgccacctctttgagctaaccccaactctccggcgaccgacgtggatgtctatgcgtatgctgcgccaatctgttcaattgcatatttatgttccctaccactcaagaaaagtgagcccgagcaaaagaatccttaagtacgcactcaaaaatctgttataggtacgctgattgtaagtacgcactttttttttctttttgcttaattatacagttatacgtacatgcatgggatattagccggttttaggtacactataaaaagtgctcttgcgttacaatggaaaaaaataatgttataataatgattatagttattttatagttacatgggtgttatatgagattgtcctggacataaacaataaattaagtctatacctaaccctaaattcattccccttctctcccaccgtgagcgatggtggcggctccttcccccaccgcaggcggagaaataaaatgatatggttagatttaatttttattaaattaaccatgattaataacactctttgaaattttgttcaaattttcagagcttaattgctaattttgataatactaattatcatttcagtatttatttaaataaaaatctgaataaaaatcctcatttctctctgagccatttttagcccatttactttctcagcccacaactaaagtataattagcgtccctcaactcctctcactgtgttatgttggacccactggcctgccctcggcccattaagcttgcgcggcccagcagttatgcggcccgacctggaggcgacatgagcagtccgatatgatggatggcttggatctccttcgcgccgctgaagatgtagacgtgggaaaaccctaaccctaaccctaactttctcaccttctctctcccaatcctctatcccgacgacgagcgtaagcctcccctaccgcgaacgacggtggcggcgccctccctcagcacgagcagaagcggtgacagcccccttcccccatcgcgagtgatggcgtcctcccgtggcttccacaggcggatctggtggtgtcgtgcggcttcccgcgggcagatccaatggtgttggcggcatcccacagccagatccggtggcgacggtgacttcccacatgcggattcggcggcattggtggcttcttgtgggactgagataagatttgtgcgctttttattatgtttcctgttctttttctctttatttggattgtccgattggatttcgatcgaacttacggatgaaaaattgttgttacagacgaaaaattgatgtgacgaacggaaagttgcaatttttttatgtagttaagatatattattctatgttttaccatctcttcgatgcgtgcacttgtagttagagaggatattggccggttttaggagggagggtttacttaatactagatctaatctattggctgataataaagggtcaccaatttaaataaaaataaatagttggatgtattttttaaactttttatatttttttctaatttattagagtaccatatgatggcgtaggagcattcgtagattgccacataaaaacttgagagcgtttgtatgacatttaatggactttaaatatataatggatagataatacgtcgtccgtttcatattataagtcattttgacttttttaagtcaaacttcttttaagtttagtcaaatttatagaaaaatttagcaatatctaaaatactaaatttgttttattaaaactaacagttaataatacgtttgttttctgttaaaaatggttctatatttttctataaacttagataaacttttaaaaaataattaaaaaaaagtcacaacgacttataaactttaaaaaacttaactagaaatgagttgatgccaggcaattcatttggatggttgaattccatcaggttcatcggaccctggtgatattaatgtggctccactggtgtaacaacaagacgtctatggtgacttcgtcaatataaaaatacattagcctagtttttaaaggtgctcataggaatacggcatgcgtgtgtttatagagctgagtgggcaccactgttcatgcccccctaaatactgtgtacgccatatatatgtgcatattcatctagttgacttcagggataagaaaactgaacttctttagataatgatttggaaatgcattggccctaattaacatgattacattgtatgtgtgcgcacctaatacatttttgacgtagaggggttgattgaatctcagtgttgaaaaaatatatcgtgtgatctgttgttatgttaccctatcaatattctacaaacaattagctcaatttttccaggacacgttataaatgaagagcaacaaagttattgagttattactgttagtgatatgccctagaggcaatcatagagatgattgtatcacatgctatgtttacatatttatccgactttgtttcttgaaatagataactcattattggttaatgaatatgtgattctttcatgagactctttattttgtttgttactatttctaaatgatccctgatcaaatatcatatgtggaacaaatatgtttagatgatcagcacatgtattaattgatgatcatgtctcatggatcatggtataaagataccaaattaataatgtggacacatgttggggaacatgttgttggatagacccaacatgagacactgcaagagccatatgtgttgtgtcatcagtgatctcatttagtgttggtgttgaatccttagacctgagattatcatggtttccaacatgtgtagtagcttacttagggactgctaaacgctactatgtaattgggtagttataaaagtagttttcgggtatgccgtgaaacatgttgtgggatatgaataatcaagatgggatttgccccttctatggagagatatctctgggcccctcgatatcatagattatgcaagtgcatggccatgccaaaggtgattgaggagtcaatcacaagttatataatctatcacaggttcgagtgaatgattgagctattagaggatggcacatatctagcctcgagcttaatcgatatcgtgaggcaaaggggttcatacaagtatacactagaggttcagtcgatatgttctttatatatgcccggtgggtcaatacgttctgctaggggccgctgttgacacgtggaccaaaaaggagttttcgggttacagccgagtgtatatgaacctacagagtcgcacgcttaatggaccggaataaggggattggatagagatccaatatgagcttaattcggatagggatccgagtaggagtcctacgggccttggaggcccgagtgatggattctatatattcgtgaggggtgtgaccagcggaggtattgcatcacgtaagaaaccctagccatcactctcctcctcgagcaaaaccatagccgcgcgcgggtgctagcacatctgcgggtggcgttccgtccttgtacgtgtggataccggtagaggcgccgctggtttgcggtgctgatcggcgtgggagtacggcgaggagaacgcacgaggaggagaaggtcgagccggtgcgatcgactacttcctctacatcgacgcgcgctacttcgcgagagttccttcgacttagcgccttcttccgctgcgcagcgtgtcgagtggtaacgatctatgatctaatacttgcatggttgctggtttacgtggtagaaaaaatttgatttatgctatcgtagcctacgcgtatcctaacaattttcttaatttgtgagtatagacctagaatataccttgtatttgaaatcagaaaaaaaatcactagagaaaattggcaaacgaaggtttgtgaattgaacaaaaagcatgtaaatcaccctaaaaaaacatgcaaattatggttcaccttaatcaaaaccaaagtaatcaaaggtagggaaatttaacaaccactaatattagtaggaaggatatatagttcctagacctaccaagtacatagcaatgccaaaagctatcattggacgaagcatactgcagaactgcacaagtatgcgagacaaattaaatataccacaacaagctaattaagcacacatatatgcagtgtggagtacttcataagagtcttcatcaaccccacgcatttagctactgcagctctattatgccagcttccaggtcgggacgtgcagtgacaaagtcgtcattatacccaagcggaacattgaggtaagccggttcctgcggttcacttagtcccagaccgttgttgctcagccacatcgtaacctcgtgcatatctggtctatcgcccggatttttctgaacgcatagcagagcaatctgaatttgcctggttagctcctcttgaaactccaccctcaaataggggtccaaaagctcattgtatctcctatttgaccaaatattccaggcctattagagcacaacaaaaagttagtaccctaggcattacacttattaatcctcctttggagtgaagaaattttaaaggaattgaagtttgtgagaattaaaatagttaacgtaaaattcatgcgctccaaatgtaatgttaactagaggaagaacttcacttacataagtaagtagatgaatgatctgccatgttggttaaatattggagaacgaaccctcctgccacttatgatctcaagaaccaaaacaccgaagcgaaaacatcgtattttggggtcaaatccccatgtatatactcaggcgccatgtaaccactagacaacagcaagtataatcatgtcaatatataaataaattagtgcttgatatgttagcgaaatctgttcaaacattgctcattacaatataatttatggatatagatataaagtagagattgttcatttaattttgtgtgagtgcgcagtgtacgcccgtgttttggttggggtggggtggggttgggttggtaagtctctgttaatccaaaacataaggaaaaaatgtaatatttagcttcccacccaatatgagattcatattgatcatatatatcgaatcttcagtttgacttaattagtttttagagtaaagtctagctaccccttcgactatcatataaatttataaatccactctcaaccatgaaaccactaaaaggaaatagatatttcttgacaggcacgaaccatcaaggaaaacatcaaaatcaccggtacattttggaggttttattttggcaaaaaaaaaattaattggtcgctatgaaaattcaaaattctgatagtattactgataattacacccatcaactatacatatcaaaactggttaaaatatccccttcacgggtaatccaatctagtattgctaagtttaatattcaagttaaatcattttattttttcgttgacatggcactcaattagaaatagatatcagtaaagaacagattatttaattactagctagacatcaaaaatattttcaccggttttgataatggaagggtgtgtaaaatttcaggttccatagctgaaggtcgattggggtgtgagttaaatggacttcactccagtttcttctctgcatataacaggctcttgactacttacggtgttcctactggatgagtcacgtatggttctgttccatttaaacaaaatttccttgcaatcccaaaatcggaaattttgggattattttcactgtccaaaagaatattgcttagcttcatgtctctatgaataattataagtccttctggagcatggttgtgaaggtagtcaagtccttgtgctatcccgttgattatatgccgtcgcatgaaccagctcagcgatgctcctctttcacgatctgaaacagataactgttgtctatgagtatatataaaatcaagtaatgttctacgaattttcaatcggtgctatctactaacgaccattatattggcttacctgacaatacatagtccaagctcctgttaggcatgtattcatagacaagtatttgttctttgcggttaacacagcaaccaagaagcctaaccagattggcgtgttgaagccgtatgataatcctaatttcattcaaaaactcctccagaccttgccaagtagtttgatcgagcctcttggctgcaatctgaaggccgttctgtaatatgccctgtaatgattcatatatttgtttcaaatgcgacatgctaataactgttttttcatctaatatatatgtcccttctttctataaagctaatacccactaaatatctaaagctcaacatgcaatcataatatttattagcattcttaaaatctaacatgcaagcataccacatcaatcctctaagcacacaaagctcaacattctaaaattaaacatacacatgctaaatcattattttcaaatcattttcactatatttcaattcaaattatttcaccatttctacaatatctaacatatatatcctgcagcaacacgcaggacaccatttagtattatatacaagtgtactgcaattaaggtacaac

SEQ ID NO: 18700 - DNA, 8721 bp, Oryza sativa
cctgggtccacatgtcagcctcactttccattcaaacaaaagtgacgtgggatccggtgatgggtgaggctgacatgtgggttcgaatagtatttgggaataaaaattttggagagtggtatttgagcactgacattttgggaagatagcaaaaactaaattctccccatgcatggttcataggaagctctactaaccaatttatcctatcacactgtgattagggattgttgcttgcttgctttgtatctctgttcaagtttttgtaagaaaaaattagttatgttacactgttggacaaagtcttagcagtaattccaataaaaaaacaaattagttatgctactgtaggatgttactgtagaaatcatatcttattactacgttttcatagtaacattatcacagaacggcagtaatattatatgttaccgtaaaatttgtaggttgttattgcacttttggcagtaacatcataataaaaattgtagaaacagagacttgtaatagtaacagtgatgctatagtactaatgcttgtgtagagctaaaatcttttaaatatcgatctttagagagcaatatctatcacatcatatcacatcatatcatgcttttctaacccgaatgcaccatgacgttcgtaaaaaagttcttaacgaaattagatcatcatgattattttttgacgtcattatggtggaaagcaatcatgttactacacattagtcatcgagttactacaccattcctacgtgacgagaacttgaaaaaaaggtaaatctaaagattaaagagcaatatctctcatgttatatcttgtttttctaatccgtttgcaccatggtgttcgtaaaaaagtgcttaacgaaactaaatctgtcatgactattttttcacgttgttgttgtaaaaagcagtcaagttacttcacattgactgtcatgttactacatcaatcctgtgagacgagaactgaactaagctgggcgtggggggagacagcgcaagcgggtttgactggggtttgtgcatagctaaatttttaaatctcaatcttgtgcaaagtacaagtgctaaaaacttcatgtgcatggtcacaagttgacacaagtgctaaaagtactcttttcccacacaaagatacataatagcaagctaaaatacaagtaatacttttaaaattatagtcttttaaacaatgatatctctcaaattacatgttagagaccttttacggtgttcgcaaggtatttagaggtacgtggaggtggaacaacgagtaccgttgatcaagataggggcaaggtaccgaaaaaaattatggtaacatgatggcagtggagtaattaactagtaaaacatgggtattatatgtgaattgaatacctacatccatctatcagtatatcgttctgcagatcagtacgccgttcatgaggaaaaaaaagtaaattacagatacgacgttgattctgttccaaattaaataaacagaaagatctaatctcctttcttctttcccttcgtttcgttcttgttctggggtttgattggttaaccggaaggagacaaaggaaaaaaaaaatgtctacatggttgagggttgaagaggagatgggattgcccggtcgacgactagacgcaagctagcacatctgtaaattatcatatgcttatttgcacagttgatttgttatttatgtagttcataacaagttcataatatatgtcattttgatgttactgtagatctcatgttactatagtaatatatatcatgttactataataacaagttcataatatatgtcattcaaaaaaggtatagatcatgctgcctccattctataatataaagtacaaccacttttttagatgttccataatatatggcatgcatacaagcatgcaattaactgtggcatcttcttcattaaattataacttttttaaatcctccactctcatattatctaatcttattggatgcatgcattatatttatgtggatgatctaaactacaagatgataataattgtttcttggtctttgggttaagggtggttgtgtcttatattttatattttagaataaaggaagtaatagatatatgtggtgtgtctcatgttactatagtaatatattcatgctgatgttacactgtagccgtgtgataaaagatttgctataatgcagtaattaagacagtttagagtgtgcagtaatagctatcatagtgtcggtactacattttgtgccaaatactgtatttattagcacatgttataagataaaatttttctaagaaatatctatgacagttcagacatagtctacaggttaataatttgttggaattgaattaaaggtcttgggtttaattcccattgaatgtatattttaaatttattttgtctcttttgcatctccaaatagaagagatagtagggtgccggcactactacagaactcatttttccatgcgggcatatccatttttccatacggtcgtttggcccgcatgcgaaaatcagtattttcacgtgcgggcgggccgaccgcacaggataattgattatcccgtgcgatcaaattataataccacctgcatgaaaacaaaaaaaccaaaaataaaaaaaaagtgaaaatcgccgcccacccgcggccggcacgcaaccggccgccgcaactcgtcgtcgccgtcgtcgcgccgccacacgcacccggccgccccggtcgccgcctcgcccggtcacctcgaccagccacggccgcccggtcgccgccgcaaccagccacggccacctagtcacgtcgccgttgatgccgcccgccgccgccgaatccaggggggggacggcaaccgctgccggatccaggcgcggaggctggttgccgtcacgtccacagtcgtgccggccgccaccgctgccaaatccgtgcaggggatggccgccgcctccggatccgggcgcgagggggccggttgaagtcgcccctcgccgctgcccggtcgccgcgccgctcgccaacgtgcacggtcgccgccgcctcgcctcgtcgacaacgaaagtcaagagaggagaggagtgaaagtcgggagaggagaggagaggaagtgagagagatagaggggaggaaagtgaaaataaaaaggaagagagacgaggtgtgaaaattttaaaatgattgagagggagaggaggtgtgaaaattttgaagtgagtggagggagatgtattttcgcgtgcggtcggcttatgtcgcacgcacgggaaaatgcattatccggtgcggtcagggatcgcatggaaacaaaagggggcggcatccaggaaaatctatcatgtagtagtgcgaattgagagggagggcgcgtgtgagagggggagtgggagagagtggatggcggattgggagggagggcgcgagaaagagagagagagaggtagggaggatggcgagagagagagaggaggggacggacactaagcatatatagagggggcgaggaggggacatattttatgacattgttttagcacaagtttgtacatgacatattaaaatttatcttgtacaaggatattatgtacttttaaaaaaaaaggaaactaagcaatatcaggaagttcaattagaggttatgtaatattatcaacttactcggtaaacttgaccgaaagatccatgcccaagtctattttctgctgagaaattttctgtggcatctcttatcatggagaaaggataaagtgaaaacctttcatcaatttcttcggtaacggtcttctcccagtcacctaattctcttcttagcttgcaatctgcttttacatgtatataaccaggaaaaggttaggatttaatatttaagataaattttggtatgccatatgttgcaacttaacaatatatatataccatacatatgtatcccattcattagaaaaacaacattgagccacatatatatatgatatgttaactttcctgtggtgcgtaaaaaaaaccctgataaatacatctccttaattagtcaatcgagagaataaaaactttaatatcgccagacgccagcaagaacggtacaccttatacctcgtattttctttacgatgaatccaattagaatcaaaggaagaacaggagtaacaactccagaaatggtgatcaatgcgatatccgttttgctcatgccccctgcacacacacatatatatatatatgaaaattgagcacaacattttgaaaaggtaaactgagtgctgcactttgcatgagtgagattctcagaaaacttctgcaagttaaattttaaattacatgcttgtaaagtgatacaagcaacgagacgacgtctcctcgagagtttaaaattcactctcgtttagtttcggacgtacgtacctttctgttttggcatatgaatcttgatcgtctcgttgctttctaggaagaagcgatcgacctcgtacctcaggttgcaccggaccccgagaatccggccgccgaggcggtagtcggcggcgccagtgaaccacctcggcatctgcgaggcgatgccggagaggcagctcaggcagccggccggcgagaggtccggcgtgcactgcacgagcgcgaagatgacgaggtcggggctgcttctgcactgctgctcaaccagcccgaggcgggtcgcgcccacgtccagctccccgaacccggcctcccccgtcgcgtacccgcgcttcgacgagttccacgcggcgaactcggcggtggtgttgatcagctccatgacgcggtcgccgaacgcggcggcgccggccacgccgttcatgttccacgtgacccacgccggcgcgttggtcaggctggcgcggaagtcctcgccggagaaccggaacatgtgctcgtcgtagtagacggtcacgtccctgaagccggcgcagaagacgccgtggtcgatggcgtccctgaacgccttgcggaggccgccggcgcaggcgtcgccggcgtagtcgccgcggcagagcgcgatgccgtagaccgcgtctggcgcggcgccgaagctgtcggaggcgaaggcggtggccctcgcctccgcgaggagcagcgaggccagcgccctgaggttggcctcgtacgtgctgttcggctcgtacttgccgccggacaggctgcagttgtagtgcagcgggttcacctcctgcgaggccaccgcctgatcttcaccgccggccgccgcccatgtcggcgacgagaggagtactgtgacagcaaggaggaggaggaggatgtggagttgcatggcactggagagtgtgtagagaaattattagagggctttactcttgagagcaagttgtatgtgtgctacgtatgaatgctcctttgtgagcgtcctaccttgcattatatataggagcaatggagcatgtatagaaaatttcctacaatcccggcggcgctacaacacacaccacacatcgaactttcttaatccttttatgcgtctgaattttgtcttattttctacgtaatctccatgcctatttcgttagttttaactgtaagttaatcgataaatttattttctaaaaatgactacatgtccctcctttcttatacttttgtgttacatacttcataaatctcatgtcaaaaattttaatttagagaaaatttcataaaaccatagatactttgaccaaactatcacaaaactacaaatttaagaatgtatatcataaaactacaaatctagagcgaaatttatcacaaaactacatatttaaatcattgtatcataaaactacagatttagtaatgaagttatcaaaaaactacagattttagagtttatatccatagcacttgtgacatcatggtccaattaggaaaaggcttgtgtggcctatgtgagctgtgtgcgcatgtttagtactaccttgctagtttaccatgagtagaaccaacttataaggcctcttccttctaaccatatcactcccgggttaatcctttcacacgaagtgatgacgtaagtgtagttttgtgatagatagattaaagtatatatagtttaatgaaatttactcctcaatttacaataaaatcaaatggatatgattatttcaacaaaaaatgataaatgaattttatcaatttgaatatttaattaaattagtataagggtttcggctagcaattgagaaccaaatttatttattatttggttttaaatatttgtgaaaatttattcaaatttcgtcaaaattaatttaaaatttatttaaaagtttcaattttattcatttcaatttgtggtcaaataatttagaccctttttttttagaaataaatgttcttttttacttgaggattgagtttttatcactgatgtagcacaataaatatatatgagagaggaataatatagtcactttgaaaaattaatagccaacgcacgttcaactaaccgaacaagtatacagggagcaaaataaaattttagagaaactagaaaaatgcccatgcgttgcaacgagtgaaggctattttaatcttattattgttatacggtttagctacggtgaaattcactgtgggaattcgcttgatattctttttacaaaattatgagctgcaattaggggtccgatcgtctcaagttagcatgaagttttttaaagagatttcttatacgactccttctgtatttttaaaaataaacaaaattaaaaaccgattcaaacatgtatctgtatttgcaaaagcgattgaacttaaaaaccaattcaaacacgaatgacgtaccaaacgtaccgacaaaaacatcttcaatttttataatattagagatataacaaatgaggtaaaatttaggaacatatataagggaattgagcaaatttttatgtgcacgtaaggaattttctcataagagtaatatacgaattagatgcttttagaagtttacggtatcaacatcaaaatttcctataaatatatgtcgatgcgcgtgttcaatgggccgacatattcgtggattagtcattagtgtatgctgcgggatcgcagcaacggatgcttgtgctgttgtgcatattccctgtagtaatagagataacggattttgttaagaggacagctgttgagcaacctatggtttagtaaaatgtgttctactacactgtcgaatttacagctgtgttggcttaaccggctctgtaagccttagggcatgttcaacaacagagtcaatcttagacaatatatatttatttttagagactatgcttgctattataatagttaagaaaataaatactttaaccattattaatcccaaaaatatttttcattaccccttccatgccccatccccaccccatcctaaaatacagcagaacttccatttaagcctttgttgagccattgttaccataacaataatgtcagtggccgagtggcggagctagtgtgattcacgggtaaatatgtgcccctaaaattttagcaaagtacccattatttacccatatttatacacaagtgtatgcaaaattgaactgaaacaaattaaaggcccgttgcagaaaactcattgaacttttacagtatctatgccatttgaattatctttacccacaacgaatggcatcggcgagcgagacactagggatagagagctgccgaatttaggtcgagaggatccggttgaagggaaaggcagggtggcaaaagagatagtcataggtggatagaaagcggatgcgtgggacagcgtatcaagatcgactcagtgcggttttagtgtggcagggcttatcatgcaacataagggccgaagcttagctttctagtttgtttttctttgtctttgttgttaagtatacataaacattttagatgtgtatatcaatttatacatatagagaccggatttctattcattatttaaaaattgtcaattgaattatctcgtcgatttgttggaacgtgtcgctggcttaaattgttggttagtcatataagtgaacctccactttgaataagtgaacccccatcttctctctcttccatgtattagcagatgatactaattagaaaatctaagagccttctattaataattattgtacatgcactatgtttaaaacgtaccatatgtataattatatactatatagaatcagtgttcttggagattgtcacgccccgaactagccccgagcggaactagcccgtgacgctccaaattaacctgttaatcaataccagtcccaagaaacaatgctggtatcacaggaagacagtatatcatagcagcagaggtctctttattatagagtaggagtacagtcatgttgggctgcggacagatcccgagctcataactacattataatagggaaagcggaagccaagacttggaccaatcatcacaagcgtgacttgggaactaggccgaaaccctaaaactcatcgtaaccgacttgctcctggaagaactcctcgtcagcgggatccacatcatcttcttcagcgctggggggggattatttatatagagcaagggtgagtacaggagtactcagcaagccatgggaattaagtgtttaatgcaggcttcaaaggaaaggctgttgtttttgcaattgattttatttaaactcctttttgaaacaactaagtgagtgcttctcaaacgacacggatgagacagtg

SEQ ID NO: 18701 - DNA, 13530 bp, Oryza sativa
aagaaatacttagatttaaattataggtgcaagatgatgaaaggtgacttgccttgctcgagatcttgagcttgatcctcgaaatcctcgcactgcgggtcttcgggctccgaaactacacgcgaaacgggacaactcaacaaacggcgaaaataagccctattattgacctctaagcgtgccattagatagatctcgagatttgaggaattttggaagttgaacggagtcaaacggacttacggttgggtagatattgaatttctaagattattggatttttgatctaaaggaaaaaggatttaattaaacccttttgaaaaagaaaagaaaaaggaaggggaaatagactttcctcgggcggctagggcgtggcccgagagaaaaaggggcggctcggccgagcttaatgggccggccggcccgagaaggcggcccaaggcacgcgcgggaggggaggagagagggagccggtgggccgggtccatctcgcgtggtcccgagtgggacccgcttgtcggcggctcggctcaccgtgagcgaggagcacgcgacgcggcgctagggtttgggcgggcgcggtgcacgcgcgaggctcgcgggtgcggcgggcccacgcgcagcctcaccgcccaccgtggaccacgcgcacggggagggtggaacggagggagcggctgaccgggtcagccgactcggttgtgccgaggtggcaccgacgtggcgtctacgtggctgccacgcgggccggctggaggaagacgaaggcgccggccgcgaatggacggcgggcggtggcggtttctccgggacgccgtgcgacgacgaggggcgacggggtgtacaccggaatgacaagggggaacgagagggagtgagccaatggcttggattcaccggaggatgctcgacggtggcgatttgcggcggcggccaccggcggcaggaaaagagggaaacggcgacgagacgactagggttcaattcctccggactagagcatctacgcgacctcgggattcattcctagcaccggattgggcggagctacgccaagagaagctggcgacgagcggcggtttgcggcggcgagcggcaacggcggcgaggccgcgccaggcggtgggaaggtcttgggcggcgcctgcgagcttctaggggaactacgagtgctaccatacagtctaaggggaggaggaggagcgaagagggagaacggggagatgcactaccgtgcgggcgggcgcagtaacgagagccgacggtgcggaaacgtgatcgtttcggcctcgagccgaggaagaggagggggagggcgcgtctgaagtccccttccgcgtcctcgctcgtgccggctcctccgacacgcacgacgatgaacggcgacgacagaacaggggcgacagtggcgtggcggcgagagacgaaaacgagggagattggaggagggaggagcttgggtttataagggcgacaatgtcggtttgggataggggaaccgacattggacggtcaagccggcgagctggtgcccggctagcggccaaaacgacgacaggaggtgacgccggcgatgggaggaaaaagaagaaaggaagagggaaagggggcttgcctccttgcttctttgggaaacgaaagagggagagagggcgacgcggcagaaggaggaggagctctgcctccgtcccttggaagctagcgcgcggaggtggcggggccgggtcgtgacgacggcgatgacggtagacgcggggcaggcgcggcaggcgctgacggcggcggcgactggccggtcggccaccacggggcgcacgcgcgggaagcaacggcgcgcggcgatttgagcggcggcgagagcggagaggaagggcgctcggcttggcgcggctcacgtgcacgcgcacgcgcggacagagcgagggagagagggagagagagagggagagagagagaaggagaaagagaaagatgagccgagagggaatcggcccaccgaacctaagggaggcaaaatagacttttgtggaggaattgaattgggaaggaaaattgagattagggatttgaattcgacgatggatcggggattcgagatccggaatggcacggagactgactgcaagcgaagaaacaattttcgcaattagggtttttagaatttaaattttcccgttaggcgccacgacggaacgggcgctacagagatcgacttggatacactagttaaaataaagggtattcgcagcttctaggcattcctttctacgtatagacggttgaaaagttcagctatctatggtaatgcctaggctacctgtaggatcaaggatcgcctgctgaaatatatctattaacagtttataaaaaaaatacatatactagaaaataggtgtgcgcagttgacgcgtctaacactttaaaccctgtgtgtagtgtacatttctttcgaaatagtagtatatacaattttagtttttttacataaattagtttgatttctataaattactataaaatattctacatttgtcaccctcacgttgttgcctcgttgctgccctccaagccgttgtttcctgtcgtagctcggcattggtagccaatgttggcactcacgcacaaggtgagtgggaccttgctcacccaccaggtctactacaggggtaagggcaggtgaggttttccacccggttggctctgcagagctaggggtgaggggagaatgtggggagcgggaacacggtgttcctttcctacccagccccatcccgccccattgccaccacctctactaattgtttggtttttcgattttgatattttgatgaaccaatgaatataccattaataaaacatcctcaaatatgtttattattttaatttaaaatgaaaaaaattgtgaagaatttattatgaatttgattttgtgctatccatattcattttttatggaatttatttatatgttacttgtgaactgtataaatatgccctgattattttggaagacaatatttattttgatgaaagtgtcgacgggggatacccgtagatcggagaaatagggtattgggctatacgacatcaaaacaggcaaaagacaagggttatactggttcagacccctcataagataatagccctgatccagtttatatgagattgatatgaaaaatcacatagtacaaagagaacaaatgaattcgacaatactggcgagatccttgtagagatggttcgacgggatctcccggtggcttcggcttgcgtcctccggcttcgtagactatggtgggtgtgttgatgctatgattcgatgatcccgaacccctcccggggtgtgccttctataccatgagttgccttagtctccaagtagaactcggaggcaacaaaccctgcacgatatagaataatccctatcctcttcgagtaggactctgataatcgccagcccatgaggatactttccataatatattgtatactttcttatcgcataatgaaatatatagtatagaagatggtatgtcaatcttgcatattcggtaaatcgtaggataggaggtatgcctaggggtgggcaaaataagaccgaaccgaagaaccgaaccaaaaagaccgagaccgagaccaagaccgaaaagaccgagatcgagaaattctgttagtagttcggttccagccatcaaaagaccgaatttatttcggatatttcgatcattgggctctgttaaccaaattaaccaagaaaaccaaattgtggcccaataggcctaggaggcccattaagcccaataaattgcaaaaccctaaaagtccctactacctcagtccctcacttaccagcgccgcctccatccatccccaccccatccatcatgccgccttccgcctcggcgccgatccagcctccgccgaccgccacggtcccgagtcgacctcgacgagcgccgcctccatcctccgccggccgccgcggccctgacgagcaccacctcccgcctccgtcgaggtcccgacgagcgccgccgtttgcctcggcgccgcctcccgcctccgccgcgtccccgacgagcatcgctgtccgcctccagcctgcgctgcggccacgaggaccgccgccgtccgcctccagcctccgctgcggccacgaggaccgccgccgtccgcctcggcgccgcctccagtctctgccacggccacaaggagcgccgccgtccacgtcggcgctgcctccagcctccgccgcggccacgacgagcgccgccatccgcggcgcgcctggctagcggtggcgtggcgccgttgcgatagccatagccatggcctcgccaccagctctcgctgcccacacctgcgctgttcaagaattaggttagaccgagaccgagacggaaaaaaccgagaccgaatttaccggtcctgagtcggtcttgagttttcaaagaccgaaatgacctaagacagagaccgattttttcggttagaccgaacgcccacccctaggtatgctttatccgtaaccttgacagaaattatcactgaattcacatcaatattccctacttggtatctagaaaaaaaaagtggtagaccaatactgtatgtctacaatagtagagatatttaactatttatcatttttagatgtgacaattaactatttaccactgaacgcatgtgtctatgcatttactgcttatagcctacttagaacctctgtacctccacattcttttttttttctactgacacgtgtcgacattctatttctgattatctcagccaatcagctcgcacagaagctgccagagtaattgattgattgatatatgatgctgaccgattgttgacgtttaagtgcgtacgtatggaattccatatctctatcggtccaacaatcgatctcgcactattttatattagctgaatgtacatataggagacagatcaagcaatatgcccactggatacgctatatatattcctttcttttttcttagaagaaggggacgaccgccccccgggtccccgggcattatgcaattcactgttcttaattgtcgcagttcagccattgtttgacttgataggtcgttcgccttcttggataagcaacgcagagagtcagccgtatgcagataaaaattacacgagctgttcgattcgacgagataaaaattacacgcattgttgcgggacacgtagaaagatagataccaaattgagtgcgcgggtcaagctaagcaattggtcgaagaatcactaaaaggtcaatatgttctggaagtgaaagctaattaagcagagcagtccttccgttttaagttacttgtcagttgtcatcattctatttatcataagtctttgactatcaacttttataaactctgaaactcatgtagtttaacactacgagttttatattatatcataagaattatatatctttataatatgtaattcacatgttgttaaactacatgaatttctaaaatttaatggtcaaagataaatatgtttttatttaggataaacataaaaacgacaagtaatttaggaggaagtaatatttgttggagtttagcaagtgaaaagtaaactgcatagcacaccgaaggcactgcacagaaaatgcataaatcctgctgatatacttcatccgttccacaatataagaagttttagagttggatatggttattaagaaaactagaaaggtagcccgcgcattcgtgcaggcatgtagaagatggtttaaaagaacattgattggatatttattatagatcttaacttaactaaatatatatatttgtgaagtaatatattttacctttatattgtagaaaatcatattttaaataccgttgatttttatgaatgtatgcttattctgtctttttttatgtacatgtatatgttttttttccagtgaagattaggaaagttttgttttcaatcatgtacaatgtttgtatgtacggaaagaaagcagtggcatttgtaacgtaccaactcatacgtgtacctgaggaagtcattattttttaataatagatctaatctaatggtgtaaaataacgggtccaccaatttaagtgaaaatcaacggtgagattaaatagtgccatgtggcgactttagagcgtttgtagaagtgccacgtggcagcataagagtgtttgtaggaagtttaatggacttttattaaataataataaatagatatgtagaagtgaatggtggagggttgagattgaatgagcagtggaagtaggtgggaaaaatgaatggtggatgattgtgataggttgggaagaaaatattggtggagaagttgtaatattttaagacaaattttgatggctaaaagttgttatattttagaacggcgggagcagctagcaaggcaacgaaagtttgctggtctatcgcggcagctttagaaaagggcctatcgtggcagctttccaaacgatatcaatgtcggttatcgtattcgccagtatcgctgtcggttcagctgaaacggctatgatactcatttacacgaaaaagaataataaacgcactcgccaccatcacctgccatgtttgtcatctcccttcagctgcgcctcctatattcctctcatcgatctacttccacctccacccttaaggatgattgtggtggcatcgctggtggtgtgggtggcggactggcggtaagcgctgccaggtagatcagtgaattaatgagaggaaagaggggttagagaggatcgagggagagtccgggaagccattcagtggggatgggtgggggcatttagtttttttttttttttacaaaatttgctacaggacatataaaaaattttgtgtaattagctatgggacacggtaataaaatgtgtaatttgcatcctccattgcatgcaggacgtccctgctgctgccctccaccgcctacatgctctccctactgctggcccacgcctcctctgtacgccctccaccattgccttccacactccttctcagctagctccagctccatcctcaccatcttcctcacgtgctccacgtacgcctggtgtgccgacgcttgctgcatctgcatcaatagtaatagtagcagcacggcgagcgtcactggccactcctctacgttcacgtacgctcgacatgcccgccaccaccacgccatcctctgtaggatcgaatcacaagaactaagccaaccagagggggggtgaatggttggtatacccaaataccgaaaacttttagtggaaataaaagttacccttgaaatcgacggagatcggtctgactgagattgatctgtcggtctgaccgagtggatgccgccggtctgaccggtgttgaatctccggtctgaccgccgaagtcgcctgccgcgcctgtcgcctccgctggtctgaccgccgcttgccgccggtctgaccgccgcttgccgccggtctgaccgccgaaacccggtaaacacaaatcgaagaactcttaaagtggatgacgactttattgattctctctgtgtttacaaagtgcatcaacagcactcacaaaaatttcgactagactcgaaaccctaactcaaaactcaactcaattactctctaaagcgataccgggaagcctcacgctccccctctatttatacatgaggtaggcagcctaaagccacgaaccaaactcatactaggagtcctaaacaccttagtaaaccctctagtacaaaaaagaaactttacataaccaatcgtatcaaatttggactccttccaaattcgactccgcatcctatacgcacacaataactccatcgtatgccatatggaatctccatcaaccacgtgcatcaactctagcctaagtatcccacatgatctctgaccaccacggacgtcgtcttatccccaagccgactcccagtccatcactgcaaatactctcccgagacatcgagtcacctacacatggaacaaacaaagaaaccatattccgagaccaagctatctccaacttgactcattagcagcaaacaatagtattacatacgtatactatccatctagaagccataattatgaaataatcacggatatccaaataaacaacccgaaatcgaaaccgacacagcgtcggccggtcagaccgcgggctggccggtctgacggctaccagagcccggtctgaccggtcacataaaataacgaatcctgcgatcacctgtgaatccaatcatctccaaaaccacttcgtgaataaattccaaatatcaaaaccaataatctccaatgcccaattgttcatcacaaaacaataatcaaaaaacacctttgattttacatcctcctccccaccagacccgtaccatgcggccgacgtcgcctgggcgcccatccgtgccgctgctgcgccgtttggcaagaagggcaagctggagttctgccccgacggcgacctccactcgctccaccaccgtatgcccgacagccgcttgcccgcttcctcgtcgcgtcctccaggttctatgccgtcaaggttctcctcttgcttgagtatctgcacatgatggctaggttcaagtccagcagcagggatgacctgtagcggtggaggccgcgaactgaccgaaagaagggggaagaagacaagggcaaaactatcattttacatggttttctctcatcaattcagtggatattatctctatctctacctctactattataaaaattgttgtaaatgtttccgcggggatttcagtatgtcatctgtgtttgagttggtttctaattttatctttatctattttctccatcttcccttttttcgctgtttttttttcgatttggttttttccgtcttttttcgcttttttcatccggttttttgtcgctgttttttttccatccagttttttttttatctcatccgatctgttgcaaaccaccgccgcttgaccaaaccctagcgccatctcactttgatatgtctcccccatgaacctccaattgattgcaaaagtcgattccccacaattgattgcaaaagtcgattccccactcctcccttatcattttttctcaccgttttcctttcaattcggctttagttcactggatttagtcttagtcgccgatgatagccgaccgacctttttaacccgaattttgtggatacgttccgatttagggaaaaacaaaaggaggagatcgagtggatcaaaagacctcaaccaattttgggatataaaaaacatttggctagatttgatggggaggattgactccggcgtacgggcacatgactatctagaggttgaagacgctagatgtgcgagctgggcctataactccacttatgagatggatcggagagagtcagggtagtcgactgtgcgagttgggcatgtagctccacttgtgggctggatcggagagagtcaggtcaagtaaagggaggtagcgaactgggttgggactgaaaatgaaggaaaggatgggctttcggcccaaaccaaggaacatgttttattaactttttcaattacaatgtatatatatagtgatcctaacgattcaactcattgctcagttcctaattgcggttctaccactgaaaaacgtttttacccgttgcaacgcacgggcattttttctagtattttaatacgttcagtgtcctgcaacaatttaccacacttttaaagtgttctagggcaaattcacgtctttacggtgttttacagctaattacattttttttttgttgtcctatagcaaattttgtctagattttttgatgccccatgctcacttattggtcaaatgcccttttttttttcctaatttcctatcttgagactctatttttagtgaacctgcagtgattggccgatagtattagctttttgttttgtaatatatatgctcgtttcttgtgcatacggggagttaaaatctgcatgtttctttattctcccccaccatattgtcacgatcgccacagaatttggaacttctagagggatcgtgaggaaatcaggaagcacgagaggaagaagaaggtagttgcgacagaatattgagcaggaagagagaagatttgaattgagtttgagatattttctattacaagtcatctctctccactgccgactttatatagcatatcattattaggtctcactcactgaaattgggcccagccgatagctactggacccacactcctcccacatatcgtgggcatcactagcgtcctgtcagctgatgtatccaccatgacacatatactcacattaaataaaatatatgctagttaagtttttattggtcttgatgaaaaaaaagttactatatcaagagacgaaatggtttgttgagattcgcggcttgcttggaatgctattaattagttctgaacctggtacagcaaaaatacaacaatagactcgaattttccttttctaataattttacgccaagtggtatgtttgaaaaagaatcggaataggtaaactttaaatattacgaaccttcttttccttggaaattaacatgttgcgttggacaatgacgaacggcagcatcactgtaattgctttagagaaaaaaggttttttcaccctatgagtccattgtaactcaacaatcgaaaaggttgtttgcactagaatagggttccggttctaactaaggtaatactatctccgtaataaataaccatgcaagaacgaagaaatctccataaaacaaacccactaagcaaaagggcactcctccaaaggcttagaaatttctcatcctaatcaaacaagaatatacaccggtcaatcatgattgattaaaaatatatgagttgagattaattcgaactcaatacatacgttctaggaactgacgaggtgataataccatatcaagattcagtttttccttttgagaaaattggaactgtatttgggaccaatcctgaagaaacaaaaataggaacactatgatctactccctccatccagtatatcactaataatgattatctaatccatattcatagtaagagccagaggttgtatctgatctaatattatcgaggcacttttgtagcttagtctgtctgtaagaactattatggctttttaatgaaaattgggcgcaagcctttcctccaaaatattatcgaggcaactacaaatcgcactgctagctctgaactgagcctatcactgaccgcgtccactccgtcgtgaagcgggggctgctgatccgcgaccagtcgcacgctgccgcgcgcgcgcgatcagctgccccctctagtctgatctcttacctatataaacgtactatatgccatatatacatacgtataaactttatatacgtatatacaaagtttatacgtgtatatatatagtatatacatacgtgtgtacatatacataattttttatatgcatgcacttttaatgtataaaaagatatacacatgtatataaagtttgtgtgtatatacgtatgaaaaacctaaaaaaatacatgtatacaaactttatatatgtgtatacaaactttgtatacgtgtatataaatttggtatacgtatgtataaaaacccaaaaaatacacatatacaaactttgtatacaagtatatagaagtttgcatacatgtatacaaagtttatatacgtgtatataaagtttgtatttatacgtatacaaagtttgcatacatacgtattaaaaaacggacaaagagaaaaatatacgggaggaaaaaaaaaagaaaaaaacgaaaaccggaaaagatacggaaggaaaaaaacagaaaaaacaaacaaaaaaaagaaccgtacgcccgtacgcgacgtccgaaagatacggaaggaaaaaaaaacagaaaaaaccaaaaaaaaaaggaaccgtacgtccgtacgcaacgtccgccgccttctctatcgtgtcgcgcgcgggagggctattagcccacaacacgaggaagccaaaaaaaaaaacagaggcccgtgggtttatagaaacagtttgggctagaagtagtaggggtgaactcgccgcgcgactaatagcgatttcgtcgtgaagcggcacctcgatcgatcaatcacttgctcggtgctgtaaaatccgcaacacccgtgaatcatatcgctgaagcgcgctgctgccgcggcaagcgatcgatggtgtacgtggtgacaggtgagaaatcacacgagggctgcatggactcgatcgagcacatggaggcagatggatcatatctcgtcggcctgattaacagcaaccatagacgggacaggccagcccaccacttgcaggggcagatctaggggtggtgctgggtatgcaccggcatacccaaaaaaatcaccaaagatccaggatgtataattgtattagtatgctgtatgcagtgagcctaaacaatatatgggtatcttattgaacgaagaacaaggaccaatagatatgtgcgtttgtgttcctgttggggattggccagtgaaattagtaacttttgcggagtcacagtagggctttcgcgtgcgggcaacaacgagcaagcacgacgtacggccgcaagagctagaaggtgtagcgcggctacctgctggctgtgctacaacggcagtagcaaatttacaaatttgcagggctagctgttgcggtgtcgctgctgcctgctggctagttagtggctacgtacgcacgctggcggaggagccgcacagacggatcggatcggaggaggcggtgctagctggtgcatgcatggacgatcgatggacggcggaagacctcaccggcctgtgcacgccgcgcgcgcgcgctccactgcttgctgtcgatcgagtggaagaggcgggcgggccgggacggggacggcgcggccacggacaacgcgacgctccggccggcctccgagaagaggtgtggttggtgcggcaattaattaacggaggaaactccaatcagatacgcagacggacaaaaatcggtagaacattgagatcaacgtacgtacaccaatctccgatccggaacgacgcgcgcgacgtgcgatatggaagctcgaacacgatatcgattaggatgcgatcgatggatcggagagaagatatataacgagagagatagagatctatcgcatcgcatgtgtttttcgacctagctaggaaaagaccaatccctctcgtttctcgtcgcccgcccggtggatccactgccagccactagcgaaagtacccatggatccaggacccatgctggccgatccaacacttatggtgagggcggatcaacgaggaccaccccacatggtattggtggaccgctacgttgcactcgtggacgacatacaagaggtgatcgacgaaataggaggtgtgtcgttcgatgtgagcttgaaggcagccctcgacgccctcccgaagtgcagcgacggcaagagtgggacgaacaacaacagtccgccatcagggcag

SEQ ID NO: 18702 - DNA, 3414 bp, Oryza sativa
ccatcttccgagaccgtaaagcctgccgccctgcagcgcctggcacgatgcgtaaggagcccatggcctcccggtgcaactccggctcctactaccgtgaggtactggacggcatcgaccctcgcttttctcacctcaccggcggtgccatcgtgaattctctgaccattggggtctcctggccacccagccatgacctatggaatcaccccttgtccgcctccatctccagctgccatgactgcttgcttgtgctctactttggcaactaccgtcccgggatctcttcgccagggtgttactttgtgctcaacacctgggccaactcggtcgctatcgtcccgcctctgcgcgccacctgcgtcatcaccatgtcgcactgcggcattgggaccggggtcgccatcctacgccataacgactactacgactatgtcctcgttgagctcttcccccatcaggacagccggacccacctcgcctccaacaaagccactcttttcttgtggtggtctcctagctctagcccgctcgccgatggccagtggatacggaaagaggtgctgctccccatccctgcaacttccaatcaagataaggacgacgcgacacggccgcccacctactcctttcgtgaaaacatggtgttcgctgtttcgaccacctcgcttttgctgggttgatcttaggacaggaatcttggtttgcgatattgacaagctcaacaccagcactgacgacgaggatgatcgcttgttgttccgcttcatcccattgcctgaggaatgcgtgatgaagcctggccttctatctcgggagaggccagcggaggagcaccgcaccatgatctgtatggacccggagaccatcctgttcgtctccatggatagctacatccaaggcctccccattggcgatacagtgctcatgacatggactctcaagttcccactcacgaaccactggacctgggagaagcactctgcgccatccttgtgcgtgggagacctcctaaatgatcttccagtcttaaaagaatccaagaatgacgggaagacgcagcacattgccaactgcccggttagtagcattgacaggcaaaaccatcttatcactagcctcactattaccaagtatgagaggaagcatgagaacgggcaatggggagtcgtggaattgtacgaggtcagcattgacatggaccgtagaacggtcttggagttgtcttctctcgaaagtcgccattcaaatatatttgcagctgactttagttgctgcttacaacaggtacccctctttgatatgtccatttaaagtgtatattattttgatacgggcaactcttggaaagtaaatttagcctttaatttctcttacattgtattgttggttggtagaaaatcatcattgtggaagcactttgaaaaaaaaatgataatggtactatgtaagcatgcttataatttgcttacgaagtttacattttcaaactgaacacgactcgtaaaagtggacaggcggtggacaggtcccgaatttcttgtactgctgtagttcactagttaaaagtttgatgtttgatctaaattagacaaatttgttgaactacttgctaatggggaaaaaccaaccggtgcagtgagcatagaactaggaaaatttgtcctcgatttgaaaatgttggtgatgggaatgatgaaagcatatccacagttcatctgcttggacgaccaatattttcgattagtagttcttctactcaaaattaatattaggagtaatattttatcaatctgatctattagtttgtgcgggtatagtaaatttaaattcctaaacatcaaatgagaagccgagccttaaaattaaagagcaccacagatttgctggcacaattaataagcaaacacctctttttttgtgttttctttagcatcagggtgatctccacatcgtcgaccgcattaacagtttgatcttccccttttttccccttctatttctgatattgcccgaactttttctcttttatgaattttctttcttcgagacaatgtcgtgggaaagcttacagcggagtcgctcaacattgaagtcgcctaacgaggaagaagtggttgataaggatgatgaatattgggagtgggtgttccccgatgaagtgggtgaggatgaatatcaacatggcccagacctgtcatgttaattttgcgccaagatggaatcagaatatcaactctttatggttagaacttggaactttcaaaaggtagtgggtttgaaatgtgcgccggattatcttgagatctaggtttattatattagttatgttacaaggaaatcccctcttttgtgaggaggaaactctctatctcgagaacttttcttttcctttttttacataaaaattttgtacagaaacaagtctgtcatctcagctaataaaaaaaagatattgaaaatgaagtgagtttcaagtggattttaattgaagaacggtacttttcaaataaccgccaaaacatgtttagtccctgtattagtaggtcagatcagtatttcataaattatccgttaaaatctactatgtcaaagctccagccatctttaaaagtttatgattcaagttgtcagcctaccccaggtgggttggaatttaaaacctgtttggttaaaaccaggtggggttggaatttactacgctgaacaacatctgcctgaccggatgcatgccggagatacgcctgcacctgcctgacctgagcttgttcggcgacttcatcattagcctggctcagatgcacgaaatgggtggccggagctaaggcgtcttgctaatcacgattacagcaacaatcgcgcgcgattactcaccacgggcacgaaccgctgcaccagtacgcgcgtgaggctctagctcgtcgaccaccaccacccagtgtcccagtcccaagcaagagaccacagatgatttgaggaatagaccgaggattagaaaaggattgcattatgttgatgggggattaacggagttaatcacttctttacctaaacacacgtcttttttactactgattttgtcaggcacgtttagtccaggccttcaatcgaacataagcaaactcaggatatgcctcatctggcaaaaagcataaaaaaatcagaagtctcaggcacaacttttgcgcaggcatatcaaaccggaaaagtccacttggaatcccttaactagcggccaaatcttattaagattcctaaaccatagtatcggatatcttgaaccaaaaaataaaaaataaaatagacggttttgaagaacggtttcatgacatggagcatacatggcagtgtttacttgtcttcgtcccacatgacgtttatgtgatactagtaatagtgcagggctgcaggaat

SEQ ID NO: 18703 - DNA, 10788 bp, Oryza sativa
catagccatgcctctctctctttttttttcctttgaaagaactttggaggaagaggcataaatgacatggagtatgtattttgtggactatggatgaaatgaatgacaaatgaggaatgctaacttccagtgtagaagtaaagcattagtgggtgtatgtggaatgtgtgtgatcttgaccatgaaagtatgaaaagcatttcactagggtcacaaaacttgacaacgctcaatgtgatgacaagtagcgtatgtagcaagctaatcatgaatgatcaacctatggctttagtgggaatgaaaatatcaatgaggagtttagcatcgttatatatattttttctttttataaaattaccaagtgtgcaacatgaagagcaggatttctatcatcagactataactcattcatcaattacctagatagcatggggtccctattggatatatcaccacaagtaacaagtaatgagcaaagaataataggcatgcatgtcattttcagggagaccatagactctaattgtaccatccctagcttgggttcaattatcttcgatattttagaattgatagtcaaattaaactcaagatagaatggatgtccaaagtaaaaattgtgcaaacctacgctctgtataaaacagaggacgattcatggtagaggtggttcagtcaaactggaggttcgactgacccctcattgggtctggctgcatcaattttcctcgtgtggttcgtcatggctcatcacttctgggtgatcttactttggttatggcgttgatgtgcaagatcacccccacacttgtctttgtatctgggaggctttattggacacaaaaagaaaaataaagacaaaagtgaagcaaaaagaactcacttggttggaagaccaaggagccaactttattttattttattttattttattgaatctttttttctttttattttatggcaacaatggatatggtgggtatcctggcagaatggagaaatgagatgaggatgcacatggtgtatgagattcttaccagatagatcttaccaggcttagaactggatcgaatgtaacaaagttttgcatttgttctgcttgattccttgtgcatctctttcccatggaccaaggagcatgatataagtgtttgaagttattgtacactgctccttgattgtctttttatttcctgcaaaaggttagtggacaacaaatacccaagggactataaagatttgaaaagattttatcgtagccttgaaattagttgttcacatccacgccaaaatgaaattggattcaaaacatgagaagcgtggatcccataagtttgctaatattttattttatttttcgagagacagtccttttattctgaaacattttttttcaaatttttattattcaccagattttcgtttaagcacaacttatacagtgatgaggtaaatttgcatgaacatgctaaaggagcaattagtaatatacgcaccgtgcaccttcataggtgatatgtttctccttttcatgttagcaattgatttgttcctggccctggcctacctccattgtgaattgaacttgaggactcacccgtcaatttgaaaattttcctgcaggggttagtccacataagatatatatccaatgtctatgaacatattaactctgaaattcattaatcaaactaaactccatgtccaatttgattaaaatagactattttaacctaagcaccatgcttaatttaaaaagcctatagatgtcttgcgcgaacacccaaaacaaagcatatgcaaatagacacaagaaacataaccatgtaagatcaagtctcattcaaatgaaaataagtatgagtaaaaggaatggtgaaccttgttttatctttcgcatacctgagtgtacttaccgccagcatgatgtatattttgaaatctctggggcagtggtatggtcacatatggttgtcgatttctcctccatctttatgcagattgtaccggaggaaggcgctttgaccatgctaactcaggcaagcaagttggtcatgcacacacctcaggtgcaagatccttgtgccttgaaggcgtgatccgttggcacaatacgtaggatgcatctcttttcgagcaaatgtgcaagtgtcaactggagtggagtagccaacacttagaaatgaagagggcaactcctcttgcttgtatgcgcgtaggtgctacgggagcgataagttgtgcacagctagaagtagataaaggctgagccaaggcggcacatgagctcgagagaggcactaggtgttgccgggcagcatgattgctactagcgaggtgtatagccacatttcaaagacacgcacataatgcagtctttgatctaaatatagctcgtcagctctcttgctcttttcttcttctcccatttttttctccttttcttctatctctcttttctcctcttttttatcttcttttttttcttttttcagcaagctaggactaacaccaacttcaacccaagatggccttggttgatggaactcatcatgaaaagctcgtcgaccttccccccacacttggacttttgtgtcgcaagacatcaaaaaccaagtgtgtgatgtcggattctcctatagagtgtgttccaataccaaggatcaccaaagtgtacagttgatgtagctagtgttcttagacatcgcatgaccctcgttcttaatctcaacctgcaatggttagtgaccaagaatacccgaaggtgcatattatcctaaaaaccggttcttgcttttattggaaagaaagtgtaacgctccgcttttcatgagacgttaaaaactaattcggcaaaatcttatatgcgaaaatttcgttctttgtgtgcgagtctaagttgtgccatggatctcaattcaatctcccgttgttccatctcgttgatatcaaaatcccccacctcaagatttcaattccgattcaagtctccgaaacttaattgtctccattgaatcctcgccaaatacttgtcccgattccaaaattatccgagtccactttgaatccattccttgactcctccctgttttcctaagaccaagtatcaagttcgaaacccaaattcaaattccaaatctcctttccctccaaaccgatttcctggacaagagtctactttgcctccctcaaatccttgtggaccgattctctctcggcctatcttctcccccggtcgtttctctcctcacgtgtgtcgcccgtgcgctgagcgagagacgctccctccgtttcctttctctctctcctctcgccgcgctatgcgccgtcgccgtgattcgattttcgccaccgcctttgaaatcccgccgccaccatccaaacctccgccgctgttcgattttggcccgtgaccgcgcgtcgtggtggccgactggccggtcgccgccaccgtcagccctgtcgctcctgcgccgcgcagccgcctggccccgctgccctgccgcgctgcgccacgcagccgctcggccccgcgcgcgtgcccaagccgctccacgcgcgtcctgccaaaaccatgaggtcgagctcccactcccatccctctccctccccaaatcggcaaagaagcgagctccttttcccccttctttttctctttttcccaacctcagccaccgcacctcctctgccgccgcttggccgcttggaccgatgccagccgagctagcgcgactgccagctcactccccttgaccgccccaatgtcggttccttcccctcgaagccccatccgcctataaaacccaagccgagctcctcctcctctctatccctctcgttttcgcctgccgcgcattgtcgccctgctctgcttgcaccgtcgtcgttcgtcgtcaagcaccggggaggccggtgcgtgcgtggacgtgcgacgaggagctccgggcacctcttcttccccttccccagccgctcctagagagcttgctcccgcgccgccgccgctcgtcacggcgccctgtcccgacgcggtgaagcatctaggcccccgttattaattttggtaattaatgacaagcactaattgtggactaactattgtctttgagctatatattttaagttaggaccaagtcatatgtgcgcatggatgattatcgatggattaaaattgacggcgcaaagcaaagagaaagaagacggtaaaactagtgctttaatttagaactgatcgaggtgtagggcgatcaaatttgctagtttatttgttagtttcaccgtactatcaaggggggtaatgacctagcaaagagatgattaaattgccacattaggtcattgcattttcactttgctctctttttcatcacacacacacacaatcatttgcccttttactgggctcggcctgaccaggggtggtcagaccggccacattgtggcggtctgaccggcgcggcatggccagtctgaccggcgccacaactgcggtctgaccggcgcataaggccggtctgaccggcggcacatgcgcagtcagaccggccccctaaaggccgggatggtgctgctcggggtggccgatacagagccgatggagccgtattcggtcagaccgagccgaggccggtctaaccacccactcaacaccggtctgacaggccaagccgatggggccctctgacagcgctacaatggctagttttctagccgttgtagagtagcacggtctgaccggccgcatacctccggtcagaccggcagagcacaaagtttggggatttcgcccccaacggctagttttggttggtgggagtataaatactccccctccagcagcaagggagctctcttggcacccaattcaattgcatacaccccttgcacctctctcacacccacttgagctttgtgttcatccatttagtgtgttagaggtttgatctagccaagagtcaagtgcattgcttccattgtagagctagtgtggcacttgattgatcatctccacgccgggtcattgcttgttactcttggaggttgccgcctcctagacggcttgtggaggagttgcccggtgacctctccgagaagattgtggaggaggcccggcgccggtttgtgagtggtttggagttcaccaccttcggagtgaaggaagaactaccctagtgatcgaggcttgggtagtcctctccgtgggccggctcccgccttgcccaccccttgacgaagggggcatgcggtggcttcgtggttgagcggtagagttgggctcgcctcaacgaggagtaggaaaccggcgagtttccgaacctcggtgcaaaatctcttgtctccttgtctcatttgattgtcgtatttatatttgtgcaatttacatttctagagacaaacttgagatcatatcaccctaggattgctaaacattgacataggagtgtgatttactttcctagagatataattgagccactatcaccctaggtttgaaaaacataacttagttgcttagttagagttgaccctcaccaagcctagcaatttaggttagttttgattaggtgtcatttagttttaaatcgcctattcacaccccctctagtcgacatctcgatcctacatgcggtagccctccgttcctcttcctcgcttgctctccccctcctttaactcgcttggtagctcggttagccttccggtggttcttaggcgccgccccaagccccgccgccgctcgccatagccttgctgccatcggcgctcgctcccggaggccgcctctcgtcgccggacctccacggcacctccccatcccatccgacgctagaaacgggtcccctgagtcctagagatgctcccactccgccgaatcgaactcccattgctccggtggattttccccttttgctcgccgccagccgccgccatcgcaatccatcgccattgacctctcccaaagaaatccgagccgttggctcactctctcttgtcttcctcgtcattccggtgtgctccctgttgcctctcaccgtcgcaaggtgtcccggtgaaaccgccgccgtccgccgtctatctcggcatcccccttcttcctccgccagccggcccgcgtggctgccacgaaggcaccacgtcggcgccagctcgaccggaccgagtcaagctgaccccggtcagccgctccctccgtctcccgctcgcgcgtgcggtccaccgcgagccgtgaggctgcgcgtgggcccgacgcgtctcggtccatccagcgcaccgcccgtgcgccatccccaccgaaccctagcgccgccctcgcgtgcgcccatcaaaccgtgggccgtgtcaccgacaagcgggccccacctgggaccccgctcggtgcactcggtccaccggacccccccccccctctcccgtgccctaatgggccgacccccgcgctcgccaggcccaaaaaggctcggccgagccgcgcaagccatcgggccgcgccctaagccgcccaaggaagtctgattcacgtctctcctttatttcttttcagaaggatttaataaatcctttttcctttagacagaaaatcctttaatcttccaaaaatcatatcttccaatccgtagctccgattgactccgttccacttccaataattccgtaaaattcagatctatttaatggcactaattattagtctaaataggatctttatttggtcttttgtttaggtttttattgtttgcgtttagtcgcggttgccggattatcatcagtcttgggcctctcaaagattcgtgaagcttcgtgaagaccttgagcaacgcaagtcaccctttgatcaattgctcctataattggaaaatcattattattttgtttgcaatttgcattattagaatcacacacttaacatgcttggcctcggtttgtgtgccaaaccgacggacctacctagtagttgcacaaattcatgtaggctgtactaccctgattccttgtcgctccacccttgtggtacttcagtatccgtgctctctgagcgtgtataccaaatatcccacatacaccgttgtttgtcgaaaacttgggaaatgggtttgtgaagccttgaaaacccgacatgtggtgtcggtgtgtttgaaaataaaatgaattgtgaaaactcacgatgtgggagccgtgtctacgtggcgctgtcccgtattcgcatataaggaccgattcctatgggaaactcatcgagcataatcacagtgcaaccacaaggtggaatgggacaccctggctaagtaactagtcggttcagggaaacctcgcatgccaatagttgggaacaccggggcagggtcggttggagccaaactgggttcctggtaagcaagaaagagaagcttgcagaattaccgatcgaggtggttggagtttgatttgtgaaaactaaaatggcctatatttatgtgaggatttgattcttctatgtggcatgaggtgaccctaagtcggcttgagaaaggctttgtcacaaacctctcacaccggccagtgtctagagtaagttcgtgtcttgtgggtaaagtgtacccctctgcagaggttaactaactgttcgaacagccgtgcccacggtcatgggcggatgtgaggtggttcccgttgcgtagatttgattgcctgtgctttgcgaaaagttgttgtggaatgggaatcgtaaccagaatcaacctatgtggcagatggatgacctgagtggtcagaaacgaatctgtgtgattcgggatgtctgtgggcatcatagactaggcttcccgagtggaagcggattgcttgctgcttggcagctggactctgggagtccgcaaaaatgaaaaaggctctgggagccacctaatcaagtgaaatggctctgggagccgataagtaatgatctaacccgggaggtcggtacattaccatttgagttgttgaaaagcatctcttaaagtcgaatcgagactcaagtctcttttcggcccgaacttagaaagaaataaataacttagtgatttcataatgatttcagacaaaagatttgcaaaacaatcttgccactcttccaagcttgcattaaacacctaaatttccgtgacttgctgagtacggaagtactcacccttgctctatataaatatatatagttcctccgccctgaagttgaagtgaagtgaagattagggtttcgtcctggttcccagccgtcgcctgtggtgttgggtgttagaccattggttcctctgctgctgctattgttggtgtttcctcgtccgggtcgtcagttgcattatcaggctgttttgagctgcaacctatgttaaggtaaataagtcctctatttattttaaggattgcaatgattcatatttgtcaccgtgggtaccagcgctatgtcctgggactggtactgagatcgcggtttcgtaggaagcggttcgcgccgtttttcctacgacacgctccagtcaggtgctgttgtacggcggtgccggattggggtgtgacagaaagcttaccatgataatccggggtatctcctagcagtgctttgtttattgtcacaagctcgaccttagggacattgctctgcaagattagtgccacaaacaaatacgagatttgcagtatttatgataaatataagcgtctacaacaacacctctatacatgttagaaatgatgaccgaaaggtggttgtggtcctcacatagggaagtggtactaatcgaacaggactctgggtatttcttatgtgagcatgaatcctggggaattttgaaggaaaaactttcatgctcatttgcggaatgctttctctcgtcctccagagtcgatgtctcaagcttgtccgtagcctgaaggttttccttctcaagagatacatcatgcaagaatcgggttgtttcttgatgataaacaaaaacaacgttctgaggaccagagggacaaggcttaggcttgatcgagggtgatgagggtcgttcagtttcatgatgatgggaaataggttcagaagaaacgaacgaagatacaaaaatcacctcctcgaacggttcatgcttgggatgagccttcgttttgctgaaatgattcagggtgtttccataatcttcataaagatcatccctgaattggaatggaatttccgaaggatgaatttcttcttcttcaggcttcagcaattggaatgaggattcggcagttgagtcgggttccaactccacgtgcagaggttcctcatggataatctcgatctctgggatggcttcgctttggccgaaagaatcattctctaagatcagatctaagagttctcttccttcgacggttgtcttgtgtgcgaacgatcctccggcggaaatatcaagattttcagcaaactccttgtctaacccataccgaaaatgtcgtaacaacacatggtcgggtaaagacaagtctgggccagactgagttaacaatgagaatctggcccaggctgcaccgagagattccttctcattctatcggaaagagaggatgtctaatcaaagattaattacacgggttaatggaaagaaagcaaggcagaatttgcacttgagctcctcccattcaccgtggaatttcttgacagacatagtgtaccattgcttcgctccatctctaagagaaaaaggaaacaacttccactttatagtttcatgtgtcatgcctacgatggataaacatgaacacactagctcaaagtcccgaagatggcggtatggattttcaccaataccaccagagaaggtttgctctcgaatcatggctataaagccaggaccgatttcgtagccatcggaaaggattggttgtgaagaacaggatggctcacaaagatcagcccgagaagcagaaaggttttgaattgtgggttcctccatcaaggaaaggaataaaagaagaagaaataaaaataaagatacgaggatgacctagactcggataaattagcaaccgttccccagcaacggtgccagaaatgcttgttagtatttcttacgaccatagataaatccgcaagcgcacggaataccgctgtagcactttaccttcgggtgaccccaaaaggatatcaaactcagggaacgtgtgtaatctacctaaggctaagactatccaaggacaacaactgatcataggtaggctaggctagagaggactttctatgtgttttaattatctactctaagtaaggtaattccctatctgttgcttcgggcaccgacccctgctggtctgccagcgtggttccggctatagctctatgatgtatccgaacatggaggattactaggacgggattcagggctgtcaccacttgccgcctacctctgacaaatccggtggatacacaacaaacaagggtatcctctaacctagacaccatgtctaagttattaattactactctaatacttgtacaggaacttccttctttatccagagtcctagtactagagcacttagtataaatactaaacaatgaacccgcaaagatggaaatatatcttacttaaacaaagtaattaaataacataagaaataaacacgaatgcttactttatagaagaagttctccgaacccggagcagagtgtaccgacagctctggtactcctctcaaattcctcctaggaagctacactcgtcagggagaagtcggatgagcgccaaacttccgggcactcctccagagcttcccctcactctctaccttattctaatatagggctgcagg

SEQ ID NO: 18704 - DNA, 4729 bp, Oryza sativa
  unsure (1)..(4729): unsure at all n locations
gtgggaaatgctagaatgacttacattgtaaaacggagggagtactagttagtatacacagtgaaaatggtaagtaagtaacaagtactaggtaatatgcttattacctagttataaggaataaataaataatttctctcatcttttctcatggctagtgactgtggggtctagcttaccgtccacttttattctttcactaactattatgattacaacaataactaatacctattgacatagagcttacccttattcataaaataggtagtaaatattggtgatttccttataaaaccatatattaacactatgattctgtgatctgaatgtgatcagaagattataggatggacctggtcgcgctagcgagtggacacgttcatctacggctatccattatgttaatctgttccccacgaagtaagaacaatatcaagcgccttgtttagagncatgtttaatagaataagccaactactaggctccgaattcattctataactaatgtaatagtcaatttcatacaataattacctactatactattaatatttggtcccacctgtcatatacacattacgtcttagagtccgtgctgcagctggctacacatctgtagcatgctgctcttctctctcttcttttatttttttaatatataagtttattgctggcttatagtctactattgtatctgctcttagttgggggaaatttttgggtttggtagtcacatcgaatatacagacacatatttgaaatattaaacgtagtttaataacaaaataaattcagattccgccagaaaactgcgagacgaatttattaagcctaattaatctgtcattagtaaatatttactgtcgcactacattgtcgaatcatgtcgcaattaggcttaaaagattcatctcgcaatttacatgcaatctgtgcaataagtttaatgactacatttaatactccatacatgtgtccaaacattcgatgtgacagcgtgaaaatttttgttttggaactaaacagggcctaactagatttttttttgaaaggagggcaaaagctttgcctcgtatattaatagaggagcaggaaaacaagagaaaatatgtacagggtcagccaaaagccaacccgcaaacggaaaaagttgtctcccaaaattccaaactcctgtagctttgttgctctggctttaacccaggctctcccttcctcttttatttttgctataactgaggcaggggtggaggctgtgctccgaaagattcttgcattacgctccccccaaatctcccaggacacaagcatcagcagagttcgcagaggggctcgtggagtattaggggattcagcaataaggttccaccaaagtttgacggaggggcagtcattccatttactcaattggaggtcagtttgtgtccattgttggatttcggcccagattctcttagtgactctacatttggccagtaggtgcagggctgactcatccgttacacagcacagggggtagatcttttgattttgccagcctcttttccccaatctatccgccgtccaaagtctgttctgggtagcaagccaagagaagaatttgcattttggcggcgcccatgctttccagattgattggtagaagcagatcttgccgctcccatgaattgcagcctatatgccgatcttgttgagtatttcccattcgccgttagattccaacgaatgctatcttgttcttcattcaacggggcattcttctaaccatggaccatagatggacaaactggcgtaagtgctccgcttctgtaatgcggaggatgtcgatatcttggatccaattattattctatatggcgtcatgcaccgttctattcttccgtttagaggctaagaaaatgttgggtgcaattttctggggcatctgattttccagccatctcgaatcccagaatcgcgccgttttgccgttgccaactgttatggttgttgccgccgagaagagttctttatcttgaaggctacaaggaactgacatccccacccacggtttgtcaggggctacccattcgttccaaagccatcttaggcgtaaggcggacgtgaaacgctgtagatccattactcccaggccacctagatcttttggccgacatacccttttccagttgactttgcatttgccgtcggaaatactttcacccccagcccagaggaacttcctcctgattttgtcaatgtccttgagggtatcatcgggtagtttcagagatgttaagtggtagattggttgtgccgtgaggactgacttcgttaagcagatcctagcagcagatgacattagcctcccttgccagggggctagtctggactggcacttgtctatcagcggctgaatgtggacctttttcaatctacctaccactaggggtagcccgaggtatttcattgggaagttgtcaaagctgccgggaagatgctcgtgacatcagtaaggtcaatgttcccacaacgaatgggggcaatctggcttttgctcatgtttgttcgaagacctgaaactcctccgaaagctcgcaatatttctgttagattcgtcatatcttgtacactagggtttacaaagatggccgcatcatcagcataaagggaggttctgaatcttggtgctctgccgcgcaaagtagaaagtagcccaaggtttgttgctttctccagtaggtgatggaaagggtcaatggccagaataaagagcaagggcgacagaggatctccttgtctgagtcctctaccatgctttattggaattcctgggcaaccattaagaagagcccttgacgttgaggagattagcagatttgtgatccagtttgtccatctggttgtgaatcctcttcgttgaagaaggtcaatgaggtagtcccatctaaccgaatcaaaagccttggagatgtctaatttgagcagcaacgctggtgttcttgtttggtggaattttcttgccagattccgaacgtacataaagttatcgtgaatgctcctttttttaatgaaagcactctgagcctggcttatcaaggagcccatgtggggttggaggcgaagagcaagaacttttgagattagctttccgatgccatgaatgaggctgattggcctgaagtcgcctatgccttcagctccttccttttttgggacaagcaccacattagccgagttcagaatctgaaggttgttgcttcgcaattggtcgaaggagtgaattactaacatgatgtcctctttgatcgtgccccatcaagctttatagaaggctcctgtgaaatcatccggcccaggtgctttatccccaggcaattgttttaaggcagcaagcacctcctcttcggtgatgggcccgttaatcattgccaagtctacaggtggcaactgcagggcatcccaatcgaagtctaccaggcatggtggcgggcgcgctagaaaagcttcgaagtgatctttaatgatggcgctttttcctcatgcttgaatttccaaatattccccacgcggagccgttgaataaatttttttctccttcgccattcattttaaggtggaaatatttcgtgtttgcatcgccttctttgagattggtgatccttgaagcttgccttttgcgagctctttcaattatagacagtcccatgactctgtccttgaggccccgtcttaggttgagctcagcttgactgagttgtcttgactcttgtgctatatctaactgaaggatgacctcgagggccatgtggaggtgcatctttccttgggagatgagatttctgctccaagctttcagtctaccagctgttgcgcccagcttgtggtagagtctgtgatgaacttcatgatatggagggctcacagcccatgcttgagcaacgatctcctggaaacctggaaggtgaatccagtagttctgaaaacggaaggttctagcgcgcggcgcgtctccttgtcccgataataagagggggcgtgatctgagagcgaagtcgagagcacatggaggaggtgcttctcaaaggcggtatcctaatttgggctacaaaagaaacgatcaagtttgaccagagtcgggttatcttgctcattgctccaggtatatcgacgattttgtagtgtgatctccttgagctcgcaagcgttgagggtttctttaaatattctcaattgtcgcaggttaaggttggcattgtttttatctgaggccttgtaaattatattgaagtcccccactaggagccacttggagtcgtttctaggcttggtgtctcgcaattcttgtaaaaaggcttgtttcgctctatctcttgtgggcccgtataccacggtaaggaggaaagtggtttgacactcttttaggagaacagtggcagtgagggagaaggtgcctaggacgaagttagagaggtcgacggtgtcttcattccagagtaccagtatacctccacgtgttccaaaaggccttgtagctggcttataattgtaagaccgtaggtagctcccaccgagagatccaacaatagctacatcaatattactcatttttgtctcttgcaagtaggcgatgtggggcttccccgtttgcagcgtttctctaaccgttgctcttctacccggtctatttaacccatgaacattccatgtcatgatgtcaactataggggtatgacataattagcaa

SEQ ID NO: 18705 - DNA, 2145 bp, Oryza sativa
cagccccgcagcaaccgttcttcggcagcacatcagagaatcagctttgtcgcacgagtgggaagagggcacgaagaaggtgcggaaatgcggcaccgaagaatcgctagtgggggtagagccacggaattgctgcggaatagggatgtttccccgaatcgaagtgccgtcgctcaggacattcacgcgtgtccattcgtcacgccactacaaagctagcaaatatgaaagatacatggagatatcaatctcctggacatggagcgcagctcccagatcatgtcgccgccgccagttcctccctatagcaggcgtccgtcggccccaggtacttcgcgagcaccgcgtccgccgcctttgcatcctccctattcagaccgaacagctgctcgagggcatcgatggtgtcttgcggcagtggtgcgttgaacatggctttgaagtcagccactactttgtcggtgagagttccttcctccggcgtcaaccccattcggcggcacaggttcagctgtgccttcaaccccgacggcaggccgaccgttggttgctgggctagtcttgaactcctgtgcctgtcctgtcgtggcatgggtggaggcggcgtctgcaggttcacgtcggcacactgcaacggtggcgagggaaggattgaggggtgtggagatttgaagaggacacatggcatcgccggaggtacctgagggaagtcgactgccgaggtagagagcatcggcgtgtgtatcgccgcctcaggttgcacagtgggccccagtgttgcttgcagatcgtcgaccgggtcatttgcagcagcctgtcgcgctggttcagcttgctcggcatttgcaggatcatcaagagcgagggtgtccgtcggcgccacggggctggcagcagcaaaaggagtgacgacaccccctggcgcaacaatggttgctggcgctgacagcttgtcaatggcaatcgcaacccagccgccaggacgagctggcatagggccccttccgcagaggccactgagatggcctcttgtatgcgcgagaagaccctcgccgcgggattgtagctccccaaccagcggaccgggcttcattcccgaacccacggagcagaggcagaggggagagcgatcttggtggctggaattcccccgccatggcaaggccaggagagatgtcgttgtcgcggtcgccacccccgagatgccaggctcctcgcagatgtcgtcctgtctacggcgcccatcacgccgatcattgccgccacggtcacgagctcttggcgaacgcgtgcgctcccgtcggaagtgaacatcaggctcccgcagcccgccgcgtccttgcgcaacgtcacggccatggccgcgctcctcatcgtcatcatcatctcgccgccacccagggccgtgaccggcgccggggtggtcattgttgtatcttcccctgcgttcccggcgtctgtcagcgttgcgccgcacatcccggtcatcacggcgtccatcatggtcctctcgacgcctatcacgatccccgtcgtgctgacgccatccgccatccctggcggcagcttcccttgccgtcctgcttccttggtcgtgtggctccctcgcgagaccggcattgtcctctacgccctccgcccgcccctggcggaaagcataggtcgtcggcgttggggggtggtgagggaagttctcgaagaggcacggcggagcccgttgtccatcaagaacgcccagatgccacggagggagcgtacgtgtcgctagcctgcatgacttcggattgcggaggtccaccgccgccgccgtgtagtcgtgaatctcttcaatatggaacaacaccgggtgcttgacgccttgctgccagtgctccggtggcgtctccgagatggtgactgactcaagtagggggtcacgggtttgacgcgtgattgtcacccacacgcgcttgtcgatgcggctcgggtttggcatccaagcccatagggagatcaccctcgtgtcgccagcgtccacagggtggacgaggtccgtctccactgactccagagtgcaggtcctgctgatgatgcgctcggcgatgtccggcgcccacaggtgcattggcacgccatcgagacagagcttcactctgtacatgaggg

SEQ ID NO: 18706 - DNA, 3369 bp, Oryza sativa
atcaaagcaaaaggtttgaacatgagaaacttgaaaaaagaggaactctcccactcaccgcgagaagaaataacctttgctgcgccagtagaactagggatgatgttctgactagcaccccgtcctcccctccaatctttcattgaaggaccgtcgacagtcttttgggtggctgaacaaataaaatcatttgattcaataacaatgctacttttataagcttttagatgagaagagcagtaaatcctgtgtgtgcaaatcgaaaagtataaaagaggagaaaacctgttgtagcatggacagttgtcatgaggccctcagctatgccaaattcctcgtggacaatctgaaaagtacaaaccatgatacaaaccagtatggtggcatggtgctacattttgtaacagcgaaatgtacttatcatctgaagtcaagaaccgatcaaagtagacacaacatactccatgtgtatccttaacaaagaaaggatacaacagaacagaaaaataccttggcaaggggcgcaagacagttggtagtacaacttgcattagagacaacattcatgctggggttgtaattcttctcatttactccgactacaaacataggagcatctgcggatggagcagatatcactactttccttgcaccaccctatataagccagatggaatctcagcattttttgcatgtgaatggcttagtttattttctgattggccagaggggttgtgtaaatgcagaggcaaacctttaagtgtgctgatgctttctcagttgttgtaaaaacaccagatgattcaacaacatattcagctccaaagtttccccaaggaatatctgagggatctctgaaatggaaaggagaagcaccaacaaataattttagcaaaactaaagcacgtgggagaattattacaacccaaaactatataacaagaatataaggagtcaagtatgtcaaaagtacaatttttaaacaaaaccgtggattcaaccagacctgaagaattcatgttcttaccttttgcttgtaactgaaattttcttcccattaatctccaaggttgactcatccacaacctttatggtgcctttaaatggaccatgtgtcgaatcatacttgaacatataagcctagaacaagaagaatatcacgatcaaagaacttgaaatagtctaaatgaaacatatgaagttgtagcactcaatacagttatgttcaaaaacagtttagtaaaggtgaacctgtcaattttctcattaagaataattatggttatctgaaattaacaaaatagtaaaaaaaaaaaagtgaatagcatgggttgggttcgtgttctcatgcaagacacacctccagcatgtaaaggaccttatataggaatgccttttctctttaagatcttatgtcagataatgataaacaaagcatgtttactaagttaagaagagctaaagagtacttaggcatattatcatattagagtaacaagcatttctactcaacatgtttacactgttatttgtagaaataatataaagatacattgaacatcatcggttccactgcaacaggacgtaatacatactgtgcttttccaaaatctatcaacagaacttaccatgtacttagcatcgataaaaggatcattaacagccacaacttcaatgtcatctctattagttgcaattcgtagaaccaacctcccaatccgtccaaatcctgcaataacaagaataaagagttcctttacaaccaaagactaaataaagatcaaaagtaatttaaggtcacctacagaagcaatgaagttgaacaagggttcacttcaacgttccaagttgagttagcatagcgcaacttccaaatagtaatcatacattacaacaacttgataatgtcattatttttccaatctacaggaggaactcaccattgatgccaacctttgtcttctccgtgctagaagattctacataaagaagaaaaaaaaataatcataacaccactgcagtcctcataaaccccttttagtgtttgatggatggagcaacttacgatgggtggcaaggggtgcttgtgtagcagttgctctcaccggctcaacgctgctagcactgcagtagaaaagcagttattgaaaatgcaatgtgctacagctaatactgatcaaccgtatccatgatatgcacagagcaaaaaccacaaaaacacaagttgagaaaacgaggggtcaagtccgttttgctctcagaaattttccgctctaaccaacagctgtgctctcggttgtcaaattttgttattcaaggaattcgaataatctggatgatggaggcactcacagtgaagacgaagccccaacggaaggaaaaccgcaggtaaccttgctcctaacgcacgacacctgcaacacagcagcaacatcgatcaatttggtggaaatttagcaagtttcaatctgcgaaatcatggctaaacaaacgcgaacgaatctcaactgaactcggaaaatcaagcgaaatacaagcaattaaagtgggaaacagctgagtgttcactacaatactccattactcctacacatagaaacaaaaacatcgccatacgaacaacagtttcatgcgcatgagttggcagctgtcagtcacacgaaacaggaacaggttctcaccgaagagaccaaaaaaaatcagagagggagagagatcgggatggcgaatggggaccttgacggggtcggcggcgcgtgatccgccgccgctgccggtgccggcgatggccggggtggcggaagcgcggagggggacggcgagcgacgccatgcaggtgcggcggcgctggaaacttggcttcctctaaggaaggcggcggaatggaggcgggggcggaggagacggcgagcggagttgtgcggcggcgggggtcgtcgtcggcggcgtggttccgtgatgcgtctcccggtatctcggcctcgggcggagttgtttatggctttattattacttgtaggttttttttctttctgtgcctcttttgttttatcgcctcatcttttaacttatacttatacttataaacataagctacaattaaaatttttaatcttaaatttaaatttaaagttgattttagaattttttttaatttccatcctagtttatttttcagcttaaacttttaatcttttagatttttagattgttaataacatgtatataaaaattttatttacaaactattttctatttgtaaatatgttatttcacaaaactatggagtccttagtttgttctctctttacatttgaaaaacgtgtgaaaatatttttattgaggattgactccgataatcatttacag

SEQ ID NO: 18707 - DNA, 649 bp, Oryza sativa
gtatacgggcgcacatttaaattattaaacgtaaactaataacaaaacaaattacagactccgcctgtaaactacgagacaaatcgaagcctaattagtccgttattagcaaatgtttactgtagcactacattatcaaatcatggcgtaattaggctcaaaagattcgtctcgcaatttacattcaaactgtgcagttggttttttcgtccacatttaatgctccatgcatgtgtccaaacatttgatgtgactgttgatgcgaaaaacacacactggcctaggagatctgcttaactccagtgcaggtccaaaggttactgagatgtaggcgtgccagtcagtttgaccctacaactgacaagatatgcaaatagtagatcaataagccgatcggctgacaagccgatgttgtagttccagccgatgccgataccagccgatagccgatgctagccgatagcgatagggttctgagctatcggctttatgtccaatgtatagtctgacacttgtctttaataatgatatacaggcaatcgactgatgataatatagtataacaataatataatccagtataaaccaatcggctagcaatacaatatgatagaataagcattgatccgaaggttaaagcataaatcag

SEQ ID NO: 18708 - DNA, 4330 bp, Oryza sativa
  unsure (1)..(4330): unsure at all n locations
atatatatatatatatatatatatatatatatatatatatatatatatatatatatagtttttgggaagtgtacacataggtagcgagcaaacctaattaacccccattacagcaagtacaaaattggtagccaatcttttggggtccctgcacaggggcccccacaaagtccgtgcctacctagtcttgtaacagggaggagtttgcaagcttagctggttctctcctctctcaaatctcgtcaaaacactgcttgccctaaagatggtgaccctagccagccaaaggccacaccatcatccatcaccacaaccacacacacactctctttctctctctacaatgctactaataatcataaggggattacaattaagataggtaatgagagcaactaattatataatagtagggggaggtgttcatgattatctgtactagcgatcgaaacacggtttacgcgtacgtgacgatctgatgatgatcacgcgagaggcgacctgtgtggggcgcccttcctcctgttgttcagtgacagcacgatctgggggaagaacccgccgccgccgccgctcttcttcttcctcgggacatcggccgtcgttggcgccggcgacgtgctccggccgttgttgctggagccgccgccgccgtagtactggtggtggtggtggtggagggggtcttcgaggatggagttgggtgtggtcacctggtggtcgtcgtcgtcgtcggagaggccgncgccgccgccgccgccgccgtcgacgcggaggttctcgaagcgcgggaagccggcggcgaggtctggctcgccggaggagccgccggacatgtaaaggatgttggagaggtcgccgccctgcatcatcacgtgatccacctgcatgccaatgcatgcacaatttatttaacgacacacagtggttgtagttagtagctcactctcacatctctcgtgacaaaatttttcaccggtcacattgaactcaaatgtgttgatacatacacagagtattaaatatagaaaaaaaaactaattacacagattacgtgaaaattatgagacaaatcttttaatactaattgctccatgatccaacaatgtggtactacaataaacatttgctaataacaaattaattaggcttaataaattcgtctcgcagtttacatgcacaatttataatttgttttgttattagtctacgtttgatacttcagatacatgtccgtacatctacgatgtgacacgctaaaactagtcatcctagatctaaacccaaccttattatcattagagttgtgtgtcgttaattaatatttctcaatcgatcgccaattcgccatgacagtaaaaaaattttctggaagatgtgtacagtggctatactacactactgtaccttgcaagagaggcagcagaaatggaagggctcctgcaggatcctgtcacatgtcaagcagatgttgccagagcccttgaacggcctcgactgaggccttggcttcagaaatatcacctttgcgctgttgatcgtgtatggctgaaatcaaattagaaccaacattaataattagctctacataatagtaaaactgaacagattagtttcagagtttttattgccgttcaatttacctgaacaaaggagcagtcgatgagcttgtcgagatcatccaggcgaacaacgtcgttgtacacatacctcctaacctatatacacgtataagcacttcaatgcacagtatacttatacgtacggtaccgtttaattctagtgctagtaaaagaatcttcggacccatcgtttgcaaacaaaaagtaatttgtgaatataacttttatatacgtgttttagacaatataaaagtaaagtttgaaaaataaacttcgatgaaaaaactctcaaaatcagctctaaatttaaggttaaaaatttaaattttagctgataagcataggccattattccattattccatccaaattcaaattttagatgagacccttctagaagttgtaattgttgatgaggtaaaaaaaaattccattattccatccggacgctgagccaggcagggaaaggatagactcccccggtaataattgcgagcctttgaccggcggctcgtcgtcatccacatcgtgggagggagaaacaaaccctaatttaccataccacccctacaccttccacttctctcggtcacacaacccgaggtcacaaatgtaaaaaaaaaaacacctccaaattaaccccatgacactgtaaaaaacagatagagagtgtgtgttactgcctgaacgaatgaacagtatcgtcacggcgaccttggattatacagagccggagcaacagtattggggccttgtttggtaggaggacagggtcttttaccaagcacacatatggtaaaaaaaaaaacagagacactgctacttttttttttactgcatctcgccatggcttctctgtggtctgtagcctgtagtttctgtcactgtgactactgcagctgcgatcttaacagctctggctttgctgagacgatggatggatcgtagctagtatggctagatagacacaggattgcccatccatttatcaaccaaccggcaccgtctatctttgcagggatagagatcaagatcggcatgctttgctattcatggctaaacaatccggataacccaacccatttttgtgctaatagatcaatcttgctcactgctgcagtttggatgtatttaagaattagagcttttgtagttgcaccagactctctctggaaacacacaaattttataaaagtttgacaaaaagaagtggttcattttatgtggtgatcagaagtttttactggttaattataatggagagcaggacacaagggctattgtttgtttaccgctgtcaaaaagagagatggccttttttcatcagaggtgatgactgtgtgtgctggcctttgctgctgctgctgctgctgcaaaatgtaacttttgcaggtggtgaggtgaacagaagagaagagagagcaatgcattgcatatgctttgcacaccggaatggggaagatgtaagatgggactaggcttaattataagactatggttatttcaggcgtatgggactgaggctcgcagtaacttcttgccagagagagactcatttttcacccttcttcccaatttttaaccactccacatttttacttactcatggccccccacccagcagccaaggacagaaaaaaaattagtttggccaaaaaaaatacgccaaaaatttaggggggtttacaccagtgtaaaagaataatggtgtgatttaggtgactaatcagggtgattaaccgaggggtcactttgcaaggagcacaaaacgaaggccggaaaacgacaaggggaagacgaaagatgggcacagggttctaaaagggtcgagagctatagctgcaagtggttaagtgagacaccccatgcgatgcagcttaagcccaagcaccgccgcaattaagcccaaccaaatctaaccaaattatgctagaaatactactgctactagtactcctagtggcacactagcatggtcgctgatgagaggcaattagcaatctttcctctgaaaatgacacaattagcatgtcatggcacatggaagaatcaacaagatcctctagctgcccacatctactggtactagtagaagcaaatcttggaataagccaagacggaaaggctagtgaattaggccaaagctagtgcttttttgttaagtacaagctagtagctgctatacatgcaaaagctaaaatcctagcccacacccccacaaatccactcaattcagcacactgtagcacacccccaacgatttcaaagcagataaataaacttgtaattgaagaatttcaacagactaacacactctcacatcacatgcataatctgaaattctgaatacagttaagatactgcaattaattaacgaagaagatagacatgcatcatatgatgcatgtagctagagatatatgcagtgtatcgaggacatgcatggcatggcaattgggtcgccggcgccggcgccggcgacgaagacggcggattgattacctggaggagagggtggtggcggtgggagggggcgcagtgggggcagatgctggcgcagcagccgaggcagaagatgttcttctcgttcttcttgcggctctcgtgggcgggacacccaacgaagaagctctcctccacgagcccccctacccatccaggcctcatccccatcaaccccttcgtcttcctccaatcctcctcccaat

SEQ ID NO: 18709 - DNA, 1424 bp, Oryza sativa
ttccgtgtggccggaatgtaaacgcgatccccgaggtggatactgacagcgacgtccgccttcttcaaaccgggcacgtgccacgacgacgccctatccaccacactatccacacacacaaaaccgcattactactcgatcgccggcgtcgcggcgccatccgccgcatgcatgcacacgccgccgcagcttcaccggaagcttcgcctcgaccaccaccaccaccaccaccggcccagctcccccgccgccgccgccttcacatgccgcgcgatggcgacatgcgcgcgcgttgcgtacgtgcgggctcgcgccacgaagtcgacggcgagcgcccgatatttcctcgcggaattaatcatcccgcgccgtgcgcgccgtgacccaacgccaacgccgccgccgccccgccgtaccggagcacggtggctgtccacgtggcaccccgcgcggggcccacccaccacctcctctccgcgacgtttcgaggaaggtgaggggtgaggaggcggcggccgctgtcacgggatcggggacgtattcgagacggcgacggtgtcaacgatcctcagccgttgatgtcatgatcggacggctgagatcgtctcccggttcggttggccgtttgaccggtcgccgcgtcgctataaataccgtttcgtttccaccgtttttactccgatattttgcaattcgcgacgcgatccgtctctcgctcgatcgccatggcggccatgagtgacactggctcgagcttggcgcagtgggccgagctgtaccacgacgcgtcggctgctcacggcggcgtggtggcgaacggtgcggcggcggcggcgacgagcccggcgtcgccggcgggatcgacaggcgggagcccgacgcgggcgccgggggtggaggggccgcgcgtggggaagccggcgaggaggcggtccagggcgtcgcggcgcgcgcccgtgacgctgctcaacacggacaccaccaacttccgcgccatggtgcagcagttcaccggcatcccggcgccgcccgcgggcgcgttcgcggggcccggcggcgttccggtcatcaacttcggctccgactacggcttcaccggcgccgtccttcccttctccgaccacctccaaccgcgccggccgacgttccaggaccaccaacagctcctccgaccgcagcagcagtacaccggcgcaccgttcggttacggcaacctgcagcaagccggcggcgccggcaccggcgccggcgacatgttcagccacgcgctgagctcggccgaggacaggttgctcctgcagagcctccagtcagctcagatgcctacttccgccgctaaccacagcgctaatggttacttcgcctaattaaccaacggttaatcgaagacacatcacaagcaaagaagattcatggaccagttg

SEQ ID NO: 18710 - DNA, 5168 bp, Oryza sativa
tgtaaatgcgatgtttgtggcgcgacgtgtactagcgtggggttttttgtcgacggatttgattggtcggcgggggctgacgggtgggtcccacgacatttcggggtgtgcgtgtgacgtgggcgtgaagtcatggtggtgacgaggcagggtcaaagtcagagttgtcatgctgctttatttagctactgttctgcttttggggagcgaggctcagaaaactaatttctgaagcttctactaatcgtcaagatgagcacgggtagtttggacgattagtgagacacccatggtataccgccatgtaccattcctctatacttctgtatatgtctagatttattaatatctatataaatatagacaatgctagaaagttttataatatgaaacagaggaagtataacaaaaaaaatttccacacaatattttactacctccgccccaaaataaacgcagtcgtggatatccgtgtccaacgtttgactgtccgttttatttaaaaaatttataaaaagttaaaaaaatagttacgtataaagtattatttatattttatcatctaatgacaaaaaaatactaatcacaaaatattttcaaataagacgaacggtcaaacgttggagatgaacagtgtaaaactgtacttattttaggatggagggattagtaaatttgtagtttagtgcctaactatcaccgagtcaaaggctcatagcattgtggtggttggcggcggcacatgtggatccacagtggttggaggcgcctcgtcgtgatgaaggataacgaggaatgggatcgagcggcgaaagcacctaaagttgttccactgtacgctaagaatttacaggttacttattactagcaggatatattacgagtgtattttactgtaaaagttctcttgaaaatgctgaagcttttactaatcatcaagatgagcacggctaactaggtattaagttttaataaaattatgacagggctttataaagatgacctggaactggaatccttgatgcggctatgtgtttctacttaggaaaatattcagaaccatgatttgtacagccaccggttggaagttcaaaactgcatgtgagctattatgctgaaaatatacaaacatatatgggctggtgttagtgagctgctagtgaagcctgtgaagtgaatttgtgattctgcaattcccaagttcttgttgtcttgttgatctacttctatggtgctaatttaattctcatacaacttgtggagtcatttcggtcatcactcatctgtcaaaaactgataaactgtttgtgaccagcaccaacttgttctaccagcaaagtttggtgaagagccatatagcagataggaaaccaacccctaatattcagaaatttagaatgcctgagccggccgtgtgccgtgaggcatctaccggggtaattcagtgcgaaattaagatcttggtgtcagatgttttggatgcataaatctggatacgtttaaacttgggcagattagtgttcaatgagtttctgtctgctggctggcctgacaagttttaacaatgctataggtcaattgtagttactcctgccttagatcgatacgatattggagttgccaatactcccagttgtttaccaaacaagcagtgtaatcttcacgcagaggtgcaaccagagagttgatcaagcatattgacaaagcacacttcagtgaacggaaaccctgtgaatttactgcaaattcagtcaacagcttaaacctctctctctaaaaaaagttttaaagctctgaaagtctgaattactgatcacgtgatcatgtgagatcatgtgaaaatatatttgtttcagaaatgaaggttgaaaaaccaactctcttttccgtgcctgtacaaaaacattttcagatttcaggaccctctcttcctcctttgttaaagcatgtattgtttatgtagttacaccatttatcttggaagtgatgtttacagcggccaaatatattccagttttgcatatgcttagattttaaagattcaaattgaaggaattattctcacaattgtgtcgattatatgttgatctcgggcaagtgaatactagtgtgatctccttatcagtcaattcgcctcctttttcaagaaaggtaagaacagattcttctcgtgcaagttgtgctgttgctttggttccaatacttgtatagctatgaccagtattcataccttttcgtacttgatacgtcctgctgatgaaacaccggtgtcactctatcagaacagtattcaggttatagaatttttttgatgtgtccaattgtccatcatgaatctaaagctccattcaaaacagactattggacggatcgttgctatgaattatctactcaattataagaataaattaaataatttaaaacatgtggtctaaataatatagttaaaggaatatattttttagaaaatgtgtttttcaaattatggagcaataatttgtttcaacaatcagatggataatctgaaaataagatgcatatgtacttaggggtgtgtttcccatttcctacttctcgtttttttacgcccatatgtttcccaactgataaatggtgtgtgcttttttaaaaaaaaatctataggaaagttgttttaaaaattatattaatctattttaaggttttttttctaatatttaattaatatgcgtaaatacatgtttcgttttgtgtacctgaaaggaggatttccaacccttactctcaaacacagccttaaaagcctacaaatgtatgagcatattggcactaaaatttgtttcgatcactttgcttactgctatagctctagctcttcagttgtcaccttttgttttctccttgtctttctctgcgatgtcgtggttgctccactctcttctcctcttctccttgcctgtctgatcgatcgcctcgccaccgccgccgccaccgccgccgtcgtcgtcgtcgtcgtcgtatcggcatggaggtgtcccacatggccaactgcagcaacgtctcctcaccggagcagcagccgatgccgccgtcttcggcagcggcgtcgtcgccgtcgccgccgcagcttgactacgacgtggtggtgatcctggcggcgatgctgtgcgcgctggtgtgcgcgctggggctcaactcgatgctccagtgcgtggtgcggtgcacccggcgcgccgtggcggaccccgtcggctgggtggagcaccgccgcgccggcgcggggctcaagcgcgaggacgtcgtggcgctgcccgtcgccacgtacgtcgcctcgccggcgccctccgtcgccggctgcgccatctgcctgtcggacttcgccgacggggagagggtccggctgctcccggcgtgcggccaccggttccacgtcgtgtgcatcgacaggtggctcctggcgcactgctcctgcccgacgtgccgccgccgcccctcgccagaggccgacggccacggcgccgtcgtcggagaagaccaccaccatcgcctgcaagttttgactgctgcttaattgatcggctaaactttttttactatagattatgagcgtgacctatatatgctcattatccggtaaataacttgtataatggctgatgattttacttcgccatcttgagtgagtagttattattttcgtctatccaggaaaatcatcctgaatgacagttgcttttatgtatgagcatcccttgttagttgttactgcataataatgcaaagctaatcattaaaactggcaatgggtctacagtatttgcccttttttttaaaggaaacaactcagaacgcatactcacacaccacaatcacatcacaacacacgaacacacacgtgtgcgtatccctaacacacgctaggattgagaatggaggcactaggcctcaatgcacgggaaacgtgcagtcccactgaacgcacatgcgtgtgtaccctattttctagttgagactgccccgaaggacagtcccgaagaaaatacgggaaaaacccgtcgaggtgaggccccgcgagtcgaattcacgaccgactattcgcaccacagcgaacatgccaaccgagctaagctcgatccttagtattcaaaattttcaaaagacctaaaaaaatacacaatcgactgcactaccactccctattttctagtcgagactgccctgaaggacagtcccaaagaaaagactggaaaaacccgtcgaggtgaggccccgcgagtcgaattcacgaccagccgttcgcaccacagcgaacttgccaaccgagctaagctcggtcctcagtatttgtagtttttttttggcgaggaacagtatttatagttaactactccctctgttttaggttataagacattttgactttaatcaaagtcaaactgctttaagtttgactaagttttaacattttcaacccaagacaaatttattataaaaatatattcaatgattgatttaatgaaactaatttggtattataaatattattatatttgtctataaagttagtcaaacttgaagtaatttgacttttactgaagtcaaaacgtcttataacctaaaactctaagagatgtactgttcacttacttcatcaatcaaaatttccaaaataccataaaaaagcacaatcgacggcattaccactccatccctaaaagaataaacatcttactataaatatttttatgagctatgggaactcaagatttttttttcgataatgaaaatcgatctagcctcataggaccgggagatatgaacagactggcgatgttcgtttcactaaaaatggaaatgaagttagggcacgataaatgataaagtcattagaatgtgattaattgagtttcatattgtcaattgttacaaacttgaaaaataaatttatcagatattttaaaataacttttatatagaaagcttttacacaaaatataccgtttatcaatttgaatagcgtgttaacaaaaactaagataaaatctttatcttaaccagcaaagaacagggccattgtacagttaggaaaaatacaacaggcaggtctcacgactctcgtcattgcatagagacgacacaaaaaaaaggagggggaaaaatgaagtgattcccacggtttatctggaggg

SEQ ID NO: 18711 - DNA, 829 bp, Oryza sativa
ccttctcttcctacatactagggcatctgctgttatcaatggcatcagggcttagcgttgacgagagccatgtgcccgatcaaatccaagacccggttgctggagcaaagaaacaaaatcttcaggtcagataaagatagatggaaaaaatacatgcaaggcaccatttggaacacacgagttgcgtatgaaacattcagtttctgcagtaatcaggaaaacgaataggttctgaaaagggctggctaaggcgttatgccattaagtggatgctcacctgtagccccactcgttgtcgtaccaagagacgagcttcatgaaagaagaacttaagccaattccagccttggcatcaaatatgctagacctggaaaatatagataggctttagcaatttttgctcctatgttcaagaaaaacattgcgaagacgaaaatacttacctggtgtcaccaatgaaatcattcgaaacgacgtcctcatctgtgtagcctaaaatacctttcaaagaaccttctgaggcttccctgggaacaaggaccaggacatggttaagtactatgttggattaacaactctccagtccaatcattcgaacaattgcagacaaatgatgacccaaatactaacaaaaaattgagaagttaagccagaaatgattagaaagcatagagcgagaaactgaacagaatataaacaccaacgaaaaaatgagtgcattaagcaatgaagcagcaactaaatgtgctaggacatgacaagaagattgaaggcatacttgatagctgctttcacatcctcataagaagcacttttctcaagacggcat

SEQ ID NO: 18712 - DNA, 671 bp, Oryza sativa
agtccctcgaacttgtcttccaatttgcgcacctcttgtcgatatgccatcatattgtcgtcaatgcaggaccactctttcataacttggttgacaaccaactgtgaatcgcctcgaacaatcagacgctttatccctagggaaattgcaatccgtagtccatgaaggagcgcctcatactcggcaacgttgtgggacgctgaaaaatgtatccaaagcacatagcttaatctttcaccagttggggaaatcaaaaccactcctgctccagtgcccgaaagtcgttttgatccgtcaaaatgcatggtccagtgctccatcttctccgtaggggtatcctcctggcactcggtccactcggcgacaaaatcagctaacgcttgggacttgattgaaattcggggcttgaatgatatgtccaaagacatcaactccaaagcccacttagcaatacgtccgtttgcttcgcggttgtgtagtatgtcaccgagtggaaatgatgtgaccaccgttaccgagtgaccttgaaagtagtgagatagcttcctggtagtaattagaataccatataacagcttctgaacctgagggtacctcgttttggagtcggctaggacctcgctgacaaaatagatcggtcgctggactttttggacatggccttcttcctc

SEQ ID NO: 18713 - DNA, 1786 bp, Oryza sativa
ggcaccactgcatcatatgtatactctgtttgtgcactcctatacggagcattcactgggtttcaccctcccatatattttgagacaagtgcaatgataattacatttgtgttgtttgggaagtatcttgaggtgcttgcaaaagggaaaacttctgatgctatcaagaagcttgtagaattggtccctgctactgctcttttgcttctgaaagacaaaggtatatggtaaaattttgtccttcaaaacatatacaattaagtcacagtgccacactcatcacattagttttagaagttatttctgacttgttttaggcaaccgcctgtgttttttttttcatttcatactatcaagttacacaaactcacattgttcttttcaaatgcagaaggaaaatatactgaggagagagaaattgatgcgctattagtccaacctggagacatcttaaaagtgcttcctggttcaaaggttcctgctgatggtgttgttgtgtggggaacaagccatgtcaatgaaagtatgataactggtgaatctgcaccaattcccaaagaagtatctagtgcagtaatcggagggacaatgaacttgcatggtgtccttcatatacaagcaaacaaagtaggatccgagacagttctgagtcagatcatatctctggttgaaactgctcagatgtccaaagcccccattcagaaatttgctgattatgtgagtaacctcccatattcttttctgtgatgtccttcatttgctttgtctgtacttattttaagtgtttaccgtgtactttacatattaactttaaaagcgtcagagcattttttgtgatctatttactatttccgatacttgagaatgttgcaggcaaatgttgtttgtttatgagaatttgattgttcatatgccctcttttaacatcatcattcttatgttgctttctacttctgatgtaaaaagttgtaacttgtttaatctcaaaacattttggctgcttaggagtaccttccagtccaaagtttttccctgtgttaactttagtctttgaccttctatgctttcttaatacaaacatacatgtcttttgtatattcgtgaaaaatttaacagaactcttggaagaatagactagtttcttttatctgtgaaaagctcttgtgtctcctaaatgtgcggtaatgattatagaggcctgttatggggaatgctgacactgcctacattttgctttcaggttgctagcatttttgttccaattgtcatcaccttgtccatgattacattccttgtatggtaattcaacatatactaacacaatttttgagtgatactatgtttgaaacttcaatttttctgacatgtacattggctgctttgtaggtttttatgtggatgggtgggagcatacccaaattcatggatttctggaactagcaactgctttgttttctctctcatgtttgcaatagctgtagttgtgattgcttgcccttgcgcccttggtctggcaacacctactgctgtgatggtggcaactggagttggagctaatcatggagtacttgtgaaggggggagatgcattagagagggctcaaaatgtaaattacgtgatttttgacaaaacaggcacactaacacaaggaaaagcagttgtgacaacagcgaaggttttctcaggatggatcttggggatttcctcacattagtagcatctgcagaggtgaggttgaacttaagttgcttgtatggttcatatcaagctgtagtaaatgtgtttc

SEQ ID NO: 18714 - DNA, 1864 bp, Oryza sativa
ttttacggtctacaaaacacatttataataagagtctgctgcattaaagagaggaaagttcaaattgtcagttggcagtaccttcaacctccttcaaggctgagtccctttgcgcagctagttctactttgtctcttttcaaggcttcaatctgtttctccatttgagccatcctggtagcttgcgctgtttgaaatccaaatgtttgaggatacagctatgacagcataaattaatgggacagatctagaagattaccttttgatgaaccacttagctcgaagtttgaatcctggagctgggcaattcggtcccttaactccttctctgtctttttggcgtactccttggcctcatgcagctggtccctaactgcttcaagagttcccaaatgaggaaccagcttttccaaagttgtagtcttggcctcattgcgaagatggattctctgcatgatggatcatggttcagttctgctaaagagagaacaaagttattaaaggcagtcacccggaagatttacattcacaatgcgagtggcttctccaagtgctttcttcagctggcacacttcctcatcttctttttgacgatttatgacgatgccggcaacttgcgaattctcgtcccaccatttgagtaagataggaggacgggaatcatcagccgcctttatgcgaggaattgtttcttcgtcgtcgcctagtgttcctgatgtatttccaagacattagacgagtaagctgaagttatttaaatcggcatcacttgagaagatgtgttacctgaggatgttcctggctgaacatgagggatttcttcatcgggacctacatccgactggtttccagtcgggggctcttgtgttgttgcggtttcagctgttgccgactggtctccagttggcggctggtcactcggatcggctttgtcatccgaagcatgggcgccagtcggctgactttcggcagtcggctggctttcggcagtcggctggttttcggcagacggctcagcgtctttggataaatttggctctgtcacagccggatcaggatcttttccagttggatctatgtcggatggtttcctgcaaagtgtcctttcgatattcagcgtaatttctatgagagaagcatatcaaagggagatggtaccgagaagtttatacctggaagatgttctaatctttggcatttgacggccagccagttttttcctgggcatggtatgctttgggagtttgttgggcgtgcccttgtccccagatttgttgctgtcatcgccctcgtcgtcattaagcaccagctttctcttgcgaggacctgtctgcccagccggtttggaggtctgaggttgtgggtctgacctgattgtcggccctccacttccctgaatggtgtgctggcgaggagatcggcgctgagcaattgggggatcagatttcatcaatacatattcctgaataagatgcctccatggttagttaactcaacatgaagacaagatactattttggtcataagttgaagatttcagatacatacctgcggaggcggattgaatgcattatatggtacaactggcagctgatgtgagtagctgacgacaatagcatttgagaagattttatacattctctccttcatgattttgaaatccagagagtctggttcttcgcgattaggatcatgcttgccgtcaaactcaaaagctgtacgggatctttctttaattggcgccagtcggcatttgatgaaatgccgagtgatctgctctccttgcaagcctcgttctttgagttttaacatgcgatccaacaattccaaggcttgggcagcttcatctccgattggaagagagt

SEQ ID NO: 18715 - DNA, 2516 bp, Oryza sativa
acacaattagcacatgtcattcgtcctattctaaattgtgctgacagagtcttttgtgcctttggctgagagatagcagtatctgggataatttctgcgtcaaatccggcatcttctatagcttctattatatcctcaacctgtataaacaagtacccaaataaaaattgcaggtagctaattgacccatataatctaaaaatgtgtgtcaacaatgaatagtaggtggccattaaaacaaactaaatgaatgcctattatgaacaggaggtagcagatagaacttgctggtaaatgtctacttaatagtcaggaaagccatccttaatagttccaacaaaagcaaaaggatgaaacacaacattccccgtctgcactacaataggctcatcaaaaagttgctagcgctacaactcaactaatattcacattaacagtcattaaaaccagaaactgtagagtacttcacaacataataaccataagcattaataaatttcaattgtgaagtacactgttattactatgataagactaaattttatcactgctgaaagtttatacacttgcatggtaattactgggcctagaataatgagattatatgcttgtcccaaaattagcatgtaacatcattttgcattcaattttgctcaaaggaaacttcaatgagtacttagaagccacataaattgggatccttaacttagcaccctttccccccgaaaacatgactcggctgctccctgcctcaccagccaatcaaacctatcgtagtacagcagttaccccatttctgccggtagcaacaaccaatcgcagcaaactgcagcctttttgagctcccaaatcccacaatccagagagtccagccacaatcacgagcttgcaacaaggttacagctcatcaaccgccaaagcaaaaggagcacaaaaactctggcctctgggcactgtgggctaaccacatttcacgaatcaactcatgaaaagtcgtcatcgcaaggtgaagtcaaaaagaaaaaaaaaatcatctccagctaaaacccaaaattgcaatatcatacacgattgactcggtctcacactcacacacatagtaattagtaaactcaacttattattagacaagagtaaattccgattcaccaacttctaaccgctcgagaaaaaccacgagcaagcagcgcgatccagcttcctagaatcctgttctaccgcaccaaccatcacctacgcaataattccagcgcaagaaaaaacttcaaaaaatttaccaccgcgtgagcgtcaacgagctcacgaatcccagtttgctcccggagacgcgcaaaactcggctcgacaaacgggctcagccacgcaaaaggatcacatcacaattgcaatcgcaatcgcgcggaaatcaccttgaggagcgccgggtcgaaacgacgtgggcgcggttctggagcagggacacggcgacgcgccgcacgccgcggcgggccgagacggcgccctcgacggcgctcgtgcacgccgagcacgtcattccggtgacccgcacgtgcgcctcctcctcctcccccgccgccgccgcggcggcgccgccccccatctcctcgtcgtacgagtccagcagccggacgtcctccatctcgtcccctcccccacccgccgccgccggccggccgccgccggcgaccgccgagagctgcaggtgggccatgcctgtcagagagagagagagtagccgcgcgaggtgggaatatttggtggaagagagagaggagacgaaacgatggagaatggggcgaggcggattatataaacggagagggaaaaaaaagttaaagcgcagggggcaaagtggaattattttgcattttttaggaggttatttgtaaattatggattagtcaaatgctcgaaattgttatctgtgcgtttagctgggagaggcaaatttcgccatatgaactttcccgtttttgacttcttctcagatggttcgaagaaaatctctctgaccgggttttcgaattctgaactttttggtagtactagtattactacctccgtcccaaattaagtacagccataagtttccgtgcccaactttaatcgtccgtcttatttaaaatttttttataattagcatttttgttgttataagatgataaaacctgaatagtactttactcgtgactaatttttttaattttttttaaaattttttaaataagacgaatgattaaagttgagcgcgaaaaactatggttgcagttattttaggacagagagagtacatgatatcaccgtgttggggaagccaatgttacggtctactatagcgtaactgctttcgtaattgtagtaagttaatgcttggttatatgtgagcttttgttgtgattattttgttctgacatttttggcttagaatatagtaggggctttgtttggttgaaattagcatgatttgggataagttgagctaaaccaacatgccctttacaaagtccaaaacaggg

SEQ ID NO: 18716 - DNA, 682 bp, Oryza sativa
ctgttgaggggtgcggaaaaccggtgtcccttcgacatcttgttggccgatgagatcacgcgctcggcgccctgcttccaaagctcgctgacgtcgatcctcagcctccttcgcgatccgctcacggtcctgctgctcacgccgtagccgttcttgttcttgtgcttgatgctcctcctccagtcggcgacgttcttcggtctcccgggcttggcgttgctcctccgtctcattattggccatgaaaacgccaaagtagagaggggtgtagttgtcatctaggcttccgtcgaagtcgtcgaagtcgtcgaagtcgttgtagcgagaactaaattcgtcgtactccacgatgtcagtaggacgtgagtcgacggtgggagagctgttgtagtcatccagttgatccgtcgaaaccgtgccgagtggttggaggatgacgccgacttccctgaagctaggcgaaatcggtgttgaagccgacttccgcctaggcctacgggatgaagacgctgtcgtggtgaagacggccgctaaatcgtcggggagcttcatcaggactggtgggtaagccccgtcatcttgatctggtgtcgttggagaagatgcgatctcggccgagtggtttgaagccgactcggttgagatggtcttgaagtagctttcagccgcgttcgggaatcca

SEQ ID NO: 18717 - DNA, 7882 bp, Oryza sativa
aaattgcaaagagggacgtacttggaacaaatttgtgatcaatggtgcatttgtttatagagctaaccgtctatgcattccagttggttccgttcgtcttttgttgatacaggaagcgcatggaggagggttgatgggacatttggagctaagaagatggaagatgttttggccttgcatttcttttgaccaaggatgagaaaagatgttgagaggttcgtggcacgttgcaccacttgtcagaaagctcagtctcgtttgaatccacatggtttgtatatgcctcttcctgtaccttctattccttgggcatatatttctatggactttattttgggattgcctagaactaagagggggagggatagcatttttgttgtggtgaatcgtttttctaagatggcacattttataccatgtcataaaagtgatgatgatgttcatattgctgatctgtttttgcatgagattgttcgcttgcatggtatgccttctactattgtttcagatcgtgatgcaaaattcttaagtcatttttggtgcacgctatggaacaagttgggtacaaagctattgttttctacaacatgtcaccgacaaacagatggacaaacggaggtaatcaaccgcactttgggtaccatgttgagggctattttgaagaaaaaattgatgatgtgggaagaatgtttgcctcatgtggagcttgcatagagtcgggcaacacattctactaccaagttaagtccttttcaggtagtgtatggtttcaaccctaatgctcctattgatattttgcctttacctactagtgagagggttcataatgatgctaaggcacgcgctgaatttattttgaaaatgcatgagtcaaccaagctcaacattgaaaagatgactgaaaagtatagaattgctgatagtaaaggtaggcaagaggttaagcttgaaccgggtggtttagtttggttgcacttgagaaaggatagatttccggaattgagaaagtctaagttgatgcctcgtgctgatggtccttttaaaattgttgagaagatgaatgataatgcatataaacttgagttgcctcccgagtttggggttagtcccacgtttaacatttcagatttgaagccatacttgggagaagaggatgagcttgagtcgaggatgacttcaattcaagagggggaggatgatgcgaacatcactacctcggatacacacatcaatcctccaacggtcattcaaggaccgataacaagtgctcgtgtgcgacaattaaatttagaggtgagctcgttcctatgttcttctttgtatgaattcgagaatagattgctacctaatgattatattgtgattaggaacaatggaggggacaaggtgtcgcaactgagaaaattaccttttcccgaacgctagtgtattaatccccgtcccaggaaaagccggggtacaccacacaaacatgatacaaaaggcacatctttattatatcgataatatttacattattacaaaggcacttcaggcctgacatataaaaataaatagcagcggactagcgggcctacggctccatcttcacaggcgctcaactggggtataagccagaactccacctaggacttcttctccaaagcttctcttactgaaggggggggggaaagatagagcaagaatgagtacaaccacagtactcagcaagccacaccggtagatgcatgattaatgcaagggggtacaaggggtaataatataggggttaaattttgcagtaaacagcatttaaaagacacgtagttgctcaaagctactttgtacacacgatcctagagctacacaatatttattaaacaaggccgtgaacccacacgaacccgccttaacccaaggcctacaatgattcagaccgaactggcaacccgaccctgggtcccagctcgtcccaagccaacccaggccaaccattccacattttagttgttaagcaggttttaagaattaaaacactaacttgggtacattgctaggcttgcccatatccgagggcgcggctattcgaatagatttactctgatcagaggtgtacatctttacccacaagacacatcttcctcacgtgtaaccacgtgccacataccaccacggcatacggacgaaagacgtgacatagttcccaacccatcctagccataaacaagagtatcgacccaaccccgcctacggccagaacccccgggataggtaggtaggattgagcccctagcagcaggacaccagccctgtgccatgacatctcgactaccgggacgcagctcgtgtagccttcatctatcctagagatgtccatcgacccccgaattcgtcaatctccatccgtgtacctttgtttataaccagactgagccacaaactgagccttacccactagatatgtggaagtacggtagtgctttgcaacagaggcccgagcttaatccttatagtggccggggtgctacttcccacaactggcatgcacccaaaccccaccggaaaacaggttttaggggttttgaaagagaagagaggtgtatgtcctattccaccataatccaaccattccaaagtgtccaagtgatatgagaattcccaaagtctaaagttataaaaccacctaatgttgcctaattaaccagcgcagcatctacctaagttcatactagtggaaccataaatagagtacccactagttggggttttattttcctagggtgaacaaggtaataataacaatagcaataataataaggccataagaaaggtaaataggcatggctaaataaaacagtgataacgcgggaatttacataaagcgataatgcattaatttaaatcaaaataattttataaactgggattcaatatgctcaaggatgatgtgacttgccttgctcaaagagaatggccttccgaaccttcggcgatgaccacgaaccacgcttcgggaacctccagaacgacgaaagctacgcgaagcacacaagcaaactacaagcctataaagaagcaataacaatacataaaaagaaagcacatggttctttaggttataacaaacattaggagacttgaacgggtcgattcggagttcgtatgaccaagatatgatcatccgaagtttaatgctgttacatggagatttacggattattataattaggttttacaactataaaacatgtgaaagcgctagcctggaaaagacaggaaggctgtgctgttgacatgcggaccccacatgtcaacctaaaggaccacggtagaccgagtacacggagacggtctacgggtcgacggaagcagacgctgtgtgtcaaccgaggcgagtggccgacaaacggactccactagacaccacgcgggctgcacacgtggaaacaacgcggctaccgagcgggcacactaacacggtcaccacacgcacacagggacgactaccgacaccggtacacgggtaccggggccgacatccgcacaacgggcacgggctgacaccgaaaggacgaggacggggcagcgagggagagggatccttacctccatgcgacgaggcgtgggaacgacaacgacgaacgggcgcggcggatacggacgagaacgacggagacgaacggtgaggggacacttcggcggcgatccttggacgaaggcgagacgcggccggcacaaggcttgacgacgcggagccgaggatgaagacgagcacggcttgacggagggacgaacaccacgatgatgaggacgacgaccgggaccggcgaggaggcgacgagggcagccggcagcagctgcacggagacgaggacggcgtgggacacgacggaggtggcacaacgagatgacgagccagcgaggaggaacgaccgaccagaggagtcgtcgacgagtacgaacggagatgacgacaacgaacaccgacaaggctcgggtggaggggaggcgaggccgagggcgaccttgccgctgcgatgccggaggtggtggtggcgcggccgacggcgcacgggtggaggaagggccgaccggggaaattccggcgaggcggatggagaggccggcgcggcacggcagtgttccggcgaaatcgagggcaggccggggtagagggcgatgtggcgacgtcgagggaggatggcgacgacgacagccgccgcaccggcgaggtggcacaggcggctggaggcggtggagtggtggcgacatcactggtcgtcggcgaggaggtggctccgatgttttccctgcgaaacggaggcgacgccggggaagaggaggcggctgctacaccggggaaggcgactgcacggccgaccggcgtgctgacactgcggcaggggcggttggaggtggccggcgctcggagagagagagggaggaggcggggaggggtggtgcggccacgggaagacgcgggaggaggctaaaacgatagaacggagggaggatgctccattttataggcgcggggagggagccgggcatgggagagggcggaacggcgatgggaaacacggccggtggccatggaaagaggttggaaagtccgcggccgttccgggcgatggacggcgccattcaagcggaaaattagggggaattgaagaggaaggaatggggattaattccctccaattaatttggaaagaatggttggatttttcgggaaatggcgctagggttttttgggagagagagaggaggccgggcggctggaggaagaagacgacgaccgccgcgtgtgccccacgcgggcgcgcggtcagcgcgcgtgcaacgcgcgtgcgtacgcgggaggggagcggctcgggtagggggggcgcggcttgggccgggcgatcggcccaggaggagaggagggagaggtggcccgggggagagagggaggaggagggagctgggccgatgggaaggagggaggggcagcccaagagagagagagggaaggaaaaagagagggagaagatggagacttgggccgcaggctgatgtgaccatggctactatggatacgaccattgctcacatcatgaatcaacaagaagacatcaagatcaagtcctccatgtgctgcaatctgattcggccacgtgttacattgctgacttcaaacggccgccaaatctacatacgtgcttcgttttgggcccgtgagtacttgatggaaagctctcgaagtcctccttccaacggatccagcatcatctcggaaatctatctcgtttggccgcaatcacaaaagcaaggtgctgcgtctcctgtattgggccaatgggcttgtaactttgtttgggaccctggcccatgtggggcccatgtggggtgcgccccaatctggtggagcacgacccttggaccctcttggtcgtcctcccacctctataaatagtaggtaccccttcagggtttcttgggttttgttagattaaagtttagccattgctacttgcttgcagcgcgcgtgtcggctagaccgtccgtctgcttgttcttcggaaccccaacttatcatttgtattaaattcctatttgcaatatcagattgcttttatcttgttcttgcttctttcttcgatttgcttgcaggaatagggttgatctgcaccggcaagatcagcaacccacggagaggtgtatcgatcgctaaggcgcaacacaacgtctcgtacggttgtagtcggatcgtcaacgtttctcccaaatcgtagttatcacaactcaccgaaagatcgggccaacaacagccttgagtgtcgagaggaactcagggttcatcaggtggtatcagagcttttgttgctcggtgagtttttatcttcctataaccagaaaatagccatacaaaaaaaattcgtatcattacctagccatactgtgccattgcattgttcttttcagtttttgctttgttgaattttgtgttgcattgtcacgtcgtgttgctggtcttagcgtctagttcgtttagagtttcgagttctggtcacgttttgtaccacagtcgtagctgccaccgtgtctctgttgttgtcgggacctacgaaaacggaatcggctcgctgccacggttctatttttgtagttttcagaagtttctgtcggttagttttggagttcttgagttgcatctagtgtttgccgatccttgtgtgtgtttgttttggccgtgcctgtgtcgtgcacgagaggaggaaggtgaattaccatatctgattttggaagtagtcaagtttgttttggaaagatatagtagattggattggttaaaaatcagtttcctttttatcccatacaccaaattcggctgccatccactccacctcctggccgagtcccagtcgcccctttggccgagtccgactccctccctctcttccaccgttccgagttgtgtcaaacaccttggcgaatttttgtttggtgtcggtttcgagatctgtttggaaaaacggaaccggcataaattcagcattccattttttgtataattataattttgggtttagacttttacatttgagtccctataaattttatatttatgtttgagtccctgtaatcttacattaaggtccttgagtcagtttttgttaaaaaaaataagaaaaaaagtgagaaaaaaaaaggcagaaaggtgcaaaaaaaaaagaaaaaaaaagccgcaccaaaaaaaaatcagaaaagaaaaggaaaaaaaagaaaagaagaaagaagaaagaaagaaaagagaaaatattgttttgtttgagctgaacttcatacatcagagtgtgcttgagttgtttctggtgctattttgtggtaccgtttgtgtctaggctcgcgtctctagtacgttctagcctaggaccagcacggtacttgactttgaacaattattcaactttgcgttctctgatttgagcatttgctattcctttgctacatatttaagcctacccagagctccacagatttgattgcagccgtacagcaagtgtttgccgaggcatcgatatatccaacctctattggggtgcttggttgagtcggtgtacatcaccattccacttgcattggtaagatcttgtaagagcttggttaaaagcttgagtgtgtgtgagatttgagctgccagtacctagtagttgataggagcgtgtatattcttgtgtatgtttcttgtttgctgctacccatggcaggattgcgcaaggggaaacaagatggtcatgctcaacgtcaacatctacaccttcgacgagatatgacgacttcttcacgtgatgcatatgaggtacatgactataattttgcacaagttgcatgtaagttaccagtctatgatggaaagtatgattccgctgcatacattaattgggagctagcagtagaaaaacaatttgatgagtatgatttttctaatgctcaaatgattaaggctgctagtaataagtgtgccggttctgcatctttttggtggcatactgtggggaataagcttgaaacttgggatgaatgcaaaatactgatgagaaaaagatttatgttttcatactatagacgtgctctccttgagaaatgggaacatctaaaacaaggtgacaaaactgttagggagtactttcatgattttaaaatttgtatcacttatagtggtttacaagaatctaatgagaacacaatgactagatttttcagagggcttaatttcaatattcaggctgggcttgttaatgtgacatataatcatataggccaattgttcatgctcgcttgcattgttgagcgcaaaattttggagaatccaatggagcaacaagatatgcttgtgcctcctatcactgatgttttgcag

SEQ ID NO: 18718 - DNA, 3987 bp, Oryza sativa
ttcaggacatgcttgattgtcaaagatatacatctctttctcatttgttacaacttgcttgcaatgctgaaagtaaaatagaggaggacatgaagaagcaacatgctatgtttttgtcttctattactaaccatttgcaggaagtgcataatcatgaaaaggaggagagagacatgaaagagccgccagtcccattgatcacactcaaagtcgaggcacctccattatctaaagagggcatcaaaggtaaacttaatggtgctgaaattaataaaggtgagtgtgttgttaatgaattgaatttgtccacttttcatgctatagcagagcaaccattagtggaaccaactgctgagattcctttgtcacaaattgatttgtttgctgttccttgtgataaagaagagttatgcgataatgcttcacttatatccatgccacaacttgtgaatgaacatgctattcctactgttaattcatactgcactgattttaagcatgttgttcacattgctaatgaagtagaggagcgtgaattgagatcttctttaaatactttgggctatgttcagtttgatgatttttgtgagctcgataatttcaaggagaaattatttgctaagtctgatttgccatgtccaactaatgctatttttcatatctttggcgaatataatgatagaggaatatttttggtgcatagagtttacatttgttcagatttagaacatcttgtagttccggataaaatatgcaagctagagagacatgttactgctaatcatattgtctcgagtttgtcttgttttgattgcaagaaacaggttgttttcagtggactgcgcgaagagcaccatatggaaaaaccgaggacgtttttctgtgaagaaggggaggatgatgtgaccatggctactatggatacgaccattgctcatatcatgaatcaacaagaagacatcaagatcaagtcctccatgtgctgcaatctgattcggccacgtgttacattgctgacttcaaacggccgccaaatctacatacgtctccgttttgggcccgtgagtacttgatggaaagctctcgaagtcctccttccaacggatccagcctcatctcggaaatctatctcgtttggccggaatcacaaaagcaaggtactgcatcacctatattgggcctatgggcttgtaacttcatttgggaccctggcccatgtggggcccatgtggggtgcgccccaagttggtggagcacgaccctaggcacccctaggtcgtcctcccacccctatatatagctagttaccccttcagggtttctcgggtttttgttagattaaagtttagccattgctacttgcttgcagcgcgcgtgtcggctagaccgtccgtctgcttgttcttcgaaccccaacttatcatttgtattaaattcctatttgcaatatcagattgcttttatcttgttcttgcttgtttcttcgatttgcttgcaggaatagggttgatctgcaccggcaagatcagcaacccacggagaggtgtatcaatcgctaaggcgcaacacaacgtctcgtacggttgtagtcggatcgtcaacgtttctcccaaatcgtagttatcacaactcaccgaaagatcgggccaacaacagccttgagtgtcgagaggaactcagggttcattacaggccgagggagagagagggaggactttgggctgggctcggcccaaaggaggaaggagggtttatttttagtttttctttttagtaaactttgataattgttattgttgcttaataaatattttcggtgctctgaaaattcaagtaaaatttgagggctctttttagaccaagaagaatttgacaaaatttctccgggccacattcgaatttttcttgtacatatttagtgtttgccaatttcatttcgaattttaattaattctattattccttttagagaatgatttttaattcgggatgaatttatcaggacgtgacacaaggagacacttggagaaggacttagagccatggaggatcatcgaggacgtccaagtcaaggtagtggcccaaaccaattcgacctcgggtgcaattcggataccaggaccagtctgcactaaaacgggagcctaggtcgcatacgtgctcggattggggcattctttatatggatggaaagctaagaagataacctttccaatggttttggtcccacatccaaattatttccgagtcaatgggaatcgaccaaacaagttgacattcagaatttgttccggtgctgcgtcaccgtatttgggcctttgggccgtgtatcgtgctggaacccagtagggttgcgtcgagagtgggttgcacgaccctaaactctatatatcagtaccaccaccatctttaggtttttggggtttgcttagattaatctgtcgaggacagtttcatcgctagatcggtttgtaagaccccaactcgtgagcttaatcattcatctgcaattttggttgttttctatttctctcttgtttttgttcttcgattggcaaactgccgggtcccaaaactaatgatttggtaaccgacatgttaaaactgtatcaagccctggatcagtagattgatacaagttcaatattttggatcgtctttgcttacgtttagacatagctttgaaggagatattattacataaagtaatagggtatttacaagattgtggttaactattacagcagaagctttagaatggcctaactctgttgttttgctatagacttaaaccatctatctaatctagacttgagaattaggttgaaatgaaactaacttatatgattgaactcccagcttcggcacaaactccaaatgaactctgaaaaagggggttgaagcaagggtgagtacaacgtactcagcaagctattatatttaatcaacaatgaatgtatgaaataataatatctgtgtaaagctaggtttacttgcaaaaagcagagaatgtagaagtagaaaacctgtaatgttttaaatgcagcagtatttaataaaatttcaaattaggtttctatccaagatgccatagtgagtcccaatgctcgataaccgcgagcacggctatttgaatagttttgaggatattcatactacagtagatgtacgctttacccgcaatccatgacgtgccaaacacattagccttgtcatggcaaagcttttcagttactaacatcagtggtacctgttccatgaactctagtccccatgcactctgaacgtaacgttatcagcagcgagaggagttctggcgttcccgagggctttagagagaactgattgtatgacaccatgtcatcgcaatcagggttcacaaacaatttgtgcacaattcatttcatatatttacctgcgcctcggtaaatatcacaattgcccttcgcggcataaatttgcctcctgcacgaggacttaagaagaaccactatacagaggtaccacttttgctagataacttaatcagctaggtctatgcccatacgagaattgcggtcgtactcatatgttcttcacatgtacttggcagtcttatatcggttggaacagtactagccacccggaaatcaaccatttctaccgtactgtcccaatctaagttcattatattttatgcattctaactaggcagggctaagcaaaagctagcatatatctggtttgctatatattcaggttatgcattcaaaatcatgtatggccaatgcacaagatactggagatatagaatataggattattatgctcaaatgggaggaataataacttgccttgctccaacgcaaacaaatctgagataggcaacctgattatccgatcctcgaaacaccacaggttgccatccaaaagataatagactctactaagaaagacgaagaaccaaattcaataaaaatcatgaaatagcaagaaagtgataaacag

SEQ ID NO: 18719 - DNA, 9939 bp, Oryza sativa
acatttaaataacttaaggaaatccaaataaaatattaaaatagcaaatttggtatcaaaatgtagattttgaatttagatgaatttaagtccaaatttgactgtaatcggatctacggtttaggagatatgggcttctaaataataggttttgaattaaatagagaaaataagaagagacactatgcaggggacccacctgtcagtcttttctttttctttttctttctcttcttcttcttcccgcttcttccttcttcttctcttcagtcgaacagagaggaggaggagaggggcgtcgaggctccggtagtggagaggcagcgacgccggcggccagtggtgttcccgggtacagaacacctagggaaggaagtggtcggcaaagggggttaagggaatggctggaacggcgagcacaagaccgtgaaccgacaggagagagagagcttcggtggggcttgatatgggacgaaagagaaggggaaaagtggaaaaatgggtttgccggagtaaggcaaggttggtggtgagaggatttggttagtggtgctccggtgagagagatcggctgacggtggcggcagccggtcttgaggaagagagagagaaagacagagctcgaagagctcggatggtgtggaggggaaaaggggcgacctcatcatctatttataggccgcggaggtcggttgccgaaggcggttgtagaggcggtcgtcgactcggccacggcgacgctgtcgtgaaggaagaaaagacagtgccagcttccttctctgattggatggcgacggcggcgcgtgcacgtggtggctgccgtatggctgggcggcggcattagagaggcacggcacagcgacgccttggcgtggtcggcaagttgactgcggcggcggcgtggagagaacggcgggcggccggtttcttagcggcgaaggaaggcgttggcggcgtcgtgcgcgtgtgcaacaggcgcacctggaggcggctcggctatgggccgatttgggccggcttgggctgatgggagatgaaaaaggatttcggcccaaagtgaatagaaactgtttctgaattttgaagggggtttgggtaatggaattgaataggatttatatttgaaaagaatttgaataggaaagtttggaaggaaattatatatggatataatttccaaaagagatattttctaatttgagtgcaatatttttggaagtggaatatagtggaatttatatagatgcactcaaatgggggagagagatatatatttgagaatgtgggaggaaaatggagggaatggaataaataaaattttagcccaaaatatgtggtaggaaatctagaattaattatgggctaaaagaggttttggatttgggatggaaggatgaaatatatcttcttagcacaagagcaatatttgcaatatttgtaataatattattcttgtgccgaggaggaaatcaagccacgggaattaaattggcggctagattgaaaggaggaatttggatacttgagatttgtaaagggaactaaggataggtttggaatcaaaggatgggtcgacaattaattccaattaaaattggaatttcaaagagttggtttggagggttttcttggaccataattcatacaaatgaaaagggtttcaactaaatttgaataagaggaattttgtcgaaagaaggttttaatttaaaaccaaatcaagaaacaccttaatttaaccaaatatatctttaaatgaaaaacacaaaagaagttaaataccagagagggattttatgcaaattagttttaggaggtcctactaattatattttcctaggtttaggaagttattaaaaacataagaagcggcatgatgcataattagaaaatagctaattttcagtatgttacacaaacagggattagccttctcagcgaggtcacccacgtttcgacacgggtgataaccagaggagacgtggtgctgcgattgcggggctcaagtgtgtgcgcattcaagaagccggatcgatttgtgtcgcggctccgcccaaatcgttgtttatcagaacctttcggaagatcgggaaccctagtgcacatcactgtcattggctatcgtggccctaggacttcaactcttcttcaagggctcagcagagaaccagccgataccggtaaaaagagaaaaaccaggtcatcggctgcagatccatcggctcaagctccaaagatgaaagtcaagtcaaagaaaacgaagccaactgatgatctgcctgccctagatccatccattgaacaagctctggatgaagaagaaatcggcgaggatgttgaccaagccgcagatgaagtaagcgatactgaaagaactccatcggcttcacctaagtaaactcctcgaactccttctgccctagcccatttttcaagggtaagcaacttcccttgattccttttgtaatcacttcattttatggccgattactcacagattttatagttgcagaagaagaaaactgttgtgaagaagaaatcggcaatagcaattctcaaatcagctccaccagtaagatattcttaactcttccactagttgatctcagcctgattttatctaacacttgtctctttcgtagcctcctcctcctccttctcctgtacaacaatcatagagtgatcaaactccatcggctgtagaaagccaccatattgaagaagaagaacaaccagctgttcctgctatcccagtaagtcttgtctataaaaatcttgaatcggccaaatagctcatgttgatactcaactgttttcaaattccttcttgcaggccttagccgatctgttctctttcgatattaaagactatcttgatgaagaaacagaagaagacaccaccagcaagtctttagttcccttgtccgatgatgtgaagaaaacccttgaagacatctctcatcggctagaggcatcatcactagacaacttggtggtaaactgtgggccgattaggactcggttacacaagatccaacctctaatcccagatgagctagccgatgtcttcacttcagctgtctatcttgagcagcatcaattcaagctggaaaaagccaaattaagactagccgaacgtcgggagcgcaaggacattcaagtcaatcggctgcttgtgcacgaagagaagtccaagcttgatcagctatctgagggcccgatcaagtccaatattgatcggctcgaagcccgtaagattgagctcttggcacaacttgaagaatgcaacgccgagctggatatggaacataaaaagctagccgatctcccaaaatctatcgaagaacagaaggcaagactaaaattggccatcaagaatgttgctgatctcaccaagtctttaaaagtcatccctggaactgacactcaagatgcccaagtaattgaagaagtagaacaaatcaggcaaagggctatttcggctatccagcaatatttgtctcaatgatatcttgtgtaataggtcttagaaatttttgtaatcggctaagaaactttggctctttatcgaacttatcctcataattttatgccgattcaatagaactccatattttgctcaaaaatttgcaattttcatatatgtgcccccctaattttacaatctcaaaagcattgataaaattataacttgaactaagggcgatatgaaaaaatcggccattgtcccatcggcaaaccacaaccggttacgataagaaaaaacaactaagggcgatataacaatatcggccattgtacatcggcaaaccacaaccgagtacaatatgaaaaacaactaagggcgatataacaatatcggtcatctgaaggcgatgtaaacacatcggctatcatgtatcggcaacattagccgatcatgcgttaacccaaacacttgggtaatatttcttcaagtacttgccatttagtgctcgtccataaacttctccatcgagtccttgcaacatgtaagctcccttagacataactctatagatttggaacggtccttcccaattcggtgaccacttgccgaatttgctatcccgactcccaatcggcaaaatcaacttccatacaagttcaccttccgaaatagttccttatccttggtaacctttgcaagggcccttaatctagactgaaccaagtcttccctttcattggccatgaggttataatactcatcggctgttaaatcattttgcaactccgttctccttgagccaattctaacttcccatggcaaaatagcctcatgtccataaacaagcttataaggagggacttggatcgatccatgacaagccatccgataagaccacaatgcttcggctaatcgagtatgccatagccaaggataatcagaaatctttctcttaatcaatttgatcaaactcttattagatgcctcggcttgcccattagcttgtgtataatatggtgaagaattcaacaatttgatacccatgctataggcaaactgaacaaactcatcggacacgaaaattgaaccttgaccggttgtaatggtttgatgtggggacacccgataaagtcatggtgcacccacgaatacgtaaccgcccaggatgttcagttacgcatgaaatgatataaaagcataaagttcgattatacaatacttaagtcacttagttcacaacacaacataaatacaaatcattacatatatggcctataaagccttatttctataaacagataaactactagactccatcacaggaactgcctgagcgtaggatgacgtaaaaaccatagttgtcccactctaatagattgttgtcgaaacgacaactgcatacgtcgaaagacgtggttactcaacagtggttggaaaaatgaagtgtactaaattttgaattttacatgggatccccccattacatggccctaggggactatttatagccccattacaggtccttactaccagggtttaggttgtacaggggaatttacatgattacccttaaagaaggggcatttacaggggtacataatgttataggggctcatgggcccctgatgggccgtttggcgatcgccggcctgatgggccggaaaggcttcctcggccctcgcgggggcgaacttgtcaaggcgaagtcatcctccttcggcagacagtcttcgccttgcacccttcgtctgagacgcctctggcctagcgctactcttcgccttgcgctgctctcgctccatagccttcgccatgggtttcggcaggtttcgtcgaagggcctgatgccatccgccaacaagcccctcacgggcaagggtgagactggagcttcggccaagaccgtgcaaaccatgtggtatggtatgcggcgccccctttcgaccgatgctcctaccgaaaccaacattatacctgcgaatgaagattattatttgtgcggctggtattattttgccgcgcttcgcctcgtgcgattgatggttatatatattcttttttcctgggccgaacgaaacagtattgggccttcctttcttgggctttttactgtgctgctcggtcgacaggaatttaccgtttcgcctacccttgcgacacgtggcgctttattactggtgggtaggcgaacggtcgcttgagcgggctatatattcctgttgctctatccttttcaccgccacacttgccattttaccgtgcgcgctctctttctccatctcttcctttcacagcgtctttcgacccctcaggcgtttcgccgaatctcttttttcgccaccgcaaacgcaccgttcgccatggctccacgtaagccaaaccctacttcggtgaaagggccggatcccggccgagtcgatgacgacagcaccgcctttctgggggtctctcttgtggacgacgtcgagctagcgaagctggtcagctccggagggttggttgaggggcaggctttcgccctagggaaaaccgtggtgccgaaacctgtcgacaaccggacggtggtgttcgccgtattttttgaggcagggctacggtttccctgcaacgtgttgttgccggagatccttcgcctctttgaggtggaacttccacagctgagcccgttagcgcttgttcagatcgctatcttcgactgggcgtgccggacttccgagtttgagcccaacgccgagctctttggcgccatatttttcgccaccgtgaactcgaagaaggtaatcaccctggctggaacgaaaaaaaccgtgttcgggagcgtgaacttcaacgttcgccccgagcggtccgatctctggccggtgaacgctgctatgtcgaagtgggaccgccattggatggcgaggtggttctaccacaccatccctttcgaggctggttctgaatcagcgaaagccctccggtgccggcgtagggtgattgcgccgaaccggagacccaagatcgctgtggacggcgccatggaggcgcggttcgttctactgcggaaggtttgctcccgccttagctgccgtgacttggtggaggaattttgtatgcttcgcatttttcccctctcccagtcatggcaagtcgcggttgaacaaggcgaagaagtcaacggtttgccgaacctgatactccctgaggggcgaacagtaagactgttctattgctatatactgctgtgctttgttatttcgccttatttgacttttgacgtagcttcacgctctacttttacagtgttgaccctcgaccaggccgaagtcgaagcccgcaggatgatcggcgatgtttcggtcatcgagtatagtcagctgttaacgcgtcaagcggctgggcgggcgaaccgggtttacaatggcgaactgcctccccgggcgaatccccaaaaggccgacgacgaggcagggccttcgtgaaagcggatgcgtggacaagtgaagcttgcccccaagaagcgaagggttcctgcttcgtctgactccgacaccgacaacgaggatgatgccgaagaacgtgacggcgaggaggaaggagaggaagaggaggaggtggaggctgtggctgataaggccgcgggtgaggcggtcgaagaccgcgccgacacccccgggtacactcctaccccaagtcctagtcacaacgaaaccggggtgagtcgaacagctccccccttcgtcagaaggatttggaaggggcgaaggccctagttgcgttctcttcgggcgcgtcggcgaagggaggtcctgtcaagaaggtggctaaaaagaaagggctcgtcaatgtcgctcgcgtttttagcaacgacgagtcctccgacgggactccgacttcacccgctggtcgcagcctggatctttcggccgcccccattcctccacttggcgccgctagagtggacggtagtaccgccgctggggcttcggcttctgcggaaaggattgtgatggccgcggcgaaagtattcggcagtcctccgcatcagccggttgcctcgccgctgatggaggcgaagggaaagagagcggttgctgagatgtccgcttcggaatattcgctctcggtaccccgcttcgcccctggcgacttcgagacgcgagcggacctccttccttttgtggaaggggtaagcaatcttgtactgcctgccagcgccccgagcttgttcaccgaactgaatgagttcgacgaggggtgctctgctataaaaagcctggctgttcgggtacgtttcccccccccctttttatctttactcttcctctatcttgtttttacaattgacacttgttctcttcgccgctcgtattctgcgcccagatcctcgcggctcagtgctcaacagagcgaaccgtgcgagctcgacttgatgggttcaaaagccgtcttcgggccaaggacgacgaactaggccgcaaaaatttggacatggaggcccttggcaacacccttagggaggcgaaggccgaaagcaagcggcttcaatcggaactagagaaagggaaggaagctagggccgaagtcgatcgcttaaaggccgaactggagaaagagaaggcccacaccgccatgctcatagattattataacctcaccgagccgaagatggaggctctttggcaggaggttcggaaggccgaagcaagcgccgcagaggagtcgcggcggttttcgcgggagatggtgaaaaccaccgagtccgcgcggacagcgtgccaaacgcttcgccttgcccttactgatatgggcgcgaaggtgcgggatgtcccctccgaagatgccttagcctttgacttctccgaatggacccaacaggctggtggttcggtttcggactgcgccaccgcatacggcgattgctgtgcacgcgtgtcagcggcctttaccatgggcctcctgcagcagttcttagattttcatagggggtggaggcgatgcccaggatcacccagaggtgtgaggccctccgcccttctcttagattttcatagttttcttttggtgttcgctagatgtggcgaaccattgtatattcggcaaactgccgctaaaccttaaaaaaaaaaaagcttttttgcatacttggactgtatgataattttaaccactttttaacgattaaagtctttggcatattattatttcactcattttgcattatgccataccttccccttctttcgcctattcttaccatgcaagatgtgttttgccttttctgcactgtctaccagggggtctgccgaaaatcatgcattcgggccccttctgggagctggcgaattcaaaacgagaaatttgtggcattgaagggtttgccgaaggtgcgatgtccatttcgacctgtttatcgcgaaatggaaataaacggtcgtagctataaagttttcaaggttgccaactggctgcgggcgcaccccgggcgaaccttagaagattacgatcttgttcattcaagacgtttggaggatatggctcgcttttggcgaaaccatcagaagactaaacgccaggaatcgatctttcagcgtcgttacagtttagtctgtgtttcgcccccttctcctcttaaggttgtgtatgacattagtagtgatgacgaacctagttcatccgaccattccttagggagggataatgattactggggcgaaaatgtaatttacttgtaaaatgaattgtatcgggttgtaaaccttgtactcttcgattatttttttgaagctaataaagagcgtgctttatttccttttcgctatttttcgcatcgtcacactttgtgcttttgttaggtcggaacatgctggcccctttgcatatagtagcgaaataggtgtagtgacttttcagcttttcgttgttcgtttttgatctgtagcgttctgtgtcgagagaaacgcttttgcttttatgctgatcggtcgtaacgtcgtttggctatttattttccaagacaagctgttgcggtttcaacgttcggcgagcaatgcttcggcagattcgtttcgcccccctggcctttttcgctgatcaggcgtttgccttggggtttttcaacaaattatcaatcacacgaaaagaaataaaaagaaggcggaggagacagagattttatactggttcgggcctccatggtggataatagccctacatccagttttttttctcttttttccttttttttcttgccgaaaggcttacatagtgccaaaaggcttacatgataatatgtacatttttacaagttggcgatttgggtgccacccattctagacatagagcgcttgagggaggcggcgttccaggaatggtcgaactcctcgccctttgagtgtcgctaggcgaaaagatcccgtcctggacttgtgtttgatgatgtatggtccttcccactttggttcaagcttgccaaccgctactgggtt

SEQ ID NO: 18720 - DNA, 4111 bp, Oryza sativa
atatgggggacgtggatgtatcgatggtgttgatgtcctcatcacttagcaacatcatcacgcaaaatatcttcagagacatgggatgcaacacaattttcttatcatggtacagaaaagagtactggtttgacctaccatgatgcatagaatccctatcaaattgccatggtctacctagtagaatattacatgcttgcatgggcacaacatcacattcaacaacatcatggtaatttccaattgcaaaattaatgtgcaccagttttgttaccttcgccttaccactgttgttcagccattgtatggatgtgggtgcggtttggtgctaagtgcaagcttctccaccatctcgctgctagccaagttgttgcagctacctccatcaatgatcatgcggcaacaacgctctttgacgacacactttgtttggaacaacgtgtgtcgctgattttgctcccgccttctccatttgtgcgctaaggacacgctgcacaatgaggctctcatagtgatccgcaaatgcagccccaatgtgctcttccggtggctcattatctgcatggtcagccgcaagcaaagcaagtgtatcatcatcgaaatcactagcagaggagtactcaccatcgtttttgactaccaaaactcgcttgctagggcagtcacgctgcacatgcccaaagcccttgcaacggtggcactgaacatctctcatttggcctatggatgccattgaagaagcactcggtgctggctgagcagcctttgtcgctgacttgtcactagatggaggaggtgctgctcgactggttgtgggtgtggaagatagagaagcaatacggccggccggaggagtggtgcgttgccatgatgaagttttacctgtagaaaaattagccttggcactagcacgtcgtccctgcacttccctttcagccttacaagcaagatgaaacaatcgggtcatattagtgtaatctttatagtctacgatgtcataaatctcgcggtttaacccacccaaaaatctagccatggcagcgtcctcagtttcctctaaattacaacgaagcaagcccatttgtaactcctgataatattcctctacacttttcgcaccctgtctcaattgttgcaacctattcagcatgtcacatgcatcgtaagaaggaacaaatctagcccgcatgacccgtttcaaagcatcccaagtttgtggcatgttattaggatttttcttgccatgttctatccaccaaaccgaagcaaaatcggtgaactcactcgtagcagctctaactctagtgttctcaagaaattcatggcatgcaaatttttggtcaacagcaatctcccaagagaggtacgcatcaggatcatattttccatcaaaggaggaatcttaaatttaattttagaaaaagcatcatcattgttgcgtacctcgcgtcggcggcgaccacccatacctcgtcgattgttgtgtagccgtcgacgatcttgagcatctcgatcatcttgttcagtgtcagcaatatattcatcctctaaattatcctcgacgtactctccgtcaatgtcatcgtcattacccccaccattgcctccagcattgagagcatcaaaatgcctcacaagagcagcaaggctagtgtcaatgcgggcgaccgctgtctccaaccctgtaagcttagtgtttgtggagatctgcgtggactccaattgtccaatcttctcatttgtcacctgcaaatctgtatcaagtccttctgtgtgctgcttcacttgccttgtaaagtattggatgatgcctttggtgcgtggggaatgagatgcaccctcctcatctttatcctctggacctgccatggtttagaaatgaaggacaacaaaacaatggaggatgtaatgtaagccctacacaactattgggatgtagcttttgcaagacgctcactctcacttcactcgcagcttgtctcacaagctcttaccagttcttaccttgcccacaggagggggacagcaacccacaagttagcaaccgtggaacgaggtgtatcggtgctgtagcaacaagaccagtcaagctgtagtcgggtttgtggtggagctgtttgtgggctgaaagcaatgctcaagagaaaactagaaaccacgttagccaaagcaaattgaataatcgctcaagggtatagtgtacagtgctggtcctaggctagtcgaagtagagacgcgagcctaaccacaaaggacgccacaaaacacaaacccaaacagcaacgaaaacaagaaccggtggtggaaggtggtgacaaagggggaatggtggggtgtgctcactggatcctctttttttttttgcttgctctctctagtgctgaggagagagacacaactttttttttattattattttgatatttttttcacaaccaggagcacactagaaccaaccacagaaaatcttatctcaaacggacaaagtatgaagcttgtagaattttttcaaagttgtatgcgaataggtcccgaagcttctcgccacaaaaacagaattttgcaagaggaatttggcgattttaaatttgccgaacccgacgtagcggggagaatcggatgtaactttttttgtagatgtccgtggatatattataagcctaatttcgagtccgtatgaaaaagatatgactgttttaaggaaggtcactcgaatcagggttctatttcctttctagtggcggcaggatacatggcaactcacaaaagctatcggcaacagatcaaacacaaatagaaagtgatttggtgggtgactgcgatggtggtgacggtggtgatgacgcaaaattgatgaaggtggcgatgtgcggtggtggcaagaactggaaactctaatcgcctaacactaagaccagcaaattaacacaaccgatgcaatcgaaaactcaacaagacttaactaagcagtactagtaaaaaggcacaattgtctataggatcacgggaaaactaatctactattttttttggacttttctggactataggaaaaaaaattaatgacgaagggaagggtaaattctctcaccgatgaaccacgctctgataccacctgatgcgaacccgctagggtttgtggcccgatctttcgatgagaggtaagggataactcaattagatgaagacgacgttcacgacccgactacaactgtccaaagacgctgggccttagcaaccgatacaccgtctccaatggtcgccgcgaacttgtggtgcgcgtcaacccggccacgagggcactcgtcctgcaagcaatcgaagaacaagcaagaacaagtaggacaagcattgaaattgctagataaagatgaaagtttcactatcaaacacaatatggtggggttccgattacaggcagacgggcggtttagccaacacgcgcgctgcgagccggtagcaagaagctatctctatcatcaaaacccgcctgttctttgtggcgactagaggtataagaagaggggaagaacgaccatagggtcgtgctcctaccctaggacgcgcccctaatgggcccaacttggatacacagcccattgggccaaaagaggtgacgcagcaccatggacagaaaatagtcgggagtaaaatgacaattgcggccgctccagaacagatatggacatgtggctggatccatttgaaagtagacttgataagctttccatgaagtacttgcacacccaaatcggagttcgcatgaagtcgtggcggccatcagaagttggcgctgccctacagtccgaatccaccccgcgcgaatcctcttccctttgggtcctctccatcgttcctagtaaaacacgagtgcacgcgtctccggggtataaagacgaggaatatgaactcaagaaagaactcacctgataatttagttgacgtgcacgagcgcgggtaataggaccatcatgttgtacatggggggacgtggatgtatcgatggtgttgatgtcctcatcacagcccataatcgcgggcatggctattcgaatagttttactctgatcagaggtgtacaactgtacccacaagacacagccccacgaca

SEQ ID NO: 18721 - DNA, 15771 bp, Oryza sativa
caatccctagttcaatatctagtcatgttatatcccaagctaacaaaggagcatggtacaaaaatagcatggctataagagaaggtaaacatcccatggtatcattgtaaaacaatgcaatatttgaaggaaaacaatagaacatttacaatataggatcaacatgttcaagtgacaagcatgacttgccttgctctgctgctggaggaacctcggcgactaattcaaagtacaccggagcgtcgggagagccggaatctaagcgtcatacaaagcaaacaatacaaacagactataagactactgaaacagagaacaaaaccatttttactggattctatgcatttttcttgatttactgagacttgaatgggcttaaacagagctcggatgaattttctatgaattttagcagattcccggggagagagacgcggcgccgacatgcgggccccacatggcagtgactcggggggcggtccgcggtggactgggtccacggaccgggtaagggacggcgcaccatgtggtgcacacgtggcgccgacgcggcgcacacgtggcggccacatggcagccacgcgggcggcgggattggatggccccgatctaccctcgcgacgggagcgcgtggccggcgcgcacgggcggctcatgccggcttggtggccatggcgcacggcggctcgactcgacatagcggcggtgcaaggcggcgaccggctggcggcggagggcggcggcgtcgcggcgacgcggatggtgatagcggcggctaagcggctaggcggcggcgcggcggctaagcggcgcgggagagagggagaaaggggaggaggtgcctcaccgacggcgattgacgacggcgagcgacggaggacgatgacgacagcgggacgagctccggaaccacctagcgaacacgatgaaaggggttagagagagagaggaagatggaagagagcgagaacgccggccgaaggcggcggccatggtggtgctcaccggcgcacggtgcggagtgggttccggcggtggattccgacggaggaggggtggacgggatgatccacacgacggcgaacgcgacggcgtcgacggcgcgactcggcatagcggctagcggcgaccggagcagcggcggcagcggcggcggggaggagggcgacggcgctagggtggtggagtgcacgggagcgggcgattgcaaaacgaaaaagagagaggagggaacgggggtgctttatatagactcacgagggttgatcgtggccggggagaccgcgatttcgccagcgtagtggggagaggtggggaggagagagaggcgggattcaaaaattgaatctcggccgtctcgagcacgagagcaggcaggagagagagggagtgggcgcggggaaggcgggcgcgggcggcgacgtgggcgatgtggcccgggagatgcaggagcgagcggggcggcggttgcgggatgcggcggcgccagctggaggtgggagacgggcccgacaggtgggccccacctgtcggcgacccaaagggggagggaggcgaccggctgagctgagcctcggcctttggccggcctagtggggagggggagaggaagagaatgggccggcggcccattcgaaaaggaaagaaaaagagggaaaaagaaagaaaaggaaggaaatgaatttccagggaattaaatattgcttgtgctcatttttaattggttaaaattatttctagagctctgaaaattccactaaaaatcttcttaacgtatttcgacatgtagaactgaagaaaaatcccacatgccagttccgattattatttgcattaattcctttagggtttctctcttgcttttacaccgatattttcttgagaccatttataaattcaatttaggcttgggaaaagaacttcagggagtgacaattcagaaccaagttgatagagctgttgaaggaattcagagattgcttatcttgggagtattatgagatgcccggactcagccgatcgattgttgaacatcggctacttatgtcacgtcccaaaacgactctaaaatatatcctttaaattatgcctagaataattaaaatccttgtggaagcctccaaaaattaaaatgtgcaaagttaaaagtcaaataaggcttggaggatttttgtatatttcctaaaagcctaaaatgtgtaaataaatttcagtggaattttccgagcgcaaataacaattatcaagaaataaacaaagttgaaaaggctttatgaaaagaaaaaccctaaaaccctctcccctctctcttgggccgaattcagcccaactccatccccttctctctcctctcgccgcagcccactcggcttcccctcccttcccgcgtgcgcgccgctgacgggcgggcccgcccgccaccctcgctgacgggaaggggcccacccgtcatccccctcctcccgccgctccgtcactccctctgcccgcgcctagcgccgccgccgctgcaaatcccgccgcccccgaccgttcccgcgtgccattaagtggggggaaatattccccgtgattccctctccctttccccccattttcccccctctctcccgcaaatctcgccggcgccattgatgccgaccgggacccccgcgccggtttccttccccgccgtccaccctctctcactcccaaacctatataaaccctccccgcaccttccttgtcagtttccgccgtttgccgcccctcctccccattggattcgcgcccgcgccatcgtcctctctctctgccattgccgtcgacctccggctgggcccagccgctcgccaggaccatcccccgcctcggcgtcgtctcctccggcttcgccgcaccaccgccgaccccatccaccgcctcgccgagctcgccgaccgccgaaacgctgccgtccccgtcgacccgagccgcaccaccgcctccctccactccggtcgcctcctccgtcgccgtcgtcgccccgtggaccgccgcctctttcccccttcccttactctctctcggccgccgctgggccgcgcctatggccaccgccggcgaccataggggcgcaggcgccgcctcccgccggccgcgctgacgtggccgcctccgggcgcgccgtgtggccgccgcgtggggcccagccgtctgccgcccgtgccctcgggtacggctgacgcgtggggcccacggcgccggctggtgagcagcgagtgcacccggtccaccgtggaccgaggagctgctgcgtgggacccaccactcccgtggacccggtgcacgcaccccctcccctcggttgacgcaataaaccctatttttaattaaaatttaaatgaagaaattcgcaaatattcacattaagagcatataaacttcaaatggccatatctttgccgtttgaactcggaattggaacgttcaagtctctaacttttccttaagaagtcaggaacctatttttgtgctttgtttctgcttgttatatggattttattagagtaaaagcctttttctttccattggtcatgtagacgctgcagcttcggaagatccgctctacgtggagcttgaagctgatgtttgggaaagcgagcaaggcaagtcacatcatccttgaacatattgaatcccaggttataaaattagtttggtttaaattactgcattatcgctttatttaaattcccgcgttatcactgttttatttagccatgcctatttacctttgttatgaccttattattattgctattgttattattaccttgttcaccctaggataaacaaaaccctaactagtgggtaccctattcatggttccactagtatgaatttagctagctgcttcgctgattaattaggcaacattaggtggttttataaccttagtctttgggaatgctcatatcatttggacattatggaatggttggattattggaaatagacacacacacctgggtttagcctgggctcgaggtgcatggttttgatagtagcacctcggccactacaaggaccagtcttcgggcctctgttacaaagcactaccgtacttccacatgtctagtgggtaaggcttagtttgtggctctgtctggtcatgggcaaaagtacacggatagagatggacatctctagggcaaatgagggctacacgagctgcggctcggtagtcgagatgtcatgccacagggccggtgtcctgctgctaggggctcaaccttggttacctttctcgggaatcccggccgtagccagggttgggtcggtactcttgtttatggctaggatgggttgggaactatgtcacgtcttgcgtccgtatgccgtggtggtatgtggcacatggttacacgtgaggaagatgtgtcttgtgggtaaagatatacacctctgatcagagtataatctattcgaatagccgcgccctcggttatgggcaagcctagcaatgtacccaagttagtgttttaattcttaaaacctgcttaacaactaaaatgttgaatggttggcctgggttggcttgggacgagctgggacctgggtctggttgccagttcggtctgaatcatcgtaggccttgggttaaggcaggttcgtgcgggttcacggccttgattaataacattgtgtagctctagaatcgtctttacaaaatagcttcgggcatctaagtgacttttaaatgctgtttactgcaaaccctaacccctttattataactcccttgtactcctttgcatttattctgcattcgtgggtgtgtcttgttgagtacgatggttgtactcaatcttgctcaatttttccccaacccagaagaggagttcctggaggatgaaggctttggtgtctagctcgtgcctgtcgtcaagtgcctatggtcgtcaccctagtcttccgctgttttccgtttatcttcgtgtgtgctgggccttcatcgcccatgtaataaattaactatttatgcttccgcttgttaaactctgaattgtatcaacttttgatgtaccttgcctcctgggacaaggaacaatacacgcacgtatggaatgcccgttgggttaattccggtcgtgacaacctatcaaaccaggggttaggccacaccaacaacctcctagaagatgcaaagccgatatgcttgaacctgtcaaggctgagattaaacggttatatgatgctggttttattcgtccttgccgatatgcctagtgggtttctagtatagttcctgttatcaagaagaacagcaaggtgagggtgtgcattgacttcagagatttacataaagctaccccaaaggacgagtatccaatgccagtagctgatcagctggttgatgctgcctcaggacacaagattttaagttttatcgatggtaatataggatacaatcaaatctttatggccgaagaagatatccataagacagtttttaggtgtcctagtgcaatcggcttgtttgagtgggttgtaatgagttttggcttgacaagtgctggggggctacatatcaaagagccatgaattatatatatcatgatctgatcggctggttggtcgaggtctacattgatgatgtggttgttaaatctaaagagatagaagaccacatagctgatttgaggaaggtttttgagagaaccaggaaatatggcctgaagatgaacccgacaaaatgtgcttttggcgtatcagctggccagttcttgaggtttcttgttcatgagagggggatcgaggtaactcaaaggagtgttaatgcaatcaagaagattcagcctccggagaacaagacagagttacaggagatgatcggcaagataaattttgttaggaggtttatttctaatttatctggacggttagagccttttacaccattattaatattgaaagccgatcaaaagtttacttggagggcagagcaatagaaagctttggataatattaagaaatatcttagctctcctccaattttgattcctccacagaaggggacaccttttaggttatatctgtcggccggtgagaagtcaatcggctcggtctggattcatgagctcgaagggaaagaaagagttgtattctacttgagtcatcggctcttggatgcagagactagatattctcctgtggagaagttgtgcttgtgcttatatttttcatgtacaaggttaaggcattatctattgtccaacgaatgcactgtcatatgcaaagccgatgtcgttaaatacatgttatcggctccaattttgaaaggaagggttggaaagtggatattttccttaactgagtttgaccttcggtatgagtcattgaaggcggtcaaagggcaagctatagccgattttattgtagaacatcgtgatgattcaatcggctcggttgagattgttccatgaactttattctttgatgggtcagtatgcactcatggttgtggcatcggcttggttataatttcccctcaggaggcacgttttgagtttgcttatactatcaaaccttatgcaaccaacaattaagctaagtatgaggtagttcttaaagggttgcaattgctcaaggaagttgaaaccgatgctattgaaattatgggggattctttgctagtaatcagtcaattggcaggaaaatatgaatgcaagaatgatacattaatggtttataatgagaagtgccaagaactaatgagggaatttcggctggttactttgaggcatatatctctcgagagcaaaatattgaagctaatgatttggcccaaggggcatcagggtataagccgatgatcaaagatgttaaggttgtagttgctgtaataacagcctatgattggagatatgatgtgcatcaatatttacagaatcgatctcagtcggcttctcggaaattgagatataaggcgttaaagtatacttttttggttgacgaactctattatcggacgattgatggggtgttgcttaagtgtttgagtgccgatcaggctaaggttgcaatcggcgaagttcatgaagggatttgcggcactcatcaatcggctcataagatgaagtggttgcttcgacgtgcagggtatttttggccaacaatgctagaggattgtttcaaatattacaaagggtgtcaagattgtcagaaatttggagcaattcagagggcaccggcgtcagctatgaatcctatcattaagccatggccatttagaggttggggaattgatatgatcggcatgattaatccaccatcgagtaaaggacataagtttatattggtggcaaccgattattttaccaagtgggtggaggcgattcctttgaagaaggttgattctggggatgctatacaatttgtttaagaacatataatctatcgatttggtattcctcaaacgtaacagccctaaaatttgacaactttttaaaaccgatttagtttgctttaatcttctaaaaaaaataaccgtcgagttagtagttcatttaaaatattattttccatgtttgtattcgacgtttcttttctcatttgattttgtcgcaaagtgcatatcatccctcaaataattcctttgatctgatttaattctatcccgaatatcggaccatctaaattccacaccaattcaaatcctatctattttaatcttccccaaattttccttttctctatttccaccttaattttatttttccatattttttttcctttttctatttttgttccctctccttccctttctttgtttttcttttctttcttcttcctctactcggctaggccgagccaggcgaagccagcccgatgcaagccgcgctcgagctgcctcacgccaaccctgtgccgcctcgcgccgcgctcgcgctgagctcatgccgccccgcgcgcgccacacgcccgcacacgctcgcacgaggacgaacgacgaatgaatgccgccgcgacacctccatcttcccgcttctgtaactccttcgtctctcaactagaaggctcaagactggaggcaaaagaagcgcattttcaacctctttcacctcatcaagtccgcccctacttccgctgaatcaaatcgtcatcaccggaggaaaaatccccgaaaccctaaatttgcaccattgatagagctcccaaattcgtcacatacattgcaaatcctctgaaattgaaggtaaaaacggattctccatgccgagtactccctttcccctctctttccccatccaatccgtcgccggaatgccaccggtgccgcctcccggcgtcgccctctgttcggccgccgccagccgtacggcgcgccgccgctcccgaccgccccaggccgagttgccgccaccaccgcgctccccttccttccctgatgcttaccaggcccgttgccctcaccggagttcgccggaaccaccgccaccatggccgccgccgcctccagctcctggccgccgtcgccagcctcgccgccgctgcctgcgccgccaccaaccatgggaacggagtcgctgcaccctgtagatcgcaaaactggcgcccctttgcccaaaaccggccatctccaccactgacgccatggagtggtcggccgttcctgtgcagaacgagaagaagaagaaaaatccgattttcctattgaaaaataaatcagaaaaatcctttttcttattctatcaagttgaccatccgtttgtcctcgaaatcgaaatccgacacctattccaaactcctagaattattccgaatccatccgtgtcagtttcgttgtaatccgagcacccgttgtcgcgaccctaattttagccatagggttcgccgttcaccgaaattccaaaaaaatccctaaaattatttctttaaatccttttcacccattgttgcactttgtgatactattttcttttgtttatcttttttttctgttatttattgtggtgatgattgttgcgtcaatagaaaacgctgacgttggtccggtagtcgaagcgagtgaaatctccacggtaggaggagacggtttgtacgactacatcgagcccgaaggttgaaagacatgcaccctcctttgaacaatttaatcccagtagttagagagttattttggtagcgtacttgtcctttggagtacgatagactgcacgaattcttttaaattaattatattgcaattattgcattatatttttctgttgtttttataaataccttaatgagccttagagtctaacaaacttaggataaattttgataaacacttaaacaaatggttaattatttaacatgctattgatttaatatggatattattattgcatatgaaaacatacttatggaactatttatggctatatgctaagagctgttgacaccgcatgtgagcaggtggtacacatgatagagttcatgtgtttggttttatggacctgtttatggtcgtgatggatatatgtatatatttatggttatttcttatttaaaattgatataataatcaaccaccttgtgtcaataagaatgacatagttggccacacgatcgatttgtcgaacctggccgtatattgctccaattgattgaacttctgtaggcctttcggtgtactggccattagctttcaagtgtatgaagcaaagtgacatggttcatgtttatatgatttatatatgtgggcttgatgggccccgagaattcagaactaccctatgggtccatgaagttctgggctgcccatcgagtaacaaacaatggtaagtggatgcggaggtaggttggcacacacctcggaccggatcactccgagcaacatcccgagcatcctttaacttactaggcagaagggagagatatatggagcaatattacaccttgttacttttcagcccggccagctgtgggtatcgtgtgggtaaagctaggcagacgctgcagagtcgttgagtattcgtatacgccgtgctctcggttaatggagatgtgtctatgggtgattccagattatgggcacaagttaaactaaatggctactaattaatatggttaacttatttattatttgatgttctatttaagttatctataagtaagatttgtattttttttatgctcgttattattgtttaaattaaatgttcaatagtgttgtttatattaaatgtttattaagttagcctctaagaaataactgttaaggttagggtttaaaccttccagctctcaatactgcatgtttatcataagcatgtcttgctgagtaccatttgtactcataaatgggttcagatcatgaagaggaagatgcatgtggagaacctgttgatctgtgttggcggatggcatgaggccctgcgaccaaacctgccgaaacccatggcgaaggctatggagcgagagcggcgcaaggcgaagagtagcgccaggccagaggcgtctcaggcgaagggtgcaaggcgaagactgtctgccgaaggaggatgacttcgccttgacaagttcgcccccgcgagggccgaggaaacctttccggcccatcaggccggcgatcgccagacggcccatcaggggcccatgagcccctataacattatgtacccctgtaaatgccccttctgtaagggtaatcatgtaaattcccctgtacaacctaaaccctggtagtaaggacctgtaatggggctataaatagtctcctagggccatgtaatggggggatcccaagtaaaattcaaaatttagtacacttcatttttccaaccactgttgagtaaccacgtctttcgacgtatgcagttttcgtttcgacaacagctggcgccgaccgtggggactccgagcgaaaccactgagagcgaatgccaccgaagagggtcgtgaaggagaaggttgccaggcggaaggagagcgacgccggaccagacatggccgccgaggaaggagcagagccttcggcgcccgtggccgaagctggaggagcacaagcgccatcacaaccgccttcggcccctgcaacctcggtgcacgtgccgaacgaggccgacgtggcaaaggcggctgcggcggcaagggcactccagaccagggcggagatcctttcgacaagccaaccggtggtgccccaggcagctccatcacagccggcagctaccacaaccgcgctcaccgttgtacagtcccaaaccagccttgaccccgaagcacaagccgaagccgacatggaagccatgcggcagaacatgacacggctccaagacatgcttcgccaaatgcaagaacaacaacaagcatacgaggcggcaaggcgggtcaaggccacgtcggctccaatccttcagtattcggcaggctatgtcccacatcaagtccatccgcaagtgacgacccagccctttccgccacaagccgcacaggcgccggtgtagttcgccgggcagcatcaaccaactggccaagtgccacaaacagtggcggaagggacttcggctctgcaggcgcaactccaagctttccttcagcaactcaaccaaccccactacatttcaagtacaaccccatcggttcacccggtggggaatacaagtcaaggtgcgcctacttggttgccatcgattcagtcaggctcgggagcttcgccgtggaatcagggactgtagttcgactgcgccaacgttgctcaggcgccaaccgttcggcagcaagctccgaccccaggcttcggaacaaaccaagcaccaatccaagctgctatgacgtggtcgcagccaatttttgacccatccatggcggctcagcaagtgcctccagttggagccgggcagccgaacgccatggcccaacctcacgcacaagctgcgatttcgcccttcaccagaccgtacccgcagcaaggtgcggtaaacagggcgggaggcgaaaaggggctaccgctgagtgggggaatcaagactcatccaatcccaccccagttcaagttcccacccgtcccgcgctattcaggcgaaactgacccgaaggagttcctctccatctacgagtcagcgatcgaagcggctcatggtgacgaaaataccaaggcgaaggtaatacatctcgctctagacggcatcgcccgttcttggtatttcaatttaccagccaatagcatttactcatgggagcaattgcgcgatgtttttgtccttaactttcgaggcacctacgaggagccgaaggcgcaacaacacctactcggcattcgccaaaggccggggaagtcgataagggagtacatgagtcgcttctcgcaagcccggtgccaagttcaagacataaccgaggcgtcggtcataaacgccgcatcggctggtctgcttgagggcgaactaacgagaaaaatcgccaacaaggagccgcagacgctcgaacacctacttcgcattattgacgggttcgcaaggggtgaggaggattctaggcgacgacaagctatacaagctgagtatgataaaggctccgtcgccgctgctcaagctcaagcgcaagttcaaattgccgaaccacctcccctctctgttcgccagtctcagccggcgatccagggacagccaccaaggcaaggccaagcccccatgacttggagaaagttcagaacagatcgagcgggcaaggctgtgatggctgtcgaagaagtgcaagccctccgcaaggagttcgacgcccagcaaacaagcaaccatcagcagctagcccgcaagaaggtccgaaaagacctctactgcgcctttcacggacgctcttcgcacaccacagagcaatgccgaaacattaggcaacatggcaacgcgtaagacccaaggccgcagcagggagcaactgtcgaagcaccccgtgaagcagtccaggagcaaacacccccagccgaacaacgccaagatacacaacgaagggtaatccaagtgattaaaagagccgacccgccaagccagttgtcgaaatggtagagaaagatgcagatccgcatggtccacagcatcacttcggcgggtgagggggcgccacagtacgtgaaccagctgatctctttcgggccagaagacgccgaaggagtcctgttcccgcatcaagatccactggtgatctcagctgagatagccggttttgaagttcgatgaatcctggtcgatggagggagttcggtcgacgtgatcttccccgaagcatatgctaagatgggcttgccaacccaagctcttacaccggcacaaacgtcgctccgggggttcagcggagaggcagtgcaagttcttggccaagcacttttgctgatagctttcggctcgggagaaaacaggcgcgaagagcaaatactgttcgacgtcgtcaacatcccatacaactacaatgccatcttcggccgtgcaaccctgaacaagttcgaagccatttcccaccacaattatctcaagctcaagatgcctggcccaaaaggggtgatagtagtcaaggggcttcagcattcggccgcttcaaaactcaatctagccataatcaacagagcagtgcacaatgttgagaccgaaccgcatgagcggccgaagcacacgccgaagcccacccctcacggcaaggtaacgaaagtgcagattgatgatgccgaccccacaaaactcgtatcactggggggcgacatgggcgaagaagaagttgagagcatactagaggtgctcaaaaagaacatcgatatcttcgcctggagccctgacgaggtggggggcgtcccggcggatctcatcatgcatcacctagcagtcaagccggatattaagccaagaaaataaaagttgcgcaagatgtctgccgatcgccaagaagcggtgaaggccgaagtacaaaaattactccgggcgggggttatccaagagattgatgatccggagtggttggcgaatccagtgctggtgcggaagtcaaacggcaaatggcgcatgtgtgtcgatttcacagatctgaacaaggcgtgtccgaaagacgatttccccttgccgcgaatcgaccagctcgtggattcaacagctggatgtgagctcatgagtttcctggatgcatattccggttaccaccagatccacatgaactcgctcgacatccccaaaatgtccttcatcactctattcggcacattttgaagccttcgtcaaaatgaagcctccgtcaagcgtacatgaagtacaaaagcttgcaggagctaaagcaatacttgcaaagcccaccagctctgaaaagcccacccctaggaagcgaactgctattatacttggcagcttcgccagtggcagtcagtgctgcactcgtccaagaaacagagtctggacagaaaccggtctacttcgtctccgaagcactgcaaggagcgaagacaaggtacattgaaatggaaaagcttgcttacgctctagtaatggcttcgcgcaagctcaagaactacttccaggcccacaaagtcatagtcccatcacagtaccccttgggcgaaatactccgatgcaaggaagtcactggccggctcagcaagtgggcggcagagctatgcccgttcgacatgcattttgttgcacgctctgctatcaagtctcaagtgctagctgactttgtagctgaatggacaccggtacttgcccccgaccccgagcccgacgaccagttctgggtgatgtgctctgacagttcgtggtcgcacaagggggcaggcgttgcggcagtcctcttttcgccgaatggtgtgccgattcggtacgcagcgagattgcagttcgacacaaccaacaatgcagcggaatacgaagccgttctccttggcctaagaaaggcgaaagcactgggagtccggcgcctactaattcgaactgactccaagttggtagcaggccatgttgacaaatccttcgaggcaaaagaagagggaatgaagaggtatctggaggctgttcggtccataaaaaatgcttcaccggcataacggtcgaacacttgcctagagaccaaaatgaggaagcagacgccttggcgaaatccgctgcttgtggtggcccgcattcgcctggcatctttttcgaagtcctacatgctccaagtgtgcccatggacagctcggaagtcatgacaatcgaccaagagaaactgggcgaagacccatatgactggcgaaccccatttgtgaaacaccttgaaactggctggcttccggtagacgaagcagaagtgaagtgtttgcaactcagagccacgaagtataagatggtctcgggtcagctttaccgctccggggtacttcaacccttacatcgtttcatctcttttgtcgaaggcgaagaaatggcaaaggaaatacaccaggggctatgtggcgcgcaccaggctgcaagaacagtggcctccaaagtgtttagacaaggagtttattggcccactgtgttgaaagtctgtgttgagcaaatcaagaagtgcaaaagttgccagcgtcatggccaaagccaagccgtgccccagtatgatctgcagcccattgcaccaatatggcccttcgccagatggggactggacattattgggccattcccggtggcgcgaaacgggtataaatttgcaattgtagctatggaatatttctctcgatagatcgaagccgaaccccttgggttaatcacttcggcagcagtacagaagtttgtatggaaaaacattgtttgccatttcggggtg

SEQ ID NO: 18722 - DNA, 3773 bp, Oryza sativa
acagttgagattttgagaacagtaaaaaatattgattagcaaactcacttccaatagcaatcacagcaaccataatgtactggtttcagcactaaaccccgcagacttgcagaagaaagaaactatagataacaatctatacacctctctactactgttaacaaggataaacatgccaatgctgctgtttcatggcatactatgttgatccatcaagtagatacagtcatactaacgaactcacacagatgcttcttaggctttaaccaagagtccaagactaacatgctgttcttgacaccacacttcgatagacaaaaatctactttactaacaaaagaaaaatgatctgtctaggatataaacagacacaaaaacatactcatgagcagcactgcaaaattactagacaatcgatcatgaaccactagaagtgaagctaaatcctaattatagtctccaaaaattcagttggattacaccattatgcatttgtgatttccacgcagcagttacatatatatgctaggactatacatgctctagtaagaaacacattatctgaaaaaagttaagcataaagatgagcatataatgaaattacggtcattgaacaactgcatataacaccataagctgataagcatcacacaatcaatctatatcagacaaaccacatcgtgtaacaagtaaaagatgaacacttgacgataagatcttaacaccatccatagagatatcataggtattacagtgacatcagttcaataccaaaaattgcatacttgaacaaaaaactactagggaacaaacaaaaaaagggatccatgagtattaattaatgagacgggggcaaaggagcgatctctagatctacttctcggaggagtttggcccgcgcttcttgccgaagccgacgacggcggtgacgaaacggcggttgtactgcatccgcttgtgggcgcggccccggggcttcttcttcttgtcctgcttcgccaccttcggcgtctgccccctcaccttcccggcgcgagccagcgagccgtgaaccttacctgcgatcgaggcgggcaaagcacatcaatcacccaccaaatcgcacggcctagagagctacagaagcaaggaatcacgagggaaagagaggactcggaggagatggttacccatggcggcggcggcggcggcggcgctcggacgatttgggacgacgaggcggcagcggcggctggtgtgatgagacgaagccctagatgcgtgggagaatttataggagatccgttgctgggccgggatattgttttgggcctttgggattctcggcccatttcacgtgtctcgctacaccggaggcccatgaagagcccagtagaaaggcgtagtgtagtgggaaccctcggggagtcgcggcgcgagcacaccactgacctctgcggcggcggcgaggagaggagaggggagaagccgaggaggaggcagcggggagagaggatgccgcggccggaggtgcaggcgccgccggagatattctacaacgagtcggaggcccgcaagtacaccacctcctctcgcatcatcgaaatccaggtgagcttcttgccagttcgcggtgctgggtgtggaggaattcttggtctcatgtttagttatgttgcagtcgaggattaccgagagggcgctcgagttgcttgcgctacccaacgatggcgtccccaagttgcttctcgacatcggtaatgcttttacttcttcctgctcaaacgatgtgttgatttgattaaaaaaagttgtttttggtacaattactttgcttagtttgtactatgttttgaattgcagggtgcggttctggacttagtggcgagccattgacagagcagggccatcactggattggttatgatatttcgaagtccatgcttggtgagcacctcgctttgttacttgctcttaaggaaatcttggcttattgcttgttggattttttttttggctgagtgctttaaatttcttctgtagatgttgctctggagcgtgaagcggagggtgatctccttcttgcagatatgggccaggtataatatgcatcttattaatgtatggttcaagaaatttcaatctcatatgttatgtttatgctgtggtgtatgccaatactcttaaccgtaagggaaatgcttgtcttgtttatttctagtatcacacttgctctacttaataaatcataagtggcagggacatactcccttaataacactaatatttttcattacttttgctattgaccgtgaatccatgattgttctcaaaataatttctactctgaaagtaactatgagtctaggaattcaaacctttctggagagaacaagagagaattaacccaaacagttggcttctccgatagtactatgatttctgaatggctatattttttttctctgcacatggcctggcgaataatattttctgcacaatctcaccatcctttggttaacacaaatacagcaacttcttcacagttgcttcaccacaacttgtctagctttaaggtgctgcatgtgtatttatttatattcaatcctgttccagggtttaggcttgcggcctggagttattgatggagcaatcagtatttcagcagttcaggtaatgtttgagctgttatgttactgcaacaaactgaccatgttgatctcaaatctgcacttttaatttgtcctctcaactgtgtgttttgtttgtgcagtggttatgcaatgctgacaagtcttgtcacaacccaagattgcggttaaagtgtgtatttattgtttctcttagcctcttaggttgcttgcaaccagttcataactttcatatgtgcataattttcagggctttctttggatcattatatagatgcctagcaaggggagcaagagccgttttgcaattttatgctgataatgtgaaacagagtgaaatgatcgtgactgctgccatgcgtgctggatttgcaggtggagtggttgttgactggcctcacaggttagtattttattacctcacaacaatgccatattagcgtacgaacaatgctacgaatttcgttactgatatacaattatgggcatgccttctttcttacagttcaaaagcaaagaaatcctaccttgtcctcacttgtggaccaccttctctaaattcatcgcttccgaagggtaaaggtcaagatggtgccatgtgtagtgatgatgatgagagcgatgatggaagtggtgatgaagatggagcccaaacagtaagcccatgctttacaagcttgttcatgcattgcattgtgctatgtttcatgtttcaagggaactacttactgcttcaacggatggcagtatattgcattctttgtccagagcttccccttgatattgttatattgtcgcctttacatcacataagttgtgataccgttgctttttgtgtgtgtgtgtgtgtgtgtacaaaatctttctaccaatctctgcttgcaagttgcattgttcctgtggtgttttactaacttattattcagttttaccttagatgttcagtagttatagaatgctgttgtcttggaggaggtactagctaaatggttgtgcttagtcaaggactcaaggatcatctatttcatacttggttcttactctattttataggacctaatattggggtttttttccctcccttttgatgttcgaccggcttagatgaatgcttatatttttggtatgcaggtcggcatatag

SEQ ID NO: 18723 - DNA, 632 bp, Oryza sativa
ttcagtatcagcagcaagtgacgtaaaaccatcacatgctttagggaataataactgcaactacataaaaaatcatgccactttacaagcataccaaaataagaacgttgccgatggaattaattaacagattcagcctctttgttgccacttcacagcctgagaactttgagcctctccaaaacaaatgcaacagctcgtgggatccaatgaattgaagaatagcagattggactacaccataacagcgattaatataaatgcattccgcggtaactatttacaggctaaaggttgtcttttagccacttggcagcaccattagcaatggatctgaaagaattcagtaagcaacatgatcaacaaaagaatgcagaattgcataggatagagaaacaaagaaatcccaatttgtattttcaaacttcaatagaagcaagtatgtatattgagaccgtcagttagcatttttccttctattcatttttggaacaagggttgcactaatcaatattagaagtaaaaatgaatgcaaccaacagagttagacaggctacaacctgctgtaaaggaggtcctgtaacaacagttttacctcattatggatcattcctgaaagagcatattttcaa

SEQ ID NO: 18724 - DNA, 2333 bp, Oryza sativa
atacccccggccccatgtcaccgacaagctgaaatcacttctttctgtcatgttagcttcatccacctggcaagtttctactttatggtttcaaaatttagttgctaacaactgaccattatcaattatcttctgtcagttctgctcaacatactttttcatagatgaagtgctgattcagatgtcatttactcctttcagcctcttatatctggttcagcagtaggtttggaaggacaggtactgctgtttttagtaacacgacgactttgacttatctgttcattttagtgacactcatctgaactttctctaacagctgactgtttatcatcacaacggaagtccatgctaccggtgtctttatccaaacccaccatcgtcgccaacatcgcagagttgttccgataatggtattcttggaattcgtaagtaattatcttctctacgtagcaaaaaaacaccctatgaaaaggcatgtggatcaaattgtgagaaatttctgcatctcaattctaattgtaccaacatgaagaaaatttcggatggagattctcgaatagaattcaataattgagggttcttttatcttgtgttggtgtcttttagtttatgttttctttacattatgtcagtgtgtgctgagtttgttcgtgtgtggactttgtaataattggttgtatctcgttgagcaaaagccggaatgttatttcattatcttaaaaaaaatgaagaaaattaccaactacagtagaatagtagaggaattccataggtataggtatattatcttcataggtacatgtaaatgtacttgtcgtggatgtagaggccggttttctaatatcccatccatattgtctatatgaatgatccaatgtctacatttttgtttgttagttccaggagtaatcggctgccttcaagcattagaggctataaaggttgcaactgctgttggtaaacctctctgtggaagaatgctacacttcgatgcactgtcctctcataccaggatcgtaagtcagttcattatgtccatcgactcaatttcctaaacagcaaccatcagaatcctctgtttcaatctccctgaaaggccataaacggttacacaaactcctgcaggtcaagatcagtaggagttcaccaacttgcaaggtctgtggagaaaatcctgttttcaccaaagaggacttcgtgaacgttgattacgagagcttcacacaatctccaatgtccaaaaatgtatggatcgctctttttgttgggttcttagattgtatcatcggatatctgtgcatggcaatatgacatcaataaatagtgcaaacttcatatgtagtgtaaatctaaaaactatcgtaggatacgcaaatggatggcgtgaacaaatcttagacgtccatttatatatcatgtggtagttttcaggtttgcactacacacgaagtttgcacaattgcactgtgtattttccctggcatcactcctaatcactctctgtttgaactgatgatgattgcagtcgacgacgcggagcctgaatcttctcccggagaacgcccgggtgagctgcagagactacaagaaggtgctcgacagcggcaggccgcacctgctggtggacgtgcggccgtcgcaccattttcagatagcgtccatggctcactccatcaacgtcccgctctcgctgctggaggagaagctgccactgctgcgggactcggcgagggaagtgtcgtcgcggcgcgacgggcggcagcactgccctgtgtacgtcatctgccggcgaggcaatgactcccaggtcgccgtgcagatcctccgcgagaatgggttcctgtatgcgagcgacgtcgccggtgggtttgagtcctgggccaaggaagtcgaccccagcttccttctctactagccagatgctttacatagttgatagttgcaacttgcaagtaacttgtactagagattagagaaaaggacatatgtagttgccttgaaggttcaaacatgagtcaggtgcctaatgttaaatgtaatccatttccagtgtataaaagaaaaaaaaatgaaggctcaaatagatgtgattgataatatgattgtatttaccactcctcttaataaaaaaatgtgcgtctcgcgtattccaaaaaaaaaagataatatgattgtatttagatcatgagaaattcacatgagtctgtcagacattgaaatggggtgtaaaatttttgttcctggagatcaagttcaaacaaatgagataccataaccaggtcaaggtttacctttgatatctgcctcattggtcgtgtgttagaggcgta

SEQ ID NO: 18725 - DNA, 609 bp, Oryza sativa
gtttgctttgtatgatggagaagaaacatcagcatgctatgcttgcaagtatcgttcacatagtaaatggagattgggcttctcttgtttatgatttgactgcaatggatgttgttccaccaagaactaatctacgccgagtgacaatggtaattcatcaaaatgcagaatatttatttatatggttattacaagatggaaaaaaacaaaggttcttatctcatactccctccgtcccaaaatataagggattttggatggatgggacacatcctacttttacaaatctggaaagggagcttgtagtgttatttagtttgttattccattattatttttaatgtttgttgattggtaggacttggaggatgcgttgggtgaggtgacctttgaagatggaattccagatatcaagtttagcagggtgtgtagctttccctctttaagttcagttataaactgcggcatgtctctctctttatcggcatcttcctgaactgttaaaaacatcctttacgtgcttggaaaaatatggtctgtggcatttaaataccacttccgtatgccgcctgactacacgctcgtcctgaggtcacttgcctctttgga

SEQ ID NO: 18726 - DNA, 2082 bp, Oryza sativa
  unsure (1)..(2082): unsure at all n locations
cgagccctcattgtaaaaagcatgtttcccttcttaggcagcgagaggcccatgtggtgaccccggaccagataaaaaggaggcccaggcctaggaggaaaaaggggaggaaggggggttgggactctggggaatgggttctagagcctgaactctctctcgctctccagctctctgtattccttcacgcacagatccaccagaacacaggagtagggtgttacgcttctcagcggcccgaactgtctacgtcgcccgtgtcttgtgcatttcctctcccgctgacgttcctcagatcgagggcgaagaacctcacttagcgcccccggccgaaccggcaaaggggggcctgcgcagtctcccggtgaggagccccacgctccgtcacagcttatatgtactattacaaacagagatgatgagaaacaaagctgaactttataccttgggcatcaggacacaacaatcactgatcatgtaccgactagggacggggtttgttgcgtcaactactatgtcatatctgtgatattttagtagtgttggaaacaggaataagaacaaacaaaaggacatgattgatatttcctattgcattctaaggatactgtcgcataatatccaaagcgttgctcgcattcaaagtgatatgatactcgaacaccttgatagaggagttaattctgatttcatgagaaacatatatagaactaattgatatcactttgtaggcacacataagtgagattgcttttacaatttatatatgatagattatctgcccaaatgataacatcttacgcacggcaagaagcagcagttgatttcacctttggttgtccaacatatgcttctatgtgtattatctgtaaaaaaacattgaggaagaatttaagatatttagcctcccttagatgttttacaaattacaagtcctattgttgccaaaagcaaaccatgtaagaaaatgcaagccactagtctatgaaaattaaaaaaaaaacttaactagtcaataagttctttccaccctgcaagttaattaacctaataaagtggcagtcgatgagagtgccttcctaggaagtcataacattataaatagagctccaataccatcacatttagaagaaagtgcaagagaatatgggggacaggtaacgggtacctgacgatgcaggttgtcaagttcaactcgatcgccatcaacaatacctaagcaacctaacaaaatacaccaagtagtaaatcaagccatggacgattaatcacaaaaggtatcatcgcattcgaagcaaaaatatctgttcctcaggagaagagacattctttccgaatgaactagtacgataattgatacctgatgaacagctcttgttgtaaaggaaatcgcaataatttttccaagtcaaattactacaatgtttagggtgataaaaaaaggggaattcggttttaccgacgccacaagcagccagatacatggccacaggcgagcccaatnccacctggcaccgactcaccaggtatgggnnatgattgnnggacagcttccgttgccctgaaataacaacgagtggatgaacagtggtagtacaggctagaagccaagcaacgagcgatgatgctgaagagctaccttcgaggccgaactgagggaggaggaggtggcgtctgtagcggctgatcatgtcggcggcggcggaggaggaggaggagggcgatcccgtgggctccacttcggcggcggcggaggggggaaggggagcggcgccgaggcggagctgcgactcgagcaggcggatgcggccgtccagctcctccctctccgcgcgcagcctctcgagctcgcgcatgatcgcctccgccctgctcctcccgccgtcgtcgtcgccgccgccctccattggcgcggtgccggtggggttgggtcaccttctccacggagctaggagcctaggagtagtagtaggaatagtactccagttgcccagttgcacggttgcaagggtgcaagggctggtgaaaacggttaccagccacaggtacgttgcgccaatcggactgactggcaattgccaa

SEQ ID NO: 18727 - DNA, 646 bp, Oryza sativa
acttggtcatgacggcgcagcagcgcctaggcgccggcgggcggtcctccgcacgaggcctctggcgctaccgccgccggctccatgtcgtcgaggcggagggcgcggcgagcggcggccgttacccgccgttcatccgccattccctcgtcaacgcctccgacccaagaagatgtgcgtggggggccggatgcccgcctcgatatcgagcgccggcgcgacgctcgtcgcgccgcccacgcaacggagggcgcttcctcgtctggagcgccacttcggtccgggcacgggggccggccccccatgtccccggttggcggtgccagctgtcgagcctttgtggcgagccttcggaacgtccgttggcccccaaggttccggcccaccatcaccgaaaaatacgacgaaacgtcaaccccgccgagtttctccagatctacacgaccgggatcgaggccgccgggggtgacgacagggtcatggcgaatttcttccccatggccctgaagggtcaggcgcggggttggctaatgaacttgccacccgcgtcggtccactcttgggaggatttgtgccagcagttcaccacgaacttccagggcatatatccgcgcccaggcgaaaaagcgtatttgcatgcggtaca

SEQ ID NO: 18728 - DNA, 1855 bp, Oryza sativa
agtttcaccgcgaaccggccagaacggtaggtgggcttgggctgcagccagctcttccacttccgtaagaaccggaatctggctcaacgcgtcactgctctcggcccattaggtggccgacgttctccggcccagctttttggtttatgaagagagcgagcgatccacgatcaatctggcccacgatccactccacaacccatgcctaccgaggctttcttgtttccacgccgtgtataagtattgagcattttggtgtttcttagcaatgcaccacgctctcttttctttgatcatcctactagtcccccaatctcaaaataaagtattttttaatatgaatctggacataaacaaatattttttttcctggaggagtagtacgatacaatctgcccgtcagaacatcaagcagggcagagttgcctgtgatttgtcagtctactgtctactccctccgtcccaaaaaaaaagataaaccatgagttttcgtgccaacatttaactgtccatcttataaaaaaaactataattagtattttcattgttgttagatgataaaacatgattaatactttatgcgtgacttatatttttttcataattttttcaaataagacggacggtcaaacgttggacacggaaaccaaggtttgtctttttttttggacggagggagtacattgattcggaaggacaatctcatatatccggttttggaattggaaatttgaaacagaattttcttcagatgaagaaaaaagtattgtcatcagcttatatggtgtgtgaaaaaaaagagagaaataaataaaagtagtattatagtacaagatcagtttgcaaaacatatagaaggtgtaaaaacacagaactctgtaaacattctcaaaacctagccctgggcacacatgagatgtgcccaactacagtatatataagctagcagtatatagtctttgacagaaagctctttctctcgtcctaacatcctgactgaaaacgaaaacatgtacatacatcagtgcacacccacacgcagatgccaggcaaccaaaaccgagctgtgctccatcaactcacgcatgcatctccttcagttcagttaacccagtatcttcaggcgtttcacagatcgtgcaaaatcactgcaacaaacaaaacaaaggattaacatgtcagtattacacagaatctaatgttcaatcttgctgattcattaagttatactaacactgaaataactaagcttgaaatcgacttactcccatggcacgtccccaaccagcatccaatccccatcaccatcctcgtaggtgaccacaggtccagcggcatcgccatgatcatcattggccattttcttctcgcctgtaaatatatcacgataaccaaacctagcatcagaatcattgatcgcaatcgaattcggttactagattctgcttgcttttgtaatcacatgtgctgatgaacaattgggttgagttaaattagctactgaccttggtggtcgttggtggggaacatgcgggcgagcgtggcagcgagctcgtcgtaggaggaatggagggccaaatcaaccttcctcccgatggcgtcgccttccttcttcaccttcacgtagttggcgccgccgcacgcccgccgcgccgagctcaccggtggccaccccaccaccgtcttcttcctcctcctgcaatcgtcgtcgctggtgttgcagcagctgccgtcgtcgaagagcagcagcgtctcctggaacgcctccctgaatcccctcttcccggccgacgaggcagacaccggcgcgctgccgctgccgccgccgctgctgctgctgctgctgagctcgtcg

SEQ ID NO: 18729 - DNA, 903 bp, Oryza sativa
gctcctggaaataatggcgcaacttcctcgaagccatcagaatagcataaagcatcttctgggcctgagggtatcgggtcttggcgtcccggagggcctcgctaacgaagtagacgggccgctgcacctttcggcggggccgatcctcttcgccaggccgcatctccagggcgctcttcgtccgagaggccacgcggggcgcactcggcttctgtgccgacgacctcggggtcagagggcgacaggcgcggccttcccgcagtggccccggggccatcctgggggttgggggcgcctggcaccgtcggacaagcaggcggagggccagctccggccgtcgggggccttgggccgccgttcggctcaggggcctctcctccctgctctctcccgggtcgagtcgacacagggtggggatgcgcggagtgagggttgtcctcgtcgcgctccacgaccaacgccgcgctgaccacctgcggggttgccgccaggtagaatagcaacggctcatctggctccggggcgaccaggactgggggagaactgaggtacgccttcaactgagtgaaggcccgcttagcctcctccgtccaggtaaacggcccggagcgtttgaggagcttaaataggggtagtgccttctctcccagcctcgatatgaaccgacttagggcggccatgcagccggtgacgcactgcacatccctaagcttgctgggggggcgcatccgctctatagctcgtatcttctggggttggcctcgatgcctcaggcagagaccaagaacccgagaagcttgcccgcaggcacgccgaacacgcacttatcggggttcagctttatgcgggcggagcggagactttcgaaagtttccgctagatccgagagtaaggtctcttggt

SEQ ID NO: 18730 - DNA, 2654 bp, Oryza sativa
aatgacatttcaattcaaaagccctaagagtttcaatatcttacttaaactacttgagaaagaatagcaaatcatacaggcagcatttttcttggccggattggcacctgcaacataaatgctgggaaagttattggacatcaggcactaaccttgctgacagggctcccgctataagtttcataaggaccttcttttgcagcaatttcagcagaagctttcaaggcatgataataaatagtctcaaaaatatccttgttcaattgctgagcctgaaaagatcattgcatcgcatttcagcgaagtatatatagattggaataaccacatttttaggttggaaaaatttacctctgttgaatcaaatggcatgccaagtaaaatgaaggtgtctgccaagccctgaacaccgattccgattggcctgtgcctcatatttgatctctttgcagtctcaacagggtaataattagtatcaattattttattgagattccttgtgacaattgaagtaatctgcaataaccaacaaatattagtagcattcaggctagtgggaagaggcataaagtaagtaaatattaaacacaaacctcagctaatttatcaaagtcaaaatatcggtttttggatccattactaccaacaagcttagccggatgagactccataggaacaccctgaacaaatttgtgtcgtgagatacagaaatttcaacctacaacaaatcaaaaattatacagccagtactgcatagtgcataccttttcccttacaaaacgcggtaaaccaatcgatgctagattgcacacagcagtttcagtgggacttgtgaactcaataatctccgtgcacaagtttgaagacttaattgtccccaggttttgttggttactttttctattacaagaatcctgcagaccagatttcagaaataagcatatgtggcaacagaattgtaggcaaactactgttccctttatgaattgcacaccttataaagcatatatggtgttccagtttctatctgtgccttcaaaatgtcaaaccagagcgcctgtgctgaaacaactttctttgccttgccctgaaattgcatgctaggttaacaaatattctttagatattacttcaataaactgcacacccagcacacatcttacctctctttcatatttcttgtacagattctgaaactcatctccccaacagtcagccaaacctggagcttcattgggacaaaacaatgaccagttttcattattttgcaccctttccatgaacagatctggaatccagagcgcatagaaaagatctcttgcacgattctcctcctgcgaattgcacatggtgagtaaatgtgtttctgtgttatcaatttctaatgtctatcagaaaatgcatcctttcaacagcctttacctttccatggttctttcttaaatcaaggaactcaaaaatatcagcatgccaaggctccaagtatatagcaaatgcacctaaattaatgttaggaatccataagaaatcctgaacactgaacatgtaaattaggtccatgtctaactaactgatggtatttaccttttctcttgcctccgccttgatcaacataacgtgcagtatcattgaaaacacgcagcatgggaacaatcccattagatgttccatttgttcctcgaatgtaactcccagtagctctaatattgtgaattgagagaccaattccaccagcacatttgcttatggtagcacattctgagagagtatcataaattccctcaatgctatcatcgttcatgcagatgaggaagcagctacttaactgcataaaacagagaggagcataagagaccatttttaataatccaaattggacttcaatggtaggaagcatattacttgaggccttggagtgccagcattgaaaagggttggcgaagcatgagtaaaccagcgctgagacatcatgtggtacgttttgatagcagattcaatatcatccttgtgtatcccaatagaaactctcattagcatatgctgtggtctttccacaaccttcccaacaacttttaacagataagatctctcaagggtcttaaaaccaaagtagtcatagtcaaaatctctgtcataaattatctcactgtccaagcgggtggtattctgaaatggtgcatcatatagaaattatcaagtcacattggcacaatatacatataataaaaaattgaagcacctgaagaaatatatccacacaagaaattgaacaacgcaaaaaagcagcattgatataagaaaatttcaagaactccaacaaagccaataaagctaaacaaatatcagatcatcaaatatgaatttcaaaccaaatgacgggcaacataagcatcataatggatccaaaagaacagaagtaaacaaagagtcacggcaatacacgtgaataaaatgttagtaaataaatgttgaagaacaacctattggtgcgattctatagaagtgacatattgcagcaatacatgattcggaaacaatctttttgggggaataatatcataagaaaacaaataaacagttaacaatttgcgaggcggtcatcgtcacaaatgttaattgcaatcttcatgcatgccatattgcagaagcacaca

SEQ ID NO: 18731 - DNA, 3434 bp, Oryza sativa
agcgccatttcgacgggatagagcttcggcacgtgcccagacgggataacgcggtcgccgacgaactctcaaggctcgcttcctcgcgagcccagaccccaccgggcgcctttgaagaaaggcttgcccagccgtcggcgcgacccgaccccctaggggagacggacgcgcctgaacggcccccgaggcccgtcggagtccaggcctcgggacccgaggggagcgctcctagctcccctagattgattgcttggatcactgagatccaggcgtacctcgcagataagactctacccgaggaccgcgaagggagtgaacgcgtccggcgcatctccaagcgctacgtgctggtggaagggaccctctatcggcgcgcggctaacggagtcctcctgaagtgcattcctcgggaacaaggcgtcgagcttatcgccgatgtccatgaaggcgagtgcggagcccactccgcctcacgcaccttggttggcaaggcctttcgccagggtttctattgaccgacggctctcaacgatgcggtcgacctggtccggcggtgcagggcgtgccagttccacgccaggcaaacccatcagccggcccaggccctgcagaccatacctctttcgtggccgtttgctgtctgggggctcgatatcctgggtccgttcaggcgggccccggacgggttcgagtatctgtatgtcgctatcgacaagttcactaagtggcccgaggcttatccggtcatcaagatcgataagcactccgcgcttaaattcatcaggggcatcactgctcggtttggggtgcctaaccgtatcattacggataacggcacccagttcactagtgagctcttcggtgactactgcgaagacatgggcatcaagctctacttcgcctcccccgcccaccccagaagcaatggccaagtgaagcgcgccaacgcggaaatcctcaagggcctcaaaaccaagaccttcaacatcctcaagaagcacggcgactcgtggatcgaggagctgccagcggtgctctgggcgaaccgaaccacgccaagccgagcaaccggggaaacgcctttcttcctcgtctacggcgcggaggcggtcctcccatctgagctcaccctgaggtcccctcgggtcaccatgtattgcgaggctgatcaagatcagcttcgccgagacgacctcgactatttggaagagcgaaggcggcgcgcggccctccgagccgcgcgctaccagcagagcctgcggcgctaccatcagcgccacgtccgggcccgatcactctgcgtcgacgacctcgtcctacgccgcgtccaaacgcgtgctggactgagcaagctctcaccaatgtgggagggtccgtatcgagtgatcggcgtcccccggccgggctccgttcggctagccacgggcgacggcacagagctgcctaacccgtggaacatcgaacaccttcgtcgcttctacccctagtgggggtcgggtgtcatgtctcgggctcgggccaaccccgcacccccccgggcgtgcagggttggccgggggctaccacatgcatatacttaccttttttctcttccgtatttcaataaaagcattttcgatttcctgaggactgtgtctgtgccatcgtttccttttgaagaatcttggctcgaattagcacgctcgtgctcgaccctgccctcggtggcccgggtcggctaaaatcgccaaacggggcccagaaccgagccgtgccccggggcgtggtgaactccgggggggaatcggcaaaggcccacaatcgggtcatccataaccctcggtcaccgcgctcccggcctggccagtctcgacacgaggatctccccaggcactagccccgacccgcgccgtttgaggctgggacctgggcacgagcccttgttcaagccaagacatagaaggaccgcggcacagaccatcctcgtctcatacacacaacaaacagaactgacgcagaaatttcctctttacttgattgcagattaaatcagtctatacaagaagggggcccgaaggcctcggaagaagaaggaaaagttattaagattggcgggggcctaggggctcactccgacgcgcccgggttgccggcctcgtcgtcgctgtcgtccgcaccgtcgtcaccgccctcctcgtcgaagacgagcgcgaacgcgagccgaggggctgtaccctcgaagctgtggacgatgtggtcggcggcgtcccggacctgcgcgcgcgcgccgtcctcggttccgggagggaactcttccagcgctgcccacggggagaagtcagggtccctggcctggtagcttgccagcacgagctccaccgccccccgggcgaggtccctcgaagatgacttgatcgtctcctcgagctcctcggggagccgctcgagggccccggccatctctgagaggcgctgggcgaggcccccctagttggcggtgtacttcgcgtaccgcccgtcccagaggcccgcctgccgcccggcgcggtctagacaggagacggcgtcccgaagcatgccgggccctacctcgctcgccaagcggagggcctcgacctccccggcggacgagtccagcgcgccctgcagctcggcgatggtgtgttcggcggctgcgaggcgggcggctaggttgccgtggcccgcggccgccccgccgctgtgcgctctcgcgtccagctccttcgcccgcgcctcgagctcagcggcccgctgatccagtgcggccctctcggcgcgggtgccttccagattgcggcacgcctgctcctcccgcgctgcctcgcggaggaacaggctgtccgccagccgttgcgccgcggcctcggcctcctcgagagctcgcccccgctcggtgagcgcgtcctcgcggaggcggagtgcggactcctcttcggcgcaggcggcctcgtgcgccgccagtgttgcctcccgggtggcgacggcggcctcgcggtccgccaggtctctctccttcgcgtccagggcgcgggcgcgctcctccagcgccgtggcgcgagcctcaagggcctcttcgcgctgccgggacgccgcctcgttctccgccgcccgccgttcccgggcagcggcggcatcaaggactccctgggcggcgtcgagcttctcctctagctccgccgcccggctcccgtattggaggcggaggtcgtcccgcgccccgtcgagcacggcggtggcgatgagggcagtcccgctcctcctccacctccctggcgacctccgccaggtccctacgacgggcctcgagctgtgaggcgtgccggcggtgtgccttgcagcccgcggctggaagtagcagccaccgactaccgtcggcggcgacaccggctgtacggtgaagaaccaccggaacagccggagaaatgggcgcaccc

SEQ ID NO: 18732 - DNA, 1118 bp, Oryza sativa
ctgtcggtaacatgggccgggggtatcgggaatacaggcttgggtagccgcggtcacccacgtggcctgaccccctcgggggggggggggggtcgggcccgagggtgacgtggccacccctccctctgtctccccgaggggtcgggccgctcctgtttcggccccgagggctggggcgcccccgtttcggccccgagggctggggcgccccgaccccctgtggttttggcgccacgtgtgtgggttaggtgagcacagcggggctcacctaaccgcatttatagcaggttggacgagcgcgccacgccgcatttaatgcggcgcagcgcacgcttatccggtccgtgaccggtcgcggtgtgtgaccggtcacagaccggtcagatcgcgggttaggtggcaacaggcggcctgtcacacgcctcgccccgtcccgtcggaatgatgagagtttcctggctctcgtccctagccggagccggcgtgctaactcctggagttggtatgtcagtcccggtcagatccattccaggcttcagcgcaagtatggcaaggaagtcgctggccattaaatgaaggttgaaatgggcgtccaccgggaaagcgggcgagcggggcaggaggcgtgtgctctgcttgtcagaggtcacttccggctgtagacgagccctcattgtaaaaagcatgtttcccttcttaggcagcgagaggcccatgtggtgaccccggaccagataaaaaggaggcccaggcctaggaggaaaaaggggaggaaggggggttgggactctggggaaagggttctagagcctgaactctctctcgctctccggctctctgtattccttcacgcacagatccaccagaacacaggagtagggtgttacgcttctcagcggcccgaacctgtctacgtcgctcgtgtcttgtgcattcctctcccgctgacgttcctcagatcgagggcgaagaacctcacttagcgccccccgccgaaccagcaaaggggggcctgcgcggtctcctggtgaggagccccacgctccgtcatctggggcgccaggtagggggcgcgcgtgtctttctaagccctcgtcctctttcgtgtgcgccaagct

SEQ ID NO: 18733 - DNA, 792 bp, Oryza sativa
ttgtcgtataacaataagttcctatgggggtaatgaatgcagttttttcctcatcctccctagccatgcgaatctgatgataaccagagtatgcatctagaaaacacaaaaggtcgcaccccgcggtggagtcgacaatctgatctatgcgtggcagggggtaagggtccttaggacatgccttgttaaggtcggtgtagtcgatgcacatccgaagcttgccgttcgccttgggaacgacgaccgggttcgccagccactccggatggatgacctcacggatgaatccggcctccagaagtcgcgccacctcctcgcggatgaaggcttgacgttctggggcctgccgccgcactttctgccggaccggccttgcgcccggccgcacggcgagacggtgctcaatcacctccctggggaccccgggcatgtccgccggtctccaggcgaagacgtcggcgtttgcccgcaggaaggagacgagcgcgtcttcctatttgttgtccagaagaccaccgattcgtgtggtcttggacgggccgtcgcccagggcaacctccttgaccgggacctcgtcgcacgtgaccatccgctgccttggggcagccgggacggaggtgctgagcctctcgtcgccacccacgggcttggacgccgcggcgaggtggtccgcgcgctgctccatacaagcaagcgcgactttgaggtcgccatggacggtgatggggccaccggggcccggcattttcatctggagataggcgtagtggaccgccgccatgaacttcacca

SEQ ID NO: 18734 - DNA, 2008 bp, Oryza sativa
ctcacggtgccccagataagttcactgggggcagaatagaccattcctcatggacaacatctggaacaaaaattcagcaatcaaacagaaattagctgcagtaacgtggaatacatacattttgtttttcttacaaatgccgtgcaaacaacaatgtggcatgctgtgattagatcaatgttcttttctgacgtcctaaccgactaaatcttgcttagacagtaagccatcagaaaatggtgattaggatagctaatgtacactttttgatgctagaacttcaagcttgtcctaactcatatatgctagtaccatttcacttcagcacacagctgctcaatattcaaaacgcttgacatatccattgtcgatacctggagcattaagtctgtggatttgcgaaaataatcctcaagcaattcagtaacaatgcaacattcattacacttacctggacctggagctgaagctgcttcaggtactcgatggcatcgtcaagcatggaggctttgtccgtctgcatcggtgaatgaaaccatcagcacaagataaacgccaaattaactcgagagattagcttccagcaacacaagtaatagtgtgtataaatcgttgaacaaaaaatcgagtaagaaacaagagagacaattttttttactaccttgctggagttgggaatgaggctctgcagggccttcatcttctcattgattctgctcctcctcctctgcaccaaattaccgtggtcaaaatcaatcccacaaaatcagctgataccaagaggaacacgagaggtagcagtcgccgtcgccgggctaaccttctcggagaggttgtgcacctcggcggcgcggctcctcttgccgcgcggccgcgccggcctggtgggctgctccgactccgacgaccccagcgcctcctaaaaagaaccaaacaccaaatcaaaccgccaaatcaccaccagcatccgatcgaatcaaacgcggacaccgcacgccaacctcgctctcgcagcgatccagccccatgctggcgtggtgtcgcatgatcaaatccaggtgctcctcctcctggcttcctcgcccatccatcatcgcctcgccacagcaccagcaaaccacaaacactagcgctaccggacgaacgaacaaaaccaagaactccttaagtactccagaaatggcgagcgagcgccacgagaaattggacgctgctgctgctgttgctggtcatgagctgcccataccttgctgctgcagctgctgcaggagttgccacctttcttcagtttctctctctctctctctgtgtctctggttttgtgatggcttttccttgagcccgagaaagctgcaagcgcggcagagcttttgacgacgtcttttgagttttgccgctgcggctgcctctgcttcggcttcagcttctctctccggctccggcagcagcggcgcggggcggtcggtgtacggctcgtcgcgtcgcgtcgcggggtggggtggagaggttcattgatggaggagggagggaggggtggttctggttcgcgcggttttcatttatgagcgggggggtgtggtgttaatggcgtggcgtgttgagctcggctttcagagctcaacagtgccagtttccgtgggaagacatggacatggatatatgctgtgtcgtgtactcgtttactccctccgtctcgtcttattaaatttttttatgtaaatataaaaaacgaaaagttgtactttaattactttagataataaagtaagtcaaaaaaaattaataataattttaacttttttttaagaataatacgagtgatcaaacagtgcaagtaaaaactcaaaaggaagtagttgtgtgtaggcttggtacttgtgtggactctattttctccatcttaatataatataacttacacattttaatattataaatttagatagaatctctatttagatttataatagtgagagtattagattcttatattttatagtgaaagaag

SEQ ID NO: 18735 - DNA, 1185 bp, Oryza sativa
aaacaactaagtgagtgcttctcaaacgacacggatgagacagtgcgtctcgtccggtcggagtatgtgcaatgtatcagtctttagaatttaaacaaggttggcacccggccaacagctttttcaacggccacccgggccaacaactttcaaacggccacccgggccaacaacttttcaaacggccacccgggcctagctgatcccatcagctgcagatttttcaaacaccgaaccccttttcacacagcaatttcacaagcagtagtcaaaccaaactacgctaggaatcacctcacatccgcccatgaccgtgggcacggctattcgaacagtttgttaacctctgcagagggggtacactttacccacatgacattactaacccggatcacccagcccgtggggatcagccacgtcgggagacctccaagctttcatgacaaggcatttccaaagccgacacaggtttaccatatgccgacgagaggggtcccagaccaacaacaggttaggtcccagaccatactgtgccaggaagcccaggggtcctccccgacaccaccccggcgaatccacatgtctctcggcatcaaggctcccctgataagctagttactcagccaggggtgtcccattccacccatgtggtcgtacttgtcttatgtttggatgaaattccaaggaatcggtccttaaatgcaagagcaggaaaccgtacacccggtacgttccccgatccgcggttttggaaaattcatttagttcgcaagcaccgacccaggtgtcgggttttccaagtcttttgtaaaactccagttttacccaagttgttaaacagattttaagtttgaaggcgtccgtcgatactcgcacagggtgcacgaatatcgagacgcaactagatggttacaaggggacaagatatagcaattaacaaaggaaggatcaaatgcgacaaattaggtaggtccgccaatctgccttgcagacgggacaaacagattaagtgcgatcctatcaatgcataatattttgcaagggatataattaaatttcaaatataggctcaagatattcaaaggtggcttgccttgctcgagatctggagcttgatcctcaaaatcctcgcactgcgggtcttcgggctccgaaactacacgcaaaacgggacaactcaacaaa

SEQ ID NO: 18736 - DNA, 683 bp, Oryza sativa
  unsure (1)..(683): unsure at all n locations
gcattagcacttggcagaattaaaaacactcaaaaacagatgagcttatatatttaatggagatatagttgcatacgtaccccaagccgtagaatataaatgtcnccttcaatactgaagggaagaaggttaggccgttgaacctttatggccacaagagcaccatcaactgtacgtccctgataaacctaaagtacaacaaacaagagtacactgagcataacagaaaaattgaaagagatagtacagaaaaatataataaggcttaatcagaaactacaaagctcctgtctctaatatttaaaaaagaacgggaaaagttttgcaagatatgattacctgtccaaaggaagctgcagcaacaggctcatcagaaatgtaactgaaaatgtgtgatacagggagctcaaattctccctcaataatcttcattgcatcttttctcgggaagggaggaaccttttcatgtaactcggcgagtgcctatgattggggtgtgcgccagttaattttgagaaagactatggagattgtttaatgatcaacaaaacacttctgaagatgatgaagcaattaaagaaatgcagaaatgttattgtatcctgcagtaattttacctaacctcagaaatctccgagcctgtgatatcaggccttgttgagagggactgtccaactgcacac

SEQ ID NO: 18737 - DNA, 1020 bp, Oryza sativa
ggtgatgctttgtcaggctcctaggtacgtaggaaggaagcttccatggactgcaggatactcgctgtgtcgaacctgaagtttcggaagcttttacctgggcggctgtcaagagtttgtgggtcagatcctgttctagtaataacggggttctcaacaggcgccgctccagttgaggaattcttcgctttccacacagtacctgtcaaatgatgtgtggtaccatagatgttatcacaattatagaggcaaacggtatatgtagcaccagaggttcaccaattttatcacaaattacatactaggagtacattgcaccaggttcaccaatggtactacacacactatgtactaaaagttgatcataagtatagccatgagttcatgactatgccaggatcagacctgctttaattatgtactagctgatattttgctcagttgagaactacttctgcagattaacttagaaaacaacaagcgaaacttgaagcagaactgctaaaaataattgacaaataatttaacatttttaggtcctaacataaatgggcaaagggaggatcagaagaaacctctagcagacgtgtctgatttctgatactgtgggtgacgatgtgtggctatccaggcttttagacccctggatgaagaagtaaaatgtaaaggaattaaacaatgtagaaacaaattcacactcaggaaatgtggatgcgggttaaatattttagaagccattaaaccaacatgctcatgatgactgtctgcaccaagaaaaaaaaactaaagtgggtcaaaaaggtactgactgcaaaaatggtgcgaccatatagagcttcatcccattcactccacgagatattgcgtcatcaccagcaggaaggagttcatcgatgttgtgccatgagatctcctgtcaatttcagaggatcacgactcagtaatgcctatttaactctctttaaccaaaaaggttcaaaactcaaaagggtcaatggataaactacaacgaaaaaaaca

SEQ ID NO: 18738 - DNA, 867 bp, Oryza sativa
tcagcgatcaaaccaacggcggaagcgccaccgatgaatccaaggtggagttcggccggagcttactgagcgtagtgaagtccttgaaggagagcgacttgagggaggggttgtgctcgacggagttggcctcgtagaaccagtgcgcctgctccagcaagaacaggatccgctcgaacgactccaaatcctctttgggcacgttgagcacgaagcggctgttatttttccgtttccaccggcgattcgattcagtttttttccggggggtttgatctgagcaaaagccgagaagactctcgcgagatggatgggatcgagggtttgggatgggggctacctgcagagatcgtcgagaagctcctgcggcggcagctgccccctcgacgacgaccggtagagccccccggcgcgcgctatcgatatccaccgccgccggggcggcgcccggtctcccaccccttctttcccttttttggttgccctcgggaatccattgcttgttaggttgcggcccagttcacaaggcgcactttaatttaacgtaaactcttttcgaagacggaaaggtgggccgtgggctacaccctaataaggcgtaattttattttacgtaaacgagtttggaaggcggaaagtgtgggggcaaacagtagtagattaaaaatcggaggagagagacagcgaaggagcggaggagccgaggcggggggagggaggccatgatgccgccggcgataagcttggctcgctctcagacgtagtccgcctccgctttcctctctaccccgtccgccgatccgccgcagtcgccgtccggcaccaccgctgcccgtccttcgccaccaaacccgctgcaggtcttat

SEQ ID NO: 18739 - DNA, 1127 bp, Oryza sativa
tgcgttgacatcaagtggtgcagtaatatattcaaatgtctgaagtaacattatgaaaacatcatgcatcatcatttgatgctaatcatgtttcttaaacatctactagctgcaccatcatgacatcaagttgtgcatacatatattcaaatttctgaagtagcaatatagatccatccaaaaaaaaagtacttgcattatataaacatcatgcatcatcatttggtgctaatcatgccttttaaaaatctactctagtgtcatcatcatgaataacaccaatgccagggactccaaaccaagcaatcgcatttatatccaaatgatccgttggttgagagagcatgagtacataactttcttcatgtattgtgacacataattttctgacatagtacgtccactcttgtcaacatgcaagatcaaaggacaaaccaaatatacagtgtttaaagtggctccgatagtgagagcacaaacaagataccaatacattcatggaatcaatagtatcttgccaatgtgggaactttcttccatcaacttgtgagcttcagcagcttctgacagaggaaacgtcttgtatattactggtttcaccttgccttgcacaacggcaggccatacatttttctccacctcactgacaatcagagctttattatcaaggcttctgttgcgtagtccagcagctgcacagaatcataccatttccacacatgctaaaatcagcgatatcgtttaggtatcatccaatcacataattgtgattctcagtaaggcaacaaccagcagtggtataagatcgtaaataacaaaactagaaacacaaaaatctagtatgagggacattgttgcctatagatcaacgttaccttgtatggtcaatcgtcgagcaagcatgggttgcaggttcacttcagttacagcgcctccttggaaaccaatgatgaaaagtctaccatcaacagctaagctgttcaggttacgctgaagatacaatccaccgatgttgtccagaatgacatcgacacctggtaaatatacttccatgtcaagagtcactaaagcatatgcaaacttggcaggtatcaaacattatagacagttccatggagaaatgccgt

SEQ ID NO: 18740 - DNA, 2482 bp, Oryza sativa
gtgcctaaacacctcatgtgacaccctatataatatccgatgtaacacgctaaaactttaaaccctagatctaaacaccccctaacctaacgtcctaatccaaacggcagcggcggcggcggcaatcaccgattcacctggtcaccgacggcccagcgggaggggacgttagggccgagggcgaggatggtgccggagcactcgaggcccgggtaaggggacgcgccgggcggcgcggggtaccggccctggcgctggacggtgtcggcgcggttgacgccggcggcggacaccccgacgagcacctcgccttcccccggcggcgggaggccctccccgacgtcccgctcctccagcacctccggcccgacggcgcgcgcgatcaccaccgccctcatctctccccctacctcgtcggggctcagctgctcgccttgctttgctcctctcgatgagtccacgcacgcgctgacactctgcgtctctgctgtgactcgtcgactggatattgagatgggccttgggcctggttgagtaaaattggcccagatagctgaaatctggtccagccttctaaaaaaagataagtacttcctaagtgctagtccttccgtttcatattttaagccgtttaactttttttcattcaaactttgttttgattgatcaagtttatagaaaaatatctactaacatagttaaaataagttttattgaatctaacattgaatatattttgatatttgtttgttttgtgttgaaaatactactatatttttatataaatttaattatactttaaaaggtttaactatgaaaaaaagtcaaacaactaaataataaataatatgaatgaaaagaagggagtaatacggtataaacgttgtttgctacattgtctatatattttgaaaatgaatcgattcggggcgagttggtattgactggagaatagaaagtctatatatctgtgtaattgaacatttggagaatactctcacattaattaaaaagatataatcattaatttggtggatcatacttgtactaaaacggataccttctgaggtatggcctgatatagacttccattaaaatgctattctcttacaacatttgagaggacaaatgactatactaattaatgcacaattttttttctaccacatgtctttctttttttttctctatccatatatactaaagttttcctctataaacgcctagagtcgacgaccattgtcacatttaacaagtatatttctctctttttttttcatttctcttatatgtcagcaacttaaaagtctgtttattaattgtctttgtatctgccctaattaactcttacattcaccagaaaaatgttcatacatcaggttgatatgacctaccgtaaatagtagtttaaagtttgtgtgtcaataataatgcaatttataaaaactatggacttattaattgtattttattattttaataattttaatgttagaattatgaatacgaagtctatacatcctatgctctcaatttagttttaactttttattttaatttcaaattaaagacttgcatgatgtaaccaatatgtacaacaactaacatattcagtcatcgtctcgagtggcaacgaatagagtgttaaatcatcaaattttgcttgtactccgtgcaaacatcccaaaaaaagaaaaaaaaagactggataattctctagtgatgatataaagttacaaactcgtgcaacacatggattgatggctacttaatgatattccatgcatatttatgaggttgtcaattttaattgtattttagtgtaacgaactactatacctaatcttgttttgcttttagtatgactagttactatacctcatcttgttttgtttggtattgcagaagaattgtttttatcttctttgttaagctacgcgttatttaaggcatcagaagtactatacagttggaagagaatcaaccagtaaccatgacaaaaatatcagttgagtggcggcaaatcatgtcatgctcgtgtgggacatagtactagtactactaatgggcgatagcaactcagcaaggcgaaagaaaagaaaagaaatgaaagtgaaaaagactgtgttctttatagatgagacggatattttgtacgtaaaacgaaatgatcactaatccataattaattaaatattagtaaaagatatatttaaggtaaatttaatatatctttttaagaaatattttttaaaaaaaatatattatttcaaaatttaaaaaacatgtgcacggaaaaataaggaataacgtgcgcactagaaatgagaagtgttgcaaagaaagctttccagattgagatggattcccacggtgcgggggcttcacccgcacgcgcgctctccttcgccaccgttgccggctaaccaaaaaagtggaacacgaagaagaagcagcagaagaggaggagcatctcgcaacc

SEQ ID NO: 18741 - DNA, 2347 bp, Oryza sativa
ccgtcccacctcgcggcgggcgggtcaccccgggtcgggaccgcggagcacgactggctgtgggattgccgcggcatcggcgggggcgggagggactacgctaggcagatggaggtcgcggtgcgcgtcgtgcaggccgcctgcaccctctgccagcgcgtgcagagctcgctcctcctccccgcctccgcctccgcctccggcagcgtccactccaagatcgaccgctcccccgtcaccgtcgcaggttggtcttgttgccttcactcctgagcgagctcgtagcactggtcagttcgtcgccgcaatttagtatgcctccaaaatccatagcgagagattagtcaaactggagctccatcatattagaatattcagattgatactgattcattgttcttaattcagtccgaattcctaaatggaatggttgcttaattagttattgttgttgactttgaaattgagcgaccgtgtgcgtagtggtcttatactcttatgttctgtgatttcctaaggaagagaattgaatacttgcacttgacttgttggcctgttagaacactactaaataataatggtccactaccaggttcagtatgagtacaatggtagtgggtagctcatgctccatgttgccaacataccagataccagatagctcataataccacatggtcatatgtcaaatcaaatctgatctgatgcaatgttatttggcccacaaatttaagaagatctttgtgttaaatgccatcaagaattgtgactttgtggttggtatcttttggatgcaataaatttatgcttttgtggtaattggttaccagtagtaatctttccttcaaacgttattccagattggggcgtccaagcgatagtaagctggctactctcggattgctttcaagatgaaaacatatctatagtagccgaagaagatgatgagacgctatctagtagcgatggtgcagctttgcttgaatctgtcgttgctgctgtcaatggttgcttgattgaagctccgaagtatgggctgaggtccccagagaaagagctcaaagctcatgatattcttcaagctattaggaggtgcagctctatcggaggtccaaaaggaaggttttgggtgcttgatcctgtggatggcacgcttgggtttgtacgtggggaccaatacgctgttgctctcgcgctaattgaagatggggaagttgtattgggagttcttgggtgcccaaattatccaatgaagaaggagtggctcaactaccaccaacgatattacaggttgatgtctaaggtttctcctcccacatcaggatcctggcataagggttgtgtgatgtatgctcaccgaggatgtggccaagcttggatgcaaccattagttcatgactttggcaagcttgattggcgtaattcaagagaggtccgagtatcaactgttagtgatccaatctcagcaacattctgtgaacccgttgagaaagctaatacaagtcattccttcactgctggacttgctcatagtgtaggcttaaggtcagttcttgagtttaatgtctgcgcggtatgcataacctttatggatgctaatattgtgtaactacagccaaaactactctatacatttacatgccatatctgcaaaccattgcctgatctttcccgaatagtatacttcttttgaaactgtttcctgaataggatgctggttctgcatcagtataaaattaaatggcaccttcatttgacagttgtccgtttccatctattgtagcatgtaatttgcaagttttggatttatcgtactgttatatttatatgttttgcttggattccaggaagcaacccctgcgtgtgtacagcatggtgaaatatgccgcaatagcacgaggggatgtagaaatattcatgaaattcgctagagctggatacaaggagaagatatgggatcatgccgctggggtggttatcattcgagaagctggcggagtgatcacagatgctgggggccgcccactcgacttctccaggggtgttttcttagagggcttggatagaggcataatagcctgttccggaccattgcttcatcacagaattgtgggtgctgtcgatgcaagctggaactcatcaacactgtaatgcaaatagtacggatgattacagttggttggaccaatgtcggtcatagaatgcaaaggtgagttttacaaagaattgctgttgtgccctctggttgaaatctgttcagccatcttattctctgatagtctcctacgggaaaatcagctatttctaggttgcagaattagtatgtgttcatttcagttcgatttac

SEQ ID NO: 18742 - DNA, 2700 bp, Oryza sativa
tctacatttaacagtactctttatatcaactactccctccgtcccataaaagacaaacctagtacggaatgcgacacatcctagtactatgaatttggacatgtctcctaggatgtgtcacatctcgtacaaggtttgccttttatgggacggagggagtactccagaacataaaaacagaaaacatgagtttttgatggaattacctcttttctctataaaagattcaaatcctttattgagattttcaccaacatagtcgcaaatgttacgtttgaagagcctctaaaataacagtatgtttagtacagcagcaaatttataacaatacttttctgtaatactacatagacagactttaaggaaatggcgaactaaagggaaagtgaaattgatcgtgagcaattctgtgatcttaccaagctgcggtcatcaaaatatacatccccaccctcaatacggctgtagcatgcaatctcagaaggctgcatgaataggaaaggatttggatacatagataccagagataatatataaaaatcaaaagaatatggtatcattactcacctcctgaaaagcaacaaacttcctagataaagtttcttcactcttattaagcttcatttctgaaacaaaaccttcaacattacgcccatttccatgcgaaaacctcccaccatatccaaagttatgccgtcctggatggcctcctgcccttggaagaagaggtggacctctgccattccgccccccatatcctccccgagaatgattgttggtgttccgtattgagggtagcactataagggaaggcatggaatgaaatatagtgttgaagctcaaccttccctcctagataattcaaacattttaaagtgctagctgccccaagccccgcaccaacatatcaagcgatagccagtaaaataacccagttacaatctttaccacaagcatgggcattaccaatcactaatggacctagtagattgataaaatgtatgccaacaatagatatcaagttgttacacataaagcattagcatgatctccattccttccagcactaaatcatcacaaatagcgtattgattttagggagcttcctatcacaaatatgattagcatatattgaaggttttcaataaattatgcatgttttattatcaactttgatctttcaaagttcaaacttctatgtttctagttagatggcagattgagaagaatgtgaaaaaaattgttctacagaggaaatcagatcagatgcagtattcttcataactgtaatctactgcagagttcacttcaattatacttcaaattcgtttgcagatagatgttattcaactgtagtctacctataatcaaaacgggagattaacatactagcatagtgcaatgtaactatcagctaatccaatagcccctaacacttatcgttaggcagtgttcaatggctactctccaacaattatgcttgatggtgttgtaaaacatctcttgcgatttaaaagtgagttgcaagcagaagacagtagccatgatgtactgttactttataagacacattgtgcgtatcatatgcctatcgaaagtggaaggaagaattaaaaagtccagaacaagaataattcatcatacatacatgtgaaacccgcaattttctacatgctcactgaatcccctaaaccctacgatcagcttacccgcaaccaaaagaactgggttggattttgtaaaaatgccctaattaattctactgattagacatgcttagagactgatcattgtcacccaaaatgtgcacgataatttagcaaatattagaggcggacctgggactaggtagttgctacgcgcgggggtcttgacgtaatcctcgttgtcagagccgaacaaatccctctcctcctcctcctcctcctcctccgcatcaccctcgcccctctcctcgtcaccgtacccaccggcggccctcgcgggcgcgccgtcgaacgggtcgtcgtcgtaccccctggcgtccccctggtcgaccccgtcctggtcctcgcccccacccccgcccccgccgctgctgctggaggcgccgctggaggaggaggaggacccggcggcggacgacgaggaggatgaggacggggaggaggagccggacgaggcaccgccgccgccgccgccgtcggcctcggcgtcgtcgtagtcctcgccgaagatttcgacgtcctgctccgagaagtccatgggcagagagagagagagaccgacgaagaaaggtttctttcttggctttctggtcgggggggagggtttgtggtgcgatgcgatgcgattcgagtgttcggcacggcgaagaagaggagcttctggaagtattagggctcgctcaccggatcaacgggagcgagctgggctcactaggcttttggcttggttttgatccgggctttagattagatccaaggtaggcacgacacgagggtatcgtgtggattttgcgtgtattgttctgttgatgatacttatatcttgtaatcagccagctaaaacaactaaaacagtaataatctcataaagtagaaactaacaagtcttataaagtataactaacaaaggcaaataattgatattcagcatcatactgcatatgtattgctccctccatttcacaatgtaagtcattctatcatttcccacatt

SEQ ID NO: 18743 - DNA, 1617 bp, Oryza sativa
ctgcacccctaagtaaaaaactggattgtaattatttgcaaccttaagtaattaactgacaactttcaagatgaacaggctggtaaattaagaatcagaccagttatgagcaagtcagataaagagttattgggggtttgggggggagggggggttggtggtaaccactcacttgtatgcatgtgacaacgcgcagcgctcaacagcaagctctgtgttgctctgttcagctagtatgataaccgtcttgaaaatccttccatatagcagcctccactcgagtgccgtgcgatccacaggcccactaacatgcatgatcaacacaacatttccaaagttctttctccacttaatcaggtttccaatctcatagttcactgtaccaatctcatcaactcccaagtgcacagatggcagcttcttgggtacaaattccttcatgtcaccctctccaatggttgcccgctgcctgtcaatttccaatgacatgagccgaggctgccggtaacccactgcaagaaggtcctgcagccaggcagccgttaatctcacatcttgctctgtccagaacccttcctcagccatggcatagctcaaatcaagaatcctctcgaatagagttctcttgtttgacctccactcattcagaaacttgatcaaccgacccacattaacatgcagatccttctcctcagcgaacgggtatgcctgaatatgatccttccggtaaatagtcggcggatagaaagccacatacccaccaatctcccacaagatccgttgcgcccagtagccacggatcacatctgatgccattgagctcactgacactggcatcatgagaccccagaaagctggcgtgtggaacaatgtgttgaacgaattcaccggtgccatcgtgccctgaggcagtgccactttcggcgcctctgcatcaaacctgagatcaaacgccgcggttggtggcttcctagtgaagtagaacacggcatcgacatccggcaatccatctgagagcccttgctgaatgtattgctggccactgaacacctcagtgtagaacacctcgtgagccacctccccaaccttgtctagcggcagcccccgtggccacacggaacgctgcccaaagtgcacgtagggattcaccaccgtcctgttgggatcggcgtggctgtactgcagaagcacgggatggttggtgaccccagatcccaaatcgacatcgaaatgcttgcccagatcgttgccggggacctcggcgcggtcgtcggcgtcgaagatcaccttggccccgtgctggatggcgaagaggtagccggccgtcttgcggacgtgggacgcgtaggggaggaagtcgacggagcggtagccgagctgcgcctggagctcgagggagaggaagatggcgcccttgagctcccacccggagggcgtgtgggagttgccgacggcgaggagctgccaccccttgacgcgggcgagcgcgccgagcgcggcggtgggcggggacgagacggagaccacgatccacctctccgcgcggaacgacgcgaacggcgcccccgccgcgatcgcaagcggcggcacggcggcccacttgacgtccgggtacgg

SEQ ID NO: 18744 - DNA, 4883 bp, Oryza sativa
  unsure (1)..(4883): unsure at all n locations
gtatgtgactactaaaaggttaactccaggctcacacattaaagttctgttaacataatagctgaaagagttttttattaggtagggtcatcagagttgagttttcctataaacagcagttttttttttttattaagccacttatgaaatatttcatttcttaatacattgctgctctactttcataagcaggaaattgagaaggctgctgaaagaggagagcttactgaacttgttcttatggtcatatggaatcgacttgatgttgctcgccgcgatgtatgctaattttctctttgaattatctgatgacttatgtattgtttatttttttatttatttcaagcccttgcagttttcatcttgttttacggtggtactagtcagtattcacccttttgttatcaaaagtgtggttgctttttttttttttcattttgggcgtaagataatcatagttgaatgtgcagaaaatgctttcgagaaacatgtaagtacgactcatggtaaagaaactcattaagtacgaatgttaagtattgatggaacaacaattgaattttggattccctgcccccaaaaaaggaggaaataatttaggctgtataacactacaacataccatttactcaccttgcagatttggacaactaaaacaccttgtgagttgtaagaactcctagatcccatgcatttatttttcttattccacactgccactcaatattacaacctgtaaacattgattgatatttaaacttttatcacttctgttgctcaattgttgatatctagtctttccataaattttcagcatagcaaaagtatatttgagaagggagaaattcctttgcctataagttctaatatctacaatcaagatatttgactagaggcagcatagcaaaagtatatttgagaagggagaagttcctttgcctataagttctaatatctacaatcaagatatttgactagagggataccatatttattttttttgaaagaatgggataccatatttattgtttagatattgacttatacacccgcaggatgagagggatgccatcagaagccttgatctcttatacagaagggtagaggtaagtcacacaggtgcaccgcacacagcctccattatcttatcattgttggaggagtccattaagctcttatatttatatcaatcctgttcatttgaccgcttcattggtctctgatgggctaatcagaaaccataacctgaatgcagacggaaattttaaggagtgaagcaactcctgctatgagattgctcatgaccttctgaatcttcatgatggatctgatgatgacaagtggttaaagaaatgtaaaaaacatatgcttgaagtttttcccagagaagacccgttcaccatgggtctttcctgctggtttcaacatggaggaagtatgttagttaatgcatgcttttcctcatgggataaattgaccatgctaaaaattagagttattcgagacttgagaatgaaaatttatgcttgagacatttacaaaattttaatttacatgacacaattccaaaacagagatgctgactttacagatttcacacaaaaatatcatcccctagttgtattcaaaattagttgtgccacttaccataagtgttaccaagtcttttattatacataacctcctaatcttagccatatacttcatagttgttaacgttgacagcaatgaaattttccttcaagcaagcatggacactgccacatccctcatagttaatttagttagtccaaagataatacgcgaatcatcgttagtcagtgtcatttagttgagattcnntggatttcgctggctccattctcttctttggttctctcatgctacaaaaaaatctgaattctttcttttgtcagcatcaaggacagatcaagctgccacctcaggatgatgatgttcttctaagagttgatttcatcagggaagttgatgagctcttgaaggaagttcaagctgcacatgaaaacaataaggtcccaactggtaatgacccggaagctgttgcgaccaagttgaagtatcaagagaagctgcggaccatacgtcaagtggaatctctcctggaactggcatcctccctgaaatggtgaggattgagtttgcagaggaccatgaaattctgcgcacataggactagaagttaccggctgagtacttgatagctgcaattagggtgcagccttttgagctgattctcaagtttctgctaattagaaactcctagcatttgaatacaaaggttagctgatatctgcttgggcgtcaatgcattttcgtagaatattttctgcacctgggtgtccaactctattagatttgtactgctctaggcattcagagttcaactgtgactcaagcagggaggctttgctctggattaatgtatcatcatgagaatggcggagggtattcacacgctcaagctctagcatgacgcagatgattttcaagccatcgagctgtgtctctagtgtgcataatccagatgcagagatggttgagtacttgagttctgaagttcccaagtcaaatactgtgtaaagattttcgtttgaaggaaaagaaaacattgaatgtaacattagtacaataacttgtaaaagtttttttttgtatggagcatgtgaaaatatctggaacaatccatggtttcaacagtagcaaaatttggtcacataccaaggcatcaaacattcgtatgttaccatctacctctgcacccgatggtgcaatgcaacgcgtgaatgttgcacgggcatagcacggttttcatttttggtcttgtaagagatggattgcaaacaatgccttttcaaaggaagtgcacctggatgctatgatcaaatatatggtgccatcggatggtcgaagcgatataaaagaaaatggactacctgagctattgttttttacccttatatatcagtcacttgatttagcgtctgatgactctatatcaattttttcttggagtgaaacaacgagcaatctaacttttaaatattgtaatagacttaccagtatgaaaaaaattgtaatcaataaccatagaaacatatatcggtcgattcaggattttttttgaacgactcgcatgagacgatgcgaagttctattgatagagcaggaaaaaattacaatattataaccctggagggtcataaccaggagaaagaaaaaaatataccaccacccacacaccggcagcgccaacacacacgaccaggagaaggttagcaccggaccagccgccgctaagcgtgaccggctgccgctagaccaacaaaggaacacagacgagatcgccctacagcaagggggggggggtgccaaaacgacgtcttcaagaagagaagcgacggaagaccgccgccgccgtccatcagggctcaaaggagccaagactgggctttcgcccggtaatcacccttaaggggtgagatagcacgacaacgccctcaggagggggaattcatcgttgtcggtccggccaaggctgggctgggttttcacccgccgctcaccacctacgaatctacggatgatgcaccgatgctccaccaccactcaaactctgccgacatgtggggccctgcacgaatgcccccgccggccaaccttcgtgcgccgaagaccgcgccacacccaccggcagctccaccacgcaccgaggtcgcctcttccaccgccggccgcgcctctcgcgccaagccggcctcgtccaccggacgcgcctctcgcgccaatccggcctccctccatcggctgcgcctctcgcgccaagccggcctccatctccgccgcccgcacctctcacgccgagccggcctctgctgccatcggctacgccactctgcgtccagccggtctctgacccctcctccaaacgatgctgcgccggccgatgcagccgtctgccacgccctcggcaagccgtacgaggccgccatgcttcctcccaccatcgtcacggtcaccacctcaccgtcgccgccgtcacctcacacccaactccttccccgcctccactgccgcatccttcgacattgccaccgtctcctcagtcacggccactgcaagtcggccgccgtcgccgatgccgctgtcaccagccaccgacgccagcagtcgtcgtcgcaaaccgccgacaccgccaacgcaaccgccccaacgccgtcgtcgagctctccgctgccgtcgtgaccgccactggggcaaaaccatctccagcgcctggatccggtcgccgatgccagcatcactgctagatccgacctccgtcgccagcctcgccgccacctccatccccgccgccatctccaactccgtcgccgacgcccccagcaagagaagcagcacaccaccagcacgcacgccatccctgtcgccgtcgccgcctcccctgccaccgttgtcgcctttcccggcgccagccgccaccaactgccgccaccacccccccaccttcaatccccgccgccaccaccaccaactgctgccgccacctcacaccgacccgctgccggcggcctgcccgccagatccggccgcggcagcccggatttgggcggtcttcgccgtcccgtgcgtggccccccaccgcgacgggagagggagacgaagacgagggtgaagccccgccgccgccgtccttgcggccgcgcggctttgccggcggccgctcgggcggcggcgagacggcggagggaggaggggggaggagcgggcgacgccggtggtttccacctcccatgtgcccgtgggggaggacaacgcgggggcgcaatacaactactccctttaactacaaaacggtcgattca

SEQ ID NO: 18745 - DNA, 3069 bp, Oryza sativa
agagctcgaggattccgccgtcggccgattccgacgtcgctgtgctcgccgactccgacctcccggcgcgcacgcctctgcggtcacccaccgcctacgccgcgctgtccgcggcgctccggtcggagggccggagctcgcctgctccgccgcctacccgcgtcgtctgctgcgagagagaggggaaagggaagaagagagagaagggagaggaaagaagtgaggagtgaggctgacatgtgggccccaccattttaaaaatacttttttgtgtgcagctgacatgtggggccaagctttttattattttttcgggatataattgccacgtaagcgccacgtcaatgccacgtgggacagagacctagtcaaataagccacgtaggcgccacgtcagccaaaaccgccttcaaaaccgccgagggatcttgtttggccagttttcataagttggggacaggtcgtacccggttttcggtcaaggacgaaaatcggactaggcgacaaatatagggacccaaagtgaacttattgcgctgcagaaaggctaagcatcggcacaaggtttggagcagcaggcttcagaaaggctaagcattggaaatagctttattatcctttttatacagaactagcaaggcaaatgcatgccgaggaattgaccatgtcatagaacaacctaactggtggacaagtagagctacgtcaaaggagcttccactaaaatttcatatctagaaggttaaaggcttaaagctacacaatagaaatggcaaatagttcagtgactttagtccgaactattgagaactttttgttccaaacaataaccaactttcatcaacatatgctggatttcgaaacacaattatactcctttaaaagggtatgtatggttttccgtttatcaaatatttcatcaaatttgaagggtacagcaaattgtatccctcaatggtgtatctcactgaaggcaacccctgaaagctcgcaaaacagccgaccgtggtgacactcttctcagtaaactcttagctgtcctttccttcactagggcagctggaccaagatgatcctcagtaacaatgtcactattgatacaacagtatacaacagcagaggaaaaaaaacagctacaaaataaacagaataaatgaaattacaacaatggagaaccccctgaaaacagaaatctatggctgtctactctgtccacactgtcacaaggatgaagtttcgttccaactacagaatatgtatttataccaactccattagaagagggtctcccgtggacataacccgaataagctttataaaatcaatctcgttctgtactttcactgggaaaacagcaggtgcgtgagctgtataaatacttgagaaagtctcgttgcccaccaagttgctcctgaacactgttccagccagagcatcagagtcaaaatttttaggcgagtccatcgccaggaagaacatcgggacagcaactttgtggtgcaattccaaatcgccgacaagtcccacaaggtcaccaaaatcctcaacaaattgacgtggtatgtaaaaaagctcactgccacagaatgcaatcttatcttcgcccatgctttctttatagtttgtctggaaatgaactggggaactgccaatgacctgcttaaccattgacccttgctttacaaaccattcctctttgttgttctccaatggaacagtaacccaagaatgtgcaatctgcagtatgagaaagtatgttatggataataacgtatcatgtgaattgattaatatcaaatacatgaagcctacaaaccttgttggttatccaaagtttttccttgtcagcctgcagcaggttccagtagttaagaatcatgtgatcttgcaggaagagaaatccatcagcaccaccgtatctcgcaaacaccttgggcagaaacctaattaagttacacaatattggcagcacgattagcacatggaagaaagttcaaattcataacattattgatcagctataatcacgacaaacatcaaaacaacttaaaggcagttaaaagttgcaaaccaacaatttgatacaatcatgcaaacccctttggttcagccatatgaacctaggcccctgaagacttgaacttaaaaatgaaatagaaatttgtaactatagttagtcctttctcagttgaatccctggtggaccactatattcatataggcatgtttgatactaaaaagaccacattacagaacatgtagctagtgaactctgacaatcaactactccctccatcctagaatataagaagttttagagtcgtacacggttattaagaaagtaagtagaagtgaatggtggagggttgtgattggatgagtagtggagataggtgggaaaaatgaatggtggagggttgtgattggttgagaagagaatgttggtggagaagttgttatattttgggacaaatcctgagggctaaaagttgttatattttgggacggagggagtagcaaatattgtaaagtatttttatgctaagctccatcatacaagtgtgcatttctatttagccttttcagtgaagacacactcaaatgtcacaaccattataaccagctcagccacaacaactgaagagtcttggaggcagtaccatcataatttgttgatgctcattattcaaacaaaaatggttaattatcgccaaaataacatcatatatataacgacacaatcagccaacattcaatgtggtttaaagagtgaaaaatttgagtcttctctacaaacaaacaaaaaaaaagaatcctctagcaaagttcaatttaacaccagcaggaattatctagtgatatgtaatgatataataataatgactttaagtatttcaagcaatgtgttcatttaaatatagtctggatgcaatcatcaatataaaatcccgacattacagtcctaactgtatttgacattagcataaacgatattgtcattaatgaatttcatattggattatttaacaaattccagagaacatgttcagaatgtgcatgtggttataa

SEQ ID NO: 18746 - DNA, 3117 bp, Oryza sativa
cgatccgcgcggggaggggggggatctctttgagcctaaggcgcggcgcccgcgcgcggtgtcggtcggtcggtcgcggcgagagcgagagcgagggcgagggcgagagctggagtgtgcgttactccacagtccagtggtggggtgtgtgtgtgtggtggtgtcccagtaggtggagcggttggtgggagctcgtggtcgctcgcggtgggggagaaacgcaacgaaacgggggaggagaaggagaggggtgagcagtgaggtgagcggagttcgttgggatcggggttttctggttttcttcttgttttttttttgctggatttggtgtttttctttttagataatggaataaaaattccaacctgtgcatcatgtgatgcacacagcccgtggatttgatgtttttatttacgtgtatagttttgttttatggaatgtggatcgaaatgggctggaatgataatcatctgatcattaaagaaacattaaccatcggtggcactccttgcacatgggattaggagggcaatattttggagatcatgtagatctagatgcttagtacagtacattttactactggtactcggcagttttttctagaaaacaaaactagggctgtgtttagatccaaagcttgaatctaaacttcagtcatttttcatcacatcaacctgtcatacatacgtaacttttcagtcacatcatttccaatttcaaccaaaatctaaactttatgctgaactaaccacagcctagtacttggagtggtccgtagtatattactctacttggcaatgccaatggactgcaaggggttgtccctaaggaatcctgagtaaagaaaaacagtaggaatatatcgtgctttaagtactgtaaccttgcagaatgccggtgaactgcagggtgttgtcgctaagcaatcttggagttaaaatggcatcttactgtatatgtagtacttgtagcgatgtagtttcttgaaagatttttttttagataatggaatgaaacattacggctctgttcgcaagattaggttcccaacacaaacagtaagcatgcaaaacggagcgtccattagcacgtgattaggctaagttcatatccaactacagctattttcgatttttagaattaatttaggagtttatatatatatatatatatatatattcttcacagggatatgtcatttaccgcaccctatattgttcctttatgctttatagggtgttcttctgggttccttcttctagattccttcttgattagtcttctgaaatctttgtttattcttccttccacgcccaaattgttgatattctattatcaatatatattgaaaaacatatttagcttaaagaattctattcatctggttgcccatgaccaccaagatccatagtgtccagatcagaaaaagaaacttctaatttctcatctactgccttttttatttgttcaaatttctgatccatttcttgttttaattctttaagtatttcttcctttaattccttctttaattgtggggaggcttcttcaaatttttctattattttccaatcaatatattcctcatctaatggatccactccttttgttaggcattccttgtatgtgggttttttagaatacccttcttcttttatagtcgttttaatgggtatttctggagtcttctttcctttagcttttttgcatttttgaatatattcttttgcagcagactctagataataatttattcctagtatttttctagcctggcttagtgcttcatcaatgtctttatatttcttccaagatattcctcccattaatttagcatatatcttttgggccacaatttcttcaaaagatatatagacccctgggagctttccatcaaatacgacatatataggcttctgttggattatttcatgatcttcattagctggcattaataacccgtttattaagtgaaaatattcagagaggctattcaatattgataacatatatcctttttcttcccttttattattgtattggtaccaaaaattatccaagatgcattcttgtacttcatctaagattatatggtcttttggcttaaatttatatgaatttggtgggaatattctgagcttgttgtcatctccaaatgtgaagcattcaattccgctgtaattcattgatcttttcatacctgcaattcaggtaaacgagaaagcatgtcaggcaaattattatctttccccttaatatgttcaaatataactttatagccgtttcctgttataatatcttcaaataaaacccatcttctagttgagcttttcttgctatttagctgattatagtacctacaaatggcttcacaatcggttctaaccgtgaattctttaaatcctaagtacaacctaaaggcattgattgcattgattattgccatgatctctctatctgtattattgacagtttttaatttataacttccagaagcatatctacatattttttcttctgatttagcggaaaatttagtaggtctttgctttaatatagtaccccaaccgtgttgtgatgcatcagtttcaataataaagtaactttcttctaatggtaattctagatgttttaattctttcaccctctcttttattaatcttactaatttaatgtcttcagaattaaaatatctctgaccattttttcttaatttagcatataacggtcctgctaactttgctaaattattgatgtgatttctagcataatttacaagtcctaagaattgctgtaacttctttttatcattcatagcatcaggaaattgtaaaattttcttagcaatatgttcttgcaaatgaattttgccctctcctatttcatgtccaaggaagttaattttttctttgcatatgtccattttctttttggataatattaacccattttgttccacctttctaaaaaatatttcaagatgagctctttgtaagtccttgagaagactaacaggtcatctatgtagactaatatgaattcttggttttcgttaaataattcagcattttcctttggaaaattgctggtgcattttttaatcctaatggcata

SEQ ID NO: 18747 - DNA, 770 bp, Oryza sativa
agaaataggagccaaaataactctggtcaagcctgagagaatccattgtgttgcaaagacagaaagaccagctgatgttactgttaggccttcatagaagctgtaatcatttatatatacattaaaggtccttgaactctcagagactgtatcagcaaaataaagagcaacataatagctatcattctggagaggtattggaggccattgcagcaccaagggtgcatcttgttctgccaccaaagctgtattaaacaccccaggaggtggaagattccaaaaatcagccgatgtgacattgtgggtactactgactgcatgtttactgtctgggaatggctgccaataccgattgaaggtgtcattagggtacctaagtttgaatataggaaaacaggtcaaaaacttgtacagatcttgtgaaatttacatacataagaaattaatacatgaatataacacagcatatcactccacattaacccgtgagaagataacctaaaaacttgagttattcagtccatcaaagaaaatgatccaaagagtattacttatttgtttcaaaattttcatttatccctataacctatgaatacacatcattgtccatcatatcaagattggctcagctttgcagtcaataaacatactcacttctagtgaatcatgtaatccccattcaacatttcatcactaagctaatcgtaatagaggacctaatggggactgcagaagttcataatagtgaaggcaagagtgatcgagcactc

SEQ ID NO: 18748 - DNA, 2107 bp, Oryza sativa
cccaggatccagactaacgatggcggcgagcggcgtagcccctccctcctccttctcccgcggcgtgtggcgaggacagagtggcgcaggtaagtggagtcggcggcgagcggtggagcccctccctcctccctctctctctctcgcggccggtggggttgctgctgctactgcaaggccgcgccgcgccgtttctccctcctcccatccgcgacgatgccgagcgggttgctgctgcatggccacgacgcgccgtttctcctctgcacggcgcgtcctcgtcctcgcatctctcatcagtgggccccgcactcgactttttgagcaaggttctcgttccttcgctgggaaccgaagaagctagtggagctatgggccccaccaacttttttcaccacgtaggacaaagtaacgcttcacatagacaaagtaacgcccccactgtgaagggcctaatagatgtcacatcactgccttatcaatggattttactcccaatactctctgggtgtgtttagttcgtgccaaaattgaaagtttgattgaaattggaacgatttgacgaaaaagttgaaagtttatgtgtgtaggaaagttttgatgtgatggaaaagttggaagtttaaataaaaaaattaggaactaaaccagtccctagtctctataaagtactacctcctaaaatataataatctagaatcgaataaaatatatctagcgctaagaatccgaacaaatcatctctctagattcgaagtactactaccttcgtcctaaaatatagcaactttttgctatgaatctgaacacacaattgttgagattcatagctaaaaatgtttacatttgagatggagggagtaacatatatcaaatcttatcatagattcttactacctccgccccaaaataagcgcagatttgatatatgtgtctaatgtttgaccatccgtcttattaaaaaaaattaaaaaattagtcacatgaagtactaatcataaaaaaatttcaaataagacaaacggtcaaatgttggacatgaacagtgtaaaactgtacttatttttgggacggagggagtataatatagtaatctaatatcagattagatatatttaaaagtataaatctgaacagatcttttgttcagattagtatcactaaaatatatcaaatctgaccatagagtcttatattttgggatgaatatagtacctctttcatatatagagggtgccaacattcgattaaaaatctatccggtatcgatctcacctactccatccttgaaccagctcacacctttgttctgtcgttgttttaccgacactcacaatgcaaagtttatattcgagaaggtaatcgcttggagtacttctaacagcctctctaaatttgactagaacagcctctctaaatttgactatttaaatatctatttagctagtttgttaaaaatattaaagagtgaaatttgactttcactctaatattcttattattacactttccaatatgatagtgggttacacatatcaatctttatattcttcgtcttccttccttcctctagatattttccccctcaccattttttctctccacccatttctttccatgccgcttggtggtaggtggtggacaaggctagcacaagatgcacaggaggtgacggcatggacgaggcgagcatagaggctgtgcgggagggcagggaaagggagggaagggcagagacacctccgtcagggaagccatatccacacaggggggctagcagggtgatgagctctccgaccgctgatgccaccgcctatgccttcttcgctagattcggtatcgagctcaccttccctccctacctcatgcagatcgacatagaggacgagcttgacagtgctggagaggggacgatgaagggagaatttgttggcggtgacacatgaggatgatggaagaggtgtggatcttgacgattgtgacatgacagtagaggggtttgactctgtgacatgcaagctttgatggcggcctcaccattataattgtcgagctgctcctcgtcgttgccattgtacaccaccgcttaaggtcgtatcctatggga

SEQ ID NO: 18749 - DNA, 2315 bp, Oryza sativa
tcattccgattagcatagccattttcaaaattcaaatcaaggtactcttctaacacatcaactaaaccaaggtggtgatacacattactgcttgatgagcagaattggtaaggaaacgaatcaaaaataaacgaaccaaatcaactctgctgtgtttagttcacgctaaaattagaagtttggttgaaattggaacaatgtgacgaaaaagttgaaagtttgtgagtgtgtgaaagttttgatatgatggaaaagttgaaagtttggaactaaacaagacaattaagttccaaattataaattctggctttggtttataaggaaacgggcaaaaatcattttgttcccaaggaggccctaatttccgagcaagcacaaaaacggcgggggacacgagcacgttgagcagcggtggtggaggcgccgattggctggccgatgcgaccaccggcgtccgtctcgcacccccgcatttgtgaggaacaaacccgcttttccccgcagcgcttttgcaaaagccatcttttcttgccaatccactcgctcacccatccgtccatccatccaccgcggcgtattataatctgcgccattatctcgcccgcgcctcatgatcgccgcaagattcccctagcagacacaaacccaacccaacccaccatcgctagctcctcctccgctttctttttctcccccaaccaaaccacccactcgccgcacacgcacaggtgacaaagcccacactgccaatgccgttttaataccggcgagacgccgggcacgcgcgcgcgcgcggcggatgacgaaacgcaccggcacaggaaggatggcggcgcgtgcaatccactgtaccacgctgctctgcgaacctactagccgtaacagcaaactgtactacctacttgtaggggtaaaaaaaaaacgaaatggtaaggcaaattaactgatcgctgcaaattaattagcccctgccacgacaaaacggggagtaaattaactgtagcagtaactagtagtataggcgagcacgatgcctcgatgcgtaggaacgaatgatttctccgaccagcattagcacggatctcgaattctcgatcacggcgagagaggagatcagcgtgaattcattctcgcacgccttttcaccgcatcgccatcgctacgctactccccctcttctcaagcaagcttgctgctgcatcaaccaccaccacaggtggatcccgaaattctaacggaaaaactactagtaaccggaatcgtgggatgaaattggaattgtggtgggggacaatcctaacgaaccaagaaccaaatggacgtcgcaacagcaaagcgattcaacgaatgtggaaatggaattgcgaagggtggggatttgggggggggggggagggcgtaccgttgggcatgagcttggggtcgacgacgagctcgccgtggatgcggaggccgacgatcatctcggagaagcagtggacgcggcggtcgtagcggaagtcgaccaccttgtagttggtgaggcgctcgaggacggcgccgtagcggcccaccaccagtagtggtactcgaggacgacgaacaccacctcgccggcgaaccgctgcgccgtgatgaacagcgggatcagcccgtcgctgaactcatggtacacgttcccggtgtacccgcccgtcgagaacaccaccgccggcacgcccggcgggtgccgcacgtcgcaccgccgccgcaggctgtccttgccggtgtcgccggcggtggtgccgttgctgccgctgccggcgtcgaccaccggcacgatggtgacctcgtcgatggtgctcatgatgctgccctcgaacttgcgggtgtacggccgcaccttctccggcgcgctgccgcggggggcgttgtacaggagcaccgacgaggtggacgggtccgtgcgcacgtcgccgcggaggtagcacacgtcgctccggtagtggctccggtcgcagcacagcgcgctctccgccgccgcctgcccgccgcccgcctcacctgcgcaccacccgattagcacaccatccccaaaccgccaatgaatcagcagcaatcaatccagctgagcaaaagcgattagctcctctcctcaccgttgatgagcgccgagcaggggagcgacgccggagagcgagtctcctcgcgagcctccaggttgttctggttggacggcaggtgcgtcttgaacgccttcacatcctcccgccgctccacgcgctctgcgaagcacaagaatcaccgccattaaaggacaccgaaatcggttggggggggggggcgaagcaatcaac

SEQ ID NO: 18750 - DNA, 4993 bp, Oryza sativa
  unsure (1)..(4993): unsure at all n locations
ctgcagcccctctctcgctctctatctctcaccgccgcatgctacgccgcccacagctcacaaacctcaccggcagggccacaaatcgagctgccggatagatatatacaccgcgagtgcgcgcgaggctaggcgggtgaatggcggaggagtgggggaggagggattcgagcaatcgagctagtagtagtaatggctcgtcacgatcagaggtgcaggagaagggggagagttgaggaggggaggtgggaagaagaagaagaggaaaatgaatgaggaggagaagggacaaggccgggctcggtcgggaggaatcacatggaggacaaagggaaacgggggcgaatttgatgacgctcactgctactgtactaattatgtgcgcgcccgcccgcgggtgctaatcgcgattctcccactgatcccctcttttcttcagtaccttcttctgggctgtcagcagctaatccgcactattggcgcacacactggcggtcaaaatcgatcgtagtagtatgccgcatgtgttcaaaatgggggtactgccaatgtgttatgagaaaccttgtggcgttggggctcatgtttcattgcggaattatttttgtactgggctcaacatttatttttcttatagtagcatagtaatgatatgtctctgaacttatagtgccattatagttttgagatgtggtaacgggttacaccaactgacatcagtattcacaaacgagtaagagttgtgatatgtcttatgggctattaattgtatctatacaacttgtctaatacgtgaatatatagaatgtcttttgtgacatgattttcttgttgttttggaatttttttttataaatgatacctacacggctatagtaatgccattattcacaaagcgtcaagttttagatgaccatgttatgtactcctaactagatgttatgataactcaatagctataaatactacttacgacatatataatacttagatggttaaatagatgtttaaagaaagagtacattaaaacattggattaagaaccacagtttctaatggattggaatattttgagtcctaatgagcatacaatttgttttatctagatgatcatgtcgcttggtggcaagttgctcaaaaatcttcaatgtggtaagtgacaacaaatcaacagaatagttcatgtcacccctaaatatttattcttgtaacacactatacatggctaaatggttttataacaaattgcacgtcatcttagcatctgctggcaaccttattatttggtaagcttggatatacagtaggtttgttcatcttaaattagaatgaacccgttggaaaactaaccataggcgccttgcgagcttgcccgatcaacttatacaatcaaatgctaataatgggttagaatacaataaatgagctttcctgaatggtggtatcttcacaaccacttgagatccgtaatgacatgatctgcaacacagagagttatattgtcttggagattctaaattaagtgcttaccgtctgacctagtacatttgtaaatacgattactacttcctctgtttgatatatattcgtctttttttctttaaaaagtacagacgcagacgctcataatacacggacacttatccttatgagcataaacacatgtatcttaatcttaagattgataaaatcatcacagacgcctagctattgacggtatgtcaccaaccactgttggaataattaattgtaaatatgagcacccctgtcaagcctagtatttaacctgatgggtaggttccaccacaattaatctaaccagttgagagctatgtccacttcacactgaacgtgtagagatgtagcctagagggggggtgaataggctttcctgaaattttctcaacaattacagcggttaaattaacagggcccgaaacctcctggtgatgaacaccggaacttccgggcaggatgagtagcccgaaacttctggagttattgagccaggaacttccgggcagctgagataaattaaaactgagatgaaaaacatgtcctagcaagggaagtttaggcacacagaggaacaagatgaagatcgcagaatatcagcagattcatacaaagatcatacacaagagagacaaagacgatttttttcccgaagttcggattacacgaatcctactctccgttgaggtgctccaaagagccgggtctcgattaaccccttgcctcacttatgaaaagatcccagaagaggtccacagccttcaactcaacacttctaggtcattttctagaattgagtgaccaccaagatccaactcaaaatttcttctagaaaagaccacaagtgcaagttgctctacctaggacaacctctgaaaactcagcacaagaatctttactcacttaccttgtttccttgtggaggtgaggaaaaccttcccaaactttcccgggacatccacaagatctttggaagctcacgggcaacacctaaccgtctaggagaagatctccaaaagtaataagcccaagtgacagcccacaagatatccaaagtgctcaatcaaacctaatcttcaagccatctccaaaacactcctacactctcatctaatctcataatctcacaagatatgctctagatttgagtggaggaagcaaatgaagcttgggggtggctagaaaaccctagaacatgaatgaacagaagtggaatcgccaaaaggtgacctggggatgaaatccatatatataacggctaggtgacgccatctagctgttactcacaagtttgaactggaaacctgctaggaggttccggataaaagtgccaggaacttccgggcagcacttaggaaatttttgcaaataaacggtgcccggaagttccggccagaacctccgggtagccctctctgtcccggggagaaaaacatttttcaaaaatgattccaaaaatcttttgactcatggataagactaagagcactttgtataccctagaaccacacttgaaacccctcttaatagtacggtttttcctaaactcaatttcgaaagtgaaaaacctagtctaatcaccttcgatgatttttgcacttaggaacattcgaattggggggtctccttgcattcttagccatcacaactcgctttgggactaaactcctgtgaataaacttgataaacacgttagtcccctttaaccaccttgtcattaatcaccaaaacccactagggggtttaagtgcatctccacacacatgttcgcttttgaactactatatcattttgcctgccttgcctttttttttcttttccataaatataatgggagtatctataaaacattcaacattttttaatgaatgttttaattataactatattataattggggtataattacattgtatctataatatagttacaacttaacttatatatgcacaaatataattggataaaacaaatggtgtggacgattagcaagcaagcattcagccatcctgtaattcgactcttggcttcagcatgcgtgtgtaatttttcccatcctgtgcaaatctcgaggcgatcagaggatcagaaaattcaaaagttttgagcagaaaaaaccgtccaatgtttttttaagccattccgaattacaattagcagagacacattgtaagatgaattagttacagtcagcatataacaggcaattctatacataaatcagttctatacatatcacagtatcactatttttagcctcaataccattgccgatcgcacgctagcagcttagccgcacggcgcttcatcttgccaaataagcaaccatctcactcctcctaaccgtttttcccaatttcccactagctttactactccacaaatctgcgtgacagcgaccgtacgtgcacgttacacttccgtggcgcgactcggcccgcccccgccgccgccgctgcacaccctgcaccgcggccgctcggtccaaacctaagcacaactctgtcgagactcgagagggaacgggtgaatcgatctgaacgggtcgcatcgcatcccgcgatgtacgctggcgacgcgcaccatactccatcccactccgccgcccgcacggctgcttctccccctcccgtgcgcgaccgcgaccgcgagagcccaagaaaggaatagctagcgcgcgccaggtagtttgccgcgcggggtggaaatgcttggatttctccgtgcggtttccttttcccccccgaggggtgggacggatcgggaatagtattatcgtacgtcgccgcccacccaccacgcgtgcgtgcgtgcgtgagcctgcgtacatgctctccacgaacgcaggggatatcgcgagagacgtggaggagatcgagtagtaaggagaccgaatcgatgggagagatcggtaatcggaggaggaggacagaataattaaccggtgtgtgctagagattatggagtccgacacagattagcactccactgctaactaagaaaaagaaatgattgattattgagagtggatgaatgggcaggcagggatagattattatacaagtattttgttggccgaactagaggggaactaggtggtgtttggattaagcactaaactgtagtcactataacatcggatgtttaacgctaattcaaaatattaaatatagactaattacaaaactaattgataaatgagagctaattcgttagataaattttttaagcttaattaatctataattagcataggtttactctaacatcatatagactaatcatgaattaattaggtttaataaatccatctcgtaaattagtctagagttatgaaataggttttatcgttagtttacgtttaatatttttaattagtatataaatatccgacgtcatagttttagtccctagtggtcttagattcttggggtcggagtcggagggttaagtgaagtggaaanntgacgcccattag

SEQ ID NO: 18751 - DNA, 8041 bp, Oryza sativa
cggtaaagtcatggtcctgtacgccggtgggctgtatgtgtaaaacatggaaaagttctccagaaaaaatgaaaacgtcggtgacgtctacgcagacttaactctgcagggcagtacggtgctgctgctgctgctacggaagctgtggatctcctagttacgccagccaccgttgccatcatccacagtgctagtggtacattttgtactctctcctcgtagtagtagcatgcagcagcaatagccacgggtactgcacgcggcgtcacggacggtggatcgaatcgaccgaacggctggtggtggcgggggcacggaaactactgcagcgacgcagggggaagcagtaaatggtccgaagcttaggtaggaatgaaaaaaaatagaaatagaaaaaacaaagtgtaaaacagataattgtaaaacacggaaaaaatcatcagattggaccgaaaaaaaaacacaagaatcagatgagagatatactcaaagaaattttttcaagaggttggttctcttggtaaattttctttaaaacttacgttcaataagctattacagataaattttatagaatttagaaaacttcattcctttaaatcaaatgaccaaatataaaaaatgtcacgccccgaactagtcccgaccggaactagcccgtgacgctccaaattaacctgttaatcgataccagtcccaggaaacagtgctggtatcacaggaagacagaatatcacagcaacagaggtctctttattatagagtaggagtacagtcatgttgggcgcggacagatcccgagctcacaaaagggaagcggaagccaagacttggaccaaacatcacaggcgcgactgggaactaggccgaaaccctaaaactcatcgtagccggcttgctcctggaagaactcctcgtcagcgggatccgcttcatcttcttcagcaagggtgagtacaggagtactcagcaagccatgggaaataagtgtttaatgcaggcttcaaagaaaggccgttgtttttgcgattgattttatttaaactcttttttgaaacaactaagggagtgcttctcaaacgacacggatgagacagtgcgtctcgtccggtcggagtatgtgcaatgtttcagtcttttgaattgatcaagattggcacccggccaacagctttcaaacggccacccgggcctggctgatcccatcagccgcagattttccaaacatcaaacccattccacaacagcaaatttcacaaggcagtagtcaaacaaaactatgctaggaatcacctcacatccgcccatgaccgtgggcacggctgctcgaacagttttaataacctctgcagagggggcacactttacccacacgacattactaacccggatcatccagcccgtgcagaacggccacgactagagaccttaaggctttcatgacaaagaatttcaaaagccgacacaggttcaccatatgccaacgagaggggtcccagaccaacaccagattaggtcccagaccatactgtgccaggaagccaaggggtcctccccgacaccaccccggcgaatccacatgtctcttagcatcatggctcccccgataagctagttactcagccagaggtgtcccattccacccatgtggtcgtacttgtcttatattcggatgaaattccaaggaaacggtccttaagtgcaagagcgggaaaccgtacacccggtacgttcctcggtccgcggttttggaaattcatttagttcgcaagcaccgacccaggtgtcgggttttccaagtcttttgtaaaacccaagttttacccaagatgtttctcagattttaagtttgaaggcgaccgtcgatacccgtgcagagtgcacgattaccgaggcgcaactaggtgggtacaagggaacatggtataacaattacaatggaagggtcaaatgcaacaaattaggtaggtccgccaatctgccttgcagacgggacaagcagattaagtgcgatcctatcaatgcataatatttttcaagcaacataattaagttcaaatataggctcaagatgttcaaatgtggcttgccttgctcgagatcttgagcttgatcctcgaaatcctcgcactgcgggtcttcgggctccgaaactacacgcgaaacgggacaactcagcaaacggcgaaaataaagccctattattgacctctaagcgtgccattagatagatctcgagatttgagaattttggaagttgaacggagtcaatcggacttacggttgggaagatattgaatttctaagattattggatttttggtctaaaggaaaaggatttatttaaatcctttttgaaaaagaaaagaaaagaaaagaaggaggcagggaaattagactttcctcgggcggctagggcgcggcccgagagaatggggcggctcggccgagcttaatgggccggtcggcccaagaaggcggcccaaagcgcgcgcgggggcggggaggggagagagagagccggtgggccgggtccatcccgcgtggtcccgggtgggacccgcttgtcggcgactcggctcaccgtgagcgaggtgcacgtggggcatgctagggtttggggagggaggcgcggcgcatgcgcgcggttcgtggaggacgcggtgcggcgggcccacgcgcagcctcacggctcgcggtggaccgcgtgcgcgagggggctgtcggtgacatgggaccgggagtatcatgactagaggcttgggcagccgcgatcacccacgtggcctgaccccctcgggggggggtcgggcccgagggtgatgtggccgcccctccctttgttctccccgaggggtcggaccattcccgtttcggccccgagggccggggcgccccgaccccctgtgggtttggcaccacgtatatgggttaggtgagcacagcggggctcacctaaccgcatttattgcgggttggatgagcgcgtcacgccgcatgtaatgccgcgcagcgagctcgcttatccggtccgtgaccaggcgcagcgtgtgaccggtcagatcgcgggttaggtggtggcaggtggcctgttacacgcctcgccccgtcccgtcggaatgatgagagcctccaggcacttatccctagccggagccggcgtgccaactcctggggttggcacgtcagccccggccagatacatgccaggcttcatcccaaccattacaaggaagtaattgtatgaagaagggcagacgtgcggcatgctaaactgacacatggtggacaagaatgaccggtctgtgactggtctgacaccggtcacgtcatcggcaaacaaactgtgctcccacattgcgtctgcagccggcggagtggaggtaggtatgacccgtcccatcgaagggtcattcggacaacagccattgcaaatctctgcccattaatgaaggattgacaaggtgatcccctgtgtcaggcgagtgtcggcgctgggtctcactcaaagacaagctatgacttagcttctaggagaggtggtgcatgtggtatccccttgagatataaaaggaggaccttgcccaccggaaagaaaaaaaaaggagagaaaggagaagacgatagctgatagaaaacaaagagtagggagagggtctctagagttcaaacgctcttgctctccacctctttataatttcttcatacacagatccaccagaacacaggagtagggtattacgcttcccagcggcccgaacctgtctagatcgcccgtgtcttgtgcatttgctctctcgcgaaccattccacatatcgagggcttagaaccttactcagcgcccccggccgaaccggcaaaggggggcctgcgcggtctcccggtgaggagccccacgctccatcaggggcggagggaagcggcggaccggggtctgcttgacccggtcgcggccgaggtggcaccgacgtggcgcctacgtggctgccacgtgggccggcgggaggtagacgacgacgccggtcgaaacggacggcggacgacagcggcgagcggcggagcgaaccatggcgatacaggcgaaggcgagcacactgggatgttgcacaggacgaggggagacgagccaatggctcggattcgccgggggatgctcgacggcggcggattgcggcggcggcaaccgacggcgggagaagggggaaacagcgatgaggtcacaaggggccgattcccggcggtgagagcatctacgcggctacgggaatccgttgctagcgtcggattgggcggagctacgccgagcgaggccggcgacgagcgggcgctacggagcacgggcggcgacggcggcgagcacacagcgagcagcggcaacgatcggggcggcgccagctagctacgggaaggctacacatgctactaccgaaaactaaggggaggagatggatcgaggagggagaacgggggaatgcactaccgagatgaggcggggcgctgtgacgagaggccgacggcacgggagtgatctctccggcctcgggccggggaagaggaagaaggcgagcgcccggagtccccttccgtgtcctcgctcgtgccggctcctccgacacgtgcgacggcgaacggcgacagcgaacagagcacgggaggcggcgacaatggagtggaggcgaatgggagaggaaaggaaaggggggggaagcttgggtttatatgggcgacaatgtcggtttgggagaggggaaccgactttggacggtcaagccagcgagctggcgctctggctagcagccaaatcggcgacagggaggaggggaatgacgccggcagaggaagaaaaaggaaaaaggaaggaagaaagggggcttgccccttgccactttgggaaaaggaggaggggatgggggcgactcggcagagggaggaggagctctgcctccgtcccttggaggctagcgcgcggagtggcgggggccgggtcgatgatgacggcgatgacggcggggcggtttggagcggagcgacaacacgggcggcaggcgcgggcaggcgcggcaggcgttggcggcggcggcgactggccggtcggccaccacggtgcgcacgcgcgcgggcggcgcggcgatttgggcggcatcggcgggaacggcagcgagagcggagagggaggagggctcggcgcggctcacgggcagagcggggagagagagagagagagagccggggagcgagggggagatgggccgagagggattcggcccatcgaacccgagggaggcaaaatagacttttgcggagggatttgatttgggaaggatttggattcgggattgaactcgacgatagatcggggatttgagatctgagatggcacggacactagacaataagcaaagaaacggatttcgcaaatagggtttttaagagatagtttttccgctaggcgccacgacggaacgggcgctacagaatttctataaaattcttctactaaattcttttgattcaaatggccacaggaatcagataagagatatactcaaacaaattttcctaagaggttagtccttttgctaaattttctttaaaacctagattaaattagccattgcagataaattttataggatttgaaaactccaatcctttaaataaaatgatcaaatagaaaaaatttctataaaattcttctactaaattcttttgattgaaagggtcttaggccattctcaacccaacacactagacatagtttccataagctccacatcatcaaaaaaactagtactagacactactcttacaatgcaaaaaccattattccatacttaaatttagtgctacttatctcacatgatgtcttggatattgtgtagaaccatgtctcatgcaaaacatggtttcctttgctttcctcatttattcatttgccacgtcacttttcatcttaggtagtaacttatttaatgctatagacaccattcttgtcattgggttgggaatggcattaggagtagtacgtccgctgtacgctgcacgagccggggagcccaacggttggtggctgcctgccttcgccaatttatttcgccgcaggccgcacagccgatcgatctgcagagcagcagtaaaaacgctcgtaacgacggggtgttttggaccggaggaatggcaggttccagatcgatgcaaattcgcggtgaattcttcttctgctactgctactgctgctgccgctgcgttatattagctgtgatctgggctgtgaagtcgctcgggggatagaaaaaaaaattgctcgtggctgtcaatgtgaatgtttgttggtgcagataggtcgttaggtacttgcatgatggtgagggttttgggggcggcttcggatgcaagggattgggttacttctagcacggttggtgttactacgtacgtacgtgcatgcgtgcgaatgattatattctagcttcaagtgcacactatctgatcccagatcaagtcgtggtagggttcatacactgggttgtcgatatatcagttacaccttacgagaaagatatggtgaatgcctgttttcagacaaaatatcttttttttttagaaacacaggccaataaatctatgggtatatctatacctttgaattctaaggttgtgtttgtttctaatggttgggaacctttctcctctagcacgtaaaatgaaacgacggtgttaacacacgattacttaagtattagctaaaaaactttaaaaatagatttatataatttttaaaggaactttcctttataattttttttgaaaaaatacaccattcagtagattgtgaagcatatgcgtggtaaaagagagagtagagattggaaaagtgtatgattaattaagaagagaattggagaacattaaaaagataagaaaaacgagatgaaacattatagtatacgattaattaaatattaattattttaaacttaagaaacagattaattaatactacctccatattttaatgtatgatgccgttgacttttttttcaacgtttgaccattcatcttattaaaaaaatatataattataatttattttattgtgatttgattcgtcatcaaatattctttaagcatgacataaatattttcatatttgcacacaaaatttgaataaaacgaatggtcaaatgctagttaaaaagtcaatggcgtcatacattaaaatacggatggagtatgattttctaaagcaattttcgcatagaagtttttttataagaagaaacacaccgcgcagcactttgataggcgtgcaggcggaaaatgaaaaattttcctctcagaccctgtttagatcaatttgatgtggcaattttttttagaaaaagttttggtggcaaaagatttggtattgaagttttgctagttggtgtttagatgcatggtaaagttttaccattttactagtaaagacagagagagcacggttcccaacatacttttttggtaaattttgctactctaaactttcaaatgacaaataccaaattgccaaccttttctaccagtgtttagattcattttagcaaaagtactctaaaacagcaaaaaaaaatttgttattttggagaaactaaacaggacctcagccatcttgtgccgaacacagctaattaattggataattccaaaggcgctccgatgtaaaccaaaaatcttacacattgatttcatgtattattgcgaccatagatactgttgagagtttgtaataaataaatcacgtaactggaaatagtgtgcactctactttactaattttgaaatttgtaattaataaatatgatatcgtaatcatttcgaactctcagttagtttagtgatatgtaaaattaattataatattccaatttactactctgctatgttccataatatagtaaccgagaataagacgagagtacaacaaataatctagatagacgtatccagattcgttatattatgaaatatgtttcatccaattataggctgctataatta

SEQ ID NO: 18752 - DNA, 722 bp, Oryza sativa
ctgcagccctacattgttcaaaaacactatttattcggctgattactattcagtttactgtttattcggctgattactattcagtttactgtttgttcggctgattactattcagtttactgttcaaattactgttcaatattgttcacttcgagagatattttaactttaggatctttgcagggtggcgaatcctacttagacagcctcagaagcttgtttcagatgatgtaaagtcctactcggtactcaccgtatgcctcacctatctgtctttttagaagcaacttaaaaagatattccaagtcacacttgttctagctaagagtttatcgtctccccaggcagttccaaccgaagggaacacttctctacggataccgattctccagacgcctatgcaagatgcaggctaaaaacgagaacaaaccgaagaggtttctcctatagggtccttagcataaacacttgtctagaactaacgtgcaggaatacttaaggaaaattacttcatattaaatagataagcttacatacggttttcccttttgggaaacccgaaggtaggtacaagcaagctgttcttaccttacacagcgttataacacaactccttgcttcaatacactatgcaaggtaggctaaagtcactactactaagaacggtggaatggagggtgagagcgcgcttggaagctttgctctgaatggtgtcttcgttg

SEQ ID NO: 18753 - DNA, 845 bp, Oryza sativa
ttaattacgcacagtcaagctgtctacttacaattgaaaagcaatttgttgcttggggaagttcatcatgcaggacagttgcacacttgcactgcagtgtttagactttttgtggggagccacagcgggtaattccaagggaagagtttaagctgcctgctgttgagctaaactgtgtctgtctatggatttcttctgctgcattgccttacagttcatccttttgcaaaagaaattctatagacatgaagctagcctgaatactcttgtaaatcgaggtgattgggtaataagtgttccttagcttaatcgatcagatccttgtgatctaaataacattgcgtgttcaatcgacccacgttgcatttaggtcctattgtactgaagccttccataaagccatactgcagcagcactattgggcctgcttgcttttgtcccttttccaactattggctttaacgattgtcaaccaccggaactgctcttaatgtatgtggtatttgactcttacaggaacgaggacactgtaacactatactgaataggggtgtagttcttgtgctaaattgctgacacattgaactttttattgcaatgtttcatccgtaggctggacaccagcatgtgagtttaaactttcgtggaataaactattcagctgaagtgtatttgaatgggcataaagaggtacttccaaaaggaatgttccgaaggcacaccctcgatattactgatgttcttcgtccggatggtaaaaatctgcttgctgttcttgttcatcctcctgttcatcctggtgcaattcctcctcaaggaggtcagggtggtgatgggctgcagga

SEQ ID NO: 18754 - DNA, 636 bp, Oryza sativa
aatcatctcccttaaatctgaccaattccatctatcagatggaactacattccacatatcaggttgaagaatgccctggtaggagatgcattgagtacagccttagaacatagtattggctattgcaacccagatatcaaataacaaaatgacatttcaattcaaaagccctaagagtttcaatatcttacttaaactacttgagaaagaatagcaaatcatacaggcagcatttttcttggccggattggcacctgcaacataaatgctgggaaagttattggacatcaggcactaaccttgctgacagggctcccgctataagtttcataaggaccttcttttgcagcaatttcagcagaagctttcaaggcatgataataaatagtctcaaaaatatccttgttcaattgctgagcctgaaaagatcattgcatcgcatttcagcgaagtatatatagattggaataaccacatttttaggttggaaaaatttacctctgttgaatcaaatggcatgccaagtaaaatgaaggtgtctgccaagccctgaacaccgattccgattggcctgtgcctcacatttgatctctttgcagtctcaacagggtaataattagtatcaattattttatt

SEQ ID NO: 18755 - DNA, 2703 bp, Oryza sativa
  unsure (1)..(2703): unsure at all n locations
cgtatacctagctgatttcaacggtaatggcttctgatgagcgctataactgtgcggttttcacgagtaccgccaaaccgtgggtgacgataaccacaccctagatcaatcagatttcttacagttataaattctacnntacctccattcccaaatataccagattttagttagatgtaatatattataatacaacgaatctggagagaagcatccaaccaaaatctcttatctgtgcgtttagttcacactaaaattagaagtttggttgaaattaaaacgatgtgacagaaaagttgaaagtttgtgtgtatgaaagttttgatgtgatgtaaaagttggaactttgaagaaaaagtttgtaactaaacacggacatatatatatatatatatatatatatatatatatatatatatatatatatatatatatatatatatagggacagtactaaattatatcgggaacccttgtcgcaaattgcagtgctagctgcactaggagtacaaatccctagtacagcgtagtactccagtcgccggctcgccgcacaccatcgcccatcagaccctgccgccgcggtctcttctcgaggcctcccgttccctcttcccggcgagctagcgcaccgcgcgggagagaaaggagagcaaaaaggatgggcggcggcgagtgcaggagcaacgactacggcgccgccgcctactgggacgcccgctactcctccccttccccctcctccaccggcaccaccggcggcggcggcggcgcgttcttcgactggtaccaggcgtacccggcgctgcggccgctgctccgcgcccgcctccccgcctcctcccgggtcctcatgctcgggtgcggcaactcccgtacgcctctactacctcttttacctgcgtgccttcactcacactagcttgaaactatctgcgtactcaaattcaacgatttcggcgctaattcgtcgcgcgcgccacatatttttgggaatgcactggagtagtagattaccctgttgcattgttatactaattatacggtcacacctatccgttgcatgatgcagtttgatcttattttggcagttttgtcggaggacatggtgaaggatgggtacgaggaggtagtaaacgtggacatttcatccgtagtcattgagcagatgagggagaaacacgttgatattccacagcttacatgtagtgttttcattgataatttcaaactcatagtttgtgaattatggtttctatgcaaggtctatttacttggtgtcttgtgttttaagatttccagatggatgttagggacatgagtttgtttggtgatggaacattcgattgtgtccttgataaaggtaccttaagaattttatttaccgaagcttgctaatgctcttgtggaatacttttttatggaatttactgaataaattcatttatggtatttgtttatttttcaccactacacttaccttgttatgacggaattatggaaatttctgaaggtacattggacgctatgatggtaagctttacttgttgcacaaacaacattttagctttctgatcaggcatgaaatgaaaaatcatctgaccattattgttgttgcatttgatcttactattttagtgtggcgatgatgctcctcttggtgcttccaaaatgctagcagaagtggcaaggtgtctggcatgaaagtttatccttttcactcttttcaaactagttggttcccaatgattcagtatgtttcatgttgaactatttttccccttgcaggattcttaggcctggtgggatctacatgttggtacatcctctaaatctaaacaatacagtgtgtaatcattttgcgtgggatgatcttatggagcgatgatgttcttttgcagataacatatggttgtcctaaggaacgagtgcaacttttgtaccaatctggaagccacaaaaaaattgaactgtacattatgcgtaagtatttttcttatgctatttcttgattcatggagctggacataatttgaaattccagaaggaaacactgaataatggggagattcaggtttgactgattccaaagggaaacattggttccaaagattggttgattctaatgggaaatcttaaaactttgatttgacgctatgcttttaatttctcagttggacctgataaaatttactgttatcattttgcagccacacctggataccagttgaaatggagcaaaggtgtttcacttgcacaacctatcatggaggaagtttcattgacagtggatggtcaattaccacctgactatgttcttaaagatccagagtcacattttatttatatttgcaaaaagccagatgccgctaatgaagctaattctgtggttgctaatgaaggggaaaccataacttcaaaatgatcttttgtatccttaatttgcattttgttttgggttgctgacgagccttggatagtatgtgctcataataaattttgtcagatgttactgttggatgaaaatcacgaccctctttagccgcctggggccccaaaggttgccaatctgtgctcgatatttcttctcggaacttggaagatgtgacacaaaattcatatgtatttcaatatgctttggaaggggccagctgagttgtgttaagcttgtttaaaacgactgagttcctgtttatatcgaca

SEQ ID NO: 18756 - DNA, 1314 bp, Oryza sativa
caaaatcttatattcagatgatgttaaaaggtttagccttctgccataagaaatgggtgctacacaggtatccactaataatcttgctaaatttcttttagagagagtatcctttgacaatctgtgctgtagggatatgaaaccaaataatttactcattggcgctgatgggcagcttaagcttgctgactttggtctggcgcgcatatttgggagtccagagcggaacttcactcatcaggttcttttttgtggaattatatttattagaatttaattctctgtataatctagtcgattgtatacttggaacttgagaatcttgttgctgaaacaaatatgcaatgaacatttcttcaagtgtattgatgtttcttttgtatttttttaactcggtcgatattgctgtttgatgcttcgttgttctgtttatcaaaaagaacatccttgtggatattttgcgcccttatgctttacccttttttcaacaacagtaggcacctaggaagtagaaaagcttaaatctttatggatggaacaaaatgcatgtggggaagttcttatgttatttcctggacatttgagttggcagagttggattttgaataaatgtcacaggatactgatttcggaagtatgtgtccttgaataaccattttcttggtaaatattaatagtgttggaatgactgtttcattctgaattatttgtgctgattttcattcaccatcatatctggaggttctcttaaaccatctttttatcagttatgttgacgatagtcaaggatcaatgctacacttattacagcaatgctgtgtgctttgcttaaatgagtgttttttattttttattagtttcactttgaatcatattatcctgatgctgctgggcacttcagttttgaattttttttctcaacatataggtctttgcacgatggtaccgagcaccagaattattatttggcaccaagcagtatggatctgcagttgatatttgggctgctggttgtatttttgctgaactgctgcttaggcgaccgtttctccaggtttaaccgactcttataattttatgctctgtgtaatttcaatctatttataactaagcactttttatgctctgagaatgttgcatggctaagtttgctgttcctatatgttgtgataactgcatgcgtaaatgtgttacctcaaaatgttgtttccaaagccagattggacttgtagttttcaactgaggaactggaaatggtcaggctctggtgaggtgattgaactgaacctgtaaatgatttaaactttgggttta

SEQ ID NO: 18757 - DNA, 707 bp, Oryza sativa
tcctgcagcccttcctcttatgcggcccgggtcggtgctcctccagatcgtgcccgtggggctcgactgggccgccacgcgttctacggcaagccggcgcagcagctcggcctcgggtacctcgagtacaaggtggcgcccgaggagagctcgctcgccgccgagtacggcgtcaacagaccgtcgtgcgcgacccctccgtgatcagcagccgcgggtggtgggagatgaagaaggtgtacatggaccggcagaacgtcactgtgaacatcaaaaggttcggcgagctgctccggtcggcgaggctgcacctcaagaacgccaccgcctgcggcaaggccgcctcggcggcgacgacgaccgcggcgaggtaggggtggctggctaaaccaagctctccgtcaattaggtgttaattaatcaaccaatcaatcaatcacagctgttaatttgcccatgtttttttctcggtttattttttttttcatttcatttttctgctcgtttttggttggggggtttgggaggagtataattaagaagggtaaagaaagggagatcctgtaaatagaattggatttattggtagggatcgcctccgtgcacagtgcattcgttttcagttcggtgttgttactaggagggagaagaataatttatggttaggggttctcataaatcatcttcttttgttagtctatactact

SEQ ID NO: 18758 - DNA, 1445 bp, Oryza sativa
attatgttgaatacagtctaattttaagacaattataaacatgctatgcagaagctgttatcgttctttctctagactgtggtagatcctttttcatttctattaatggaaatggagggctcttgccctttgctaaaaaaaattgcagaagctgtatatactgtattcaaatgaaaaaaaatattgacacaatcaacatagtatgaaattataatgtcaaaccataaacgaaaagctatacaagtcaacttacagttcacgcaaagatgtgattatccccagtgtctgcggtactgttccatttaatttgttgtcctgcaggtgcctacagaaaagagttttttttcctacgtagtggataagtaagcattattcaaatagtttgggaattgactagctaaggaatagcttacagtcttgtgagattcctcaggttgctgagatttggaataggtccagacaagctattgtttgcaaaagatctgttcatggaaataggttaattttggcattcactcagtttgatatatatgcagcagaacttacatatcagtcagagcggtgagccttgcaatatcagatgaaagatatccagagaggcccatacttgaaaagttcctggtgtaaaccaatacagaaaattgttaccacaaaggggaaaagaataaaatcaaataatataagcaccatgaggataactcacagtgagatgacacgtggtatttggcctttatcacatgtaactccagtccaagcatatccatgaggcatacatggatctccattccaatcatcaggtatattttgaaggcttctcttaatagcttccagggcatgtgctgcagaaattgtggagtaattaatacgttaatctaataaaaatatgcatatgcagactattcaaaggtggtaatcaagtaaaagcaacttggtgcattaccaaaaaaatcagtcaatagttcaatacagatacttaaggaagcaccattgttgtggtggtggagtcatgggtgcatgaatccacccaccaaggttcaaattctggtgtccacaaatatggatgtatggatcctagttggtgcaaaggctggaaataatacttccattatctaaatataggtgatgctacaacattaacacctcacagagttacaaagtgaaatgtactgtggcccttttttttgcgagtcccatgacctgatatgcagcaacaaatttccataaaacatattttgatgacctgctgctacatatataatgatgatttgttggccacataagtgccaccaaaggcataatacataagttgattatttggttagcaacagcttgtattgatcaatactgccacgaaatttagtcatttagtttaacctattacgaaaaaagatacaaatggaagaaaaaatatatgtagcgactgacataccatcccgaggaaatgt

SEQ ID NO: 18759 - DNA, 3772 bp, Oryza sativa
ctttccccaatagaaaaatctgcgttgaatgggctagtgtaagcctaatttcactcgaaggaaaagagatgcacttgggcctagactctgggcttgcgagccaaggttagcaaaaaggtgggccggctggcgtcttggcgagcagctccggtcgaagtcctaccctcctgtgagctgtcgatcgtgattcgtgcaccaaaccattcgtcggattgtcggaaggtagcaaaaggaggcacagaccacaggtagctactccctccgtcccataatataacaatctaggatcgtatgtgatgtatcatagtactataaatttggacatgtctcctgtccagatttgtagtactgggatacgtcccatccgattctaagttgctatattttggaacggagggagtacagtgaacggataggttgccctccgtacgcccatgtggcagtcacgaagcgtacagggtgttactctttcccgttgcaagaacgaaaaattgctgtcaatttttgggaccagcaatccctttctcaaataatatgcacgagcaactctaagcgagatctttcattagcttatgcaggcaaaattgctgcgtccgcataggttagccggtgtgaggttgtgctgattggcaattgaccaacgcagcattcacagattcactatcatcatggcacaccgaacatcacatctcagcgaacgggtgctccaccaatgcaccaactaatgcacgcacaaatgcatagcgcaccaatgcaccaactaatgccggtagtttgatcagatatcccagatgtgatcttgccgatgggttatccccaccagtatagaagtgtttagtcacactgaagtttggatgtttggttgaaattagaatgatgtgactgaaaaattatgtgtatgaaaagtttgatgtgatggaaagttggaagtttgaaaaaaactttagaactaaataggacctatgactacaactatctttcggttgtcacgaagaccccgacgtgttgtcacgaagatcccaacgtgaacgtgacggagaagagtataaaaaaaaacacgatccgcgctgaccgccgcgccgccaaccggcaactctggcactcgcacgccgggcacgcgtttcacgtgtcgaagcgaagcgactgcacctgcacgacgacgacggaccggtctcgcggtctcctccggtcgcgccaccccgttccgactcccgtcctcaccgtccccgaccctccgcccaccactccctcggtcacttcccccaccccacccacccaccacgccgccgcgactcccccaccgttccacgcgcacgcgaccacaccactgctctgcacgcgacccgggattacactacacggtacacagccgcgcgcgcggactactggccagataacgcatcgcagattcgcgggaacacccctcgtggcgcacgacaactattcagtagtcaagtactagcgccagccaaagccaacacgagtttgcacgggcacgactccgcgccgcggcggccgtctcgtcctctctccacatcatccccgttccctcgcacaccacagcgcgcgcccgcccgccagccatcccgctgccgtgccgtctccatcttctatccctcctcctgctgctgctgctgctgctacttaccccgcgatttctcttcctcttattactcttcctctcggctctcgctcgctcgctccccgcgcgatttctccacgccgcacgccgctcgcgagttagggatcgatctcgtcgggggcgggcgggagagggagagggaggagagatggcgggggatggtgtggactgggagagcgtggcggaggccacgtccggggcggtgggcgcgctcgtcagcaccaccgtgctctacccgctcgacacctgcaagaccaagttccaggccgagctccagacgcagccgggcgcgcacaagtacaggtaagcagctcagccagcggctcctctctctctctctctctctctccctctcttcgccatgtggtggattgctgatccccttgtcaggagcttgctggggagatcgccgggttctcgatcgagaggcaggcgacccgtcggaattgggatctggctgctactgattcagtgtttgggctgatcgtgatgcactggtccgattgacgtggataacctggcgttagcggcggatgtcgtgatcttcgcataggccagttgataatttccctgggatagaactgtcgttgatttcttatttggtggccaaaggatgcagaaaaaccccagccatgtctcctttcgccagctttgttgttagaaggggggaaaggaactttagacctagtgtttgcattatatctctgaattaggctcacacttcacaaggagttcacttaatctggaatcgtatagtatgttggcactatgttgattggttggagattgtttggttcagctcccagttgcccaccaataggtgttggttatagaatggtttaaccaaataggaaggattatgcaccccacaaagagaaaaaaaaaagagagagaagggttatgcatatagagattttttttctgtggccaatcaatggactagtcatgaaaaagaaaaaaataatcagtgggtggaaataccttgtaattttttcctgaaccaaaggggtccaatacctgcttgtattgaaagccagagtttttcaggagataatatgaaagagaatagagttgggagcatctctggcactaaaagcaacatatagtacatattaggagacaccaccagattcaaagagaaattaccaaaagacaacagcagccagcatttagttcatgcaggttagttaggcatacagagcaggtcatagagcgctgaaaaattcaaatgatcttgaacctcaagtataccacaaaagctatatatttttattcaaggtcactaccctccacatcagtaggaagctcactaagaaataattttcatgcaaagatcttaatcttgagaggtattttgcctttccatattttgtttaccgatcgctccaccacaagatataagattgtagagggactttggcatgtacatgttatttttctcttccataacatccacctggatgatatggtccagttaattccttattcattaggttttgccagctaactctttgtagcatttgggatgtgcattgaccttgacattttcacatattggtacctcacttgattgcacctttatactcttaaaaaagttaaattgatttgggtgtcatgcatttttgccagcgtttgatgtatgtcctggcatccaggccttcatggtgttccatctcttctgaagttctgagttactctgtttcatacaataagtgacctcacgtgtttattttttccaggaatctttcagatgtcttttgggaagctgttcagaaaagacaaattctatccctatatcagggccttaagacaaagaacatccaatctttcatttcacaattcgtttacttttatggctatagctactttaaaagactctacttggagaagagtggagcaaagtctatcggcacaaaagcgaacttgttagttgcagctgctgctggtgcttgcacagttgttgttactcaggtaactaacgccataagtaattagctaccattcactgaaaatcgtttttacctgctgacctttatgtgttcatctctcctgtgttttcagccactagatacagcatcttctagaatgcaaacaagtgcctttggaaagtccaaagggctgcgggcaact

SEQ ID NO: 18760 - DNA, 639 bp, Oryza sativa
cttattggaaaatggtggtcgcaggtctatgggcataccaaattctgtgaataaaacgtaagaaatgaaatttttttgtttgaaatggcaagctgttgatgcccttctattgatgtgtctttccttatgctgttggtgcccttctattggttgatttatgctgtggaatcatgaaatattttcttctatttatatggcttattggctttccttatgctgttggtgctgtggaatcatgaaatattttccttttggatccgttacctgcttgattcatcgactgatatttcattcttgtcatggtgcacaggccattgcatttatgtattaaaacatggaatgcggatgtggtgaaaagatgggttgaagttgcatctgaagaggagatagctgaagcaattgatgtacctagccctgttgggactgctttgtgcatggcagctgctcttaaaaaagagcacgagaaaggttattcctgactttgttcatgtcacatccatacttacaaatagtcaaatatcaagagccatctcgttggttctttacatacactgaatgctgttatagaagaagcatcatgttagagaagagaactttgatattcacaactctgcttcttattccactaacgagagttgt

SEQ ID NO: 18761 - DNA, 609 bp, Oryza sativa
cattccttctcctttacgaatttcagtgtccccaacaacattgtcaagataatgtgtatctgatattgccaatggcaaaggcttcttgcaaaagaaatcatggtgggcaagcaatttatagtggcttataaatcaacagcaccagtgagctccctagggcctgaaatatcagaaccaccagcatttcaagcaaccaagacatggaaaaggacatgtatcaaaaattatgttacaaaagagaaaatagcttataatgaacagtcgtcgcactggtaggctcaaaagtcagcactgatttaaatcacagcaaaaagaaaatcactgcataacacccccaccaaaaaaaaattgaccacaaatatttcaagatgtttgacagtgtttccggtacatggagctcactcagctcaggacaacaacatgatgtttgcatcagataaccaatacaaatgattatggtggcatcagctacacgccaaataaagcacagattatccctgcttattctttaaacatagttgggacgtttttgctggaaatcttttgatgttcagaaaaaaaaatccttatcaacaaaaaacctaccttttccaaacttcttgtcatcag

SEQ ID NO: 18762 - DNA, 742 bp, Oryza sativa
aatcacaacctttttggtttcaggacaccataacttatagcctttcacactagacggataaccaagaaaaatgcacttaatagctctaggctccaatttaccattatcaacaggagcataagcagtacaaccaaatactcttaagtctgaataatttactggggaaccagaccatacctcaattggagtcttcttatcaatggcataactgggtgatcattgataagataacaagcagtggaaacagcttccgcccaaaactgtttaggcaaacctgcattagacaacatacaacgggcctttgatataattgtcctgttcatacgctcagctacgccgttttgttgaggtgtgtgaggaatggtgtagtgacgcacaatgccttcagacttgcaatatgatttaaatatcttagaacagaactccatcccattgtcagtacgaaggattttcacctttctttcagtttgtctttcaaccatagttttccactctttaaacacatcaaaagcttgatatttgtgcttcaagaaataagccaaacttttcgcgaataatcatcaacgatagtcattatgtaacgagcacctccaaaggatgtcttacgagcaggcccccataaatcagaatgcacataatcaagaataccttcagtggtatgtgtagatgtgttgaacttcaccctcttatgcttgccaaagatgcaatgctcacaaaatttgagcttcccgatgctttgtcc

SEQ ID NO: 18763 - DNA, 1107 bp, Oryza sativa
gattttgtatctcgacgacaaagtgaaggaccttgggtgtactttttccttatatttgctcgtgaattgggccacatgtgaaccgtccgatcaatctatcgttcatgtgccgcgggggattaggtgggccatcgaagcaaggccttagatgggccatcctaacctgtggcccagcaatcatcatccccttctccctctctctctctctctcaaaaaaaacaaaagaaaagaaaagaaaaacatccctttctccttcctccgatccttgtcccccaccactcttcccggcgagagctccggttaatgcggcggtttgcgtccgccgccgcttttcgcctccgtctacagatgggtaagctgtcgtttcctcctgacatatgcgagagtgcgtgaccaagcctcgccgtcgcccgtaccgccatggcgcatctgttagagcaggttagcaaactagtcagctataaacatattttaaaaagataaaaaaagagagaagagcagcgggcagcacaaacttcaagacgtaacgtgtgtatgacatgtgagaccagatattaatagtatagtaagtaactattgtatgaattggctattgtattggttatagatgatttaaagttagtagtgggctatactattaaacttgctcttattgctactgtgtcttcaatggtggcgctgacggtcggcaaagatccggtcgaatctaccaagcccgatgccacatgtatcgtcttctcaagttcctcacaccacctccgtctctcccacctccgtctctcacattattagtactggtactaagagcagtaagagcggatacaatagcagactataagccaactataaatatattttaaagagataaaaggaagagagaaaagagcagctgcagcacggactccgagacgtaatgtgtgtatgacagtcacggagctcgtggctcctcaccgggagaccgcgcagacccccctttgccagttcggccgggggcttagggtgagatctcaagctctctctgtatgtggaaagatcgcgtgcccggaagaaacgcgagacacagacgatgtatacaggttcgggccgctgggaagcgtaataccctac

SEQ ID NO: 18764 - DNA, 1414 bp, Oryza sativa
ggcctgggggcctgagcgacgatgacgggcgagctccggcagcggcgagctctggtggtcgcgcgctggggcctgggggacgccgacgggccggcgctggtgggaggcggcgacggaggctggcggaggagggacggcggacggcaggcggcgctggcggtcgcgcggcgagggacggcaggccgcgcgcccgccggaggaggagggacggagggacggcaggcggcgctggcggtagcgcggcgagggcggtggcggcttaggtcgctggggggaggaggactggagccgactagtatacctggccaaatgggccgggccaaggcgtgccggcccgagcacggcagcactgtagccggcccaggaacggcacggcacgcccgctcgtgggccgtgccggcacgacccgttcagccgtgccgtgcttggcccgacgtctgagcccatgggccggtacggcaccgcacggttgccatcgggtcggcacgtcaacgccacatcagcaaaaccgccatccaaaaccgctgagggagtcaaattgcactagtttgaatagttcggggagtcatcctatccggttttacggttgagggtcacggattagattcgggtgacttttaagggagtcaaagtggacttttttccttttattaaatttaacattgaacatattttgataatatgtttattttatgttgaaaatgctagtatatttttttataaagttggtcaaacttggataaaaataaaagcaacttataaggacaagttcactgtacttctttgcttgataatactaagttcataaaactacatatacatgggcctccgcgtaatgacgctagcgtacacagaaaaatacaatcatcacatatataagcagcttcagcagtcagcatttcgcaacgtgcatactactagtactaagttactggtagctaaagctctgaaacaggctaatgctttcgtcgtcatcgtcctcttcagcttcagagattgcagtcagatcagatgacagatggtaaggctctactccaaggggttgctcatcatcacagaagaatggcttgggaggaacttggagatcatcgctgccaccttcaagcatctctatcacctcgctcatcgtcggtcgatcagatgacctcatctgaatgcaccgtaatccaacaacgcaaagctccttctccagctcatgcatgtcgacaatgtcagagatctcacatgtttctcgtcgagtcaactgcttgtacacccgggatggatagtatgcctgacttgagtttgctgcattcggatctgcatttcttcttcctccggccatttctagtagcagcatcccaaagctatacacatcagatttgcttgatatggtaccaaagctccgagagatcatctcaggagctatgtaacc

SEQ ID NO: 18765 - DNA, 2393 bp, Oryza sativa
  unsure (1)..(2393): unsure at all n locations
cagcgtgtgaaatacagttcgctccagaaaatagcacggggcatattgggaatgcttgcgccggttatatgctcgttgaagtacctgcagatcacaccattttacaggatgggttaagcgaaggaaacgcgtctttctccatagacactacagaatttatgagggaaacaaaaaaaacagctcacacgagggtcgagagtattcatgccatacgtatttgagagcagactgaccttactgaattgttgaggcattccttggtgctgatatgatgattgaggtggtgtttggatccagggacttaactttagtccctgtttttagacactaatttagagtattaaatatagactacttacaaaactaattatataaatgaaagctaattcacgagacaaattttttaagcctaattaatccacaattagagaatgtttactgtagcatcacataggctaatcatggattagttaggctcaatagattcgtctcgcgaattagtccaagattatggatgagttttattaatagtctacgtttaatatttataattaatattcaaacatccgatgtgatagagacttaaaagttttagtcccatctaaacagggcctgagggaactatgatccattgggaatcgaacacgaaaccccttccctatgaatccaatgatatcagtataacttgcattttgtagctgtgagactgatatatgttgagtatcaaagggaatcatggacaagtatcgacaagaaggttgaagctctccaattgtacagccataaaactcgttgagataaacaaaagaattgttggtaggcaggcaagagacgggcctgtaccatggactagtagtatcttgtattggtctggaacaattcacaaagcatgcccaagcactgtctgaagaagtagccaaatcgagaaagccataagaatcagttgtagtacggtccaacagatcgtcagtactgtaaggagggtgatcggatggaggaagagggcagctgctatcatcatcctgcatggtggcgtcggtgaccaagaaggacagatcggtgtagttgatgctactcacgtagtatgttcttgtgttgatctgaatggtggccttgccagtgttgctgcaggacaggtcataccatggacggggagcagcaacgcaatcgcgcgaatcgccttgaagacggaaagggtaggatatgttgtgaagatcaccacaggaggaaggaggacagtagtggttgttgctttgccctcctccaacatctgctgcaacaagcaaagaagaagagatcactagagctgtctgcaaggtgtaggtaatactactgctactaatggagctcgccatggctgcaggggcctgcaggctgcagcttcaagacctggatgaatgacttatgacttatgaccgcgagtggacgaactgcagcagtagtactagtcaaagttggacggccacaccagtcgtccaggcacagatgagacacgctcctacacgaattattgggatattatatttgcgttaatggctcttcttcgcctccatgggtcagacagacagaaacgaatagtccagtcaagatgagctctgagcttgctcttgttgcaggaccctgcttgctgctgctgtcgtctctgcttctgcagctgcaggccacggcatgggaagacaaggatttctcagctactgcccgccgtcgcggtgcagcgagcatggccccgagatcaggttccctttccaacttgaatccaacaatactacaccatcctcatgtagcgtaccatgcatgaagctagcatgctccggccaagacaccatcttagatagcagatactcgtaccttggaagcccatacaaggtgaccgccatagattacaagcatactaccctcaccatcatccctatcggagacttggattcatgtccgcttctaaattctgtaccacttccttctcagccactccattatcattatcacggtgcaaactggagctcttgcgacatatacaattggggttctgcagccctagtaagctgttctcaagagttgacacaaactgatatcccttccactcatattgctggcccaatctcttgcctgtccaccaactcaactcacttctcctatttggtggcttatgatgtgcctacgtgtcttattccaatccagtgcgaggtcatctcagatggccccattccgataccatattttactctggccatgcctcgctcaccttcaggcaaagtgtcagaaagaatcccctcaatttntgctgacacgacggtctattggagatccttcgcaaacccagccgcttacaattgctcacagtgtgaacaacaaggccgacgctgcgcatacagctcacaaagaaatcaaacatt

SEQ ID NO: 18766 - DNA, 1132 bp, Oryza sativa
gtagggcatgcccgcaccaaatcctgcacgagctgtttcatgttaggaaaatgaaaatcacgccgcagccggtgcagcgtgcgctggacgccttcgtgtccttcctcgtggacagccgccatgagctccggcagcagaggcgaggccgggggaatgtacagccgcccgctgtactggatcatcccgtccacggccgcccacggcagagcttgggagcccgaggtgagctcttcatgcatggcgacgagggccgggtcagtggtttgcgcgtggcggagcctgtcgacgaagtcaaagcgtggggccgagagcgccaagatggtgccatcctccggtgtgtcccggcgcgacagcgcgtccgctacggcattggcatgtcccggcttgtactcgacggtgaagtcgaacccgagaagcttccccacccagtgatgctgaggaatcgtcgcgagcctctgatcgagcaggtacttgaggctgtagtggtcggtcttgacgacgaagcggcgcccccacaagtacggccgccagtgacgtacagcgtgcacgaagccgatcagctcacgctcgtatgctgcgagcgcgcgatggcggggtgccaccggcctactgaagaaggcaacagggtggctgtcctggacgagcaccgctccgaagccatgagacgaagcgtcgcattcgacgatgaagggcttggagaagtccggcatggcgagcaccggggcggtggtgactgctgccttgagcgcgtcgaacgccgttgcggcctcccctgaccaggagaaactatctttcttgaggagggcggtgaggggcgcggcgatggcgccgtagttgtgcacaaacttgcggtagtagcccgccaagccgaggaagctgcggactgcgcgcgccgagcgtggcgccggccaatcccgcacagcctgcaccttggccgggtccatggcgacgcccgcctcagagatgacgtggccgaggtacgcgacgacgcgctggcgaaggcgcacttggcgcgcttgaggaagagctggtgccgctgaagctcgctgaggacggcgcggatgtggcgcagatgatccgcccaggtcttgctgtaaattagtatatcatcaaaaaacacaagaacgaaacg

SEQ ID NO: 18767 - DNA, 1812 bp, Oryza sativa
ctgcaccccttgcacatgactacggcctttcacccacagtcagatgggcagtcagagtccgccaaccgcgtcattgtcatgtacctgcggtgcctcactggtgatcgaccgcggcagtggctccagtggcttccgtgggcggagtacgtcttcaacaccgcctaccaaacgtcactgcgggacacaccgttccgcgtcgtctacggccgcgatcccccatccatccggtcatatgagcccggagacaccagggtggccgccgtcgccaagaccatggaagagcgggataagttcctcgctgacattcgcagccgccttgaacaagcacaggcgacccagaagcgccactatgacaaggcacatcgccatgtcacgtaccaggtgggtgactgggccctactacgcctcaggcagcgcgcggcatcttcactgccacagaccgtcgccggcaagctgaggccccgcttctacggccctaccgcatcaccgagctcatcaacgacgtcgcggttcgcctcgctctgccaccccgagctcgtctgcacgacgttttccacatcggcctcctcaagaagttccatggctccccgccggatgctccaccgcccctgcctgctgttcaccatggtgccgtggtcccggagccggaacgagccgtcaagacgcgcctcgcacgtggtgtgcgccagctgctgatccaatggaagggagagtccccagcttcggcgacgtgggaagacgccgacgctttcatcgccaagtaccccgacttccagctcggggacgagctggctctcgatgaggggggagatgtcatgtggggccgcacgtacgcgagacgccgtcgcgcgcgtgacgtgcgccgcgctacagagcgcgcccagcgcacagctgaggaagccaccgggagtggctaagattagaaagaagggattagtttccttgtttcttccttaattgtaggcatgttcgattcagtctgtggactatttttgagtcttgtattcggcactgtggagaaaaaaaatcaagaatcactcacctaatctcctcttctctctcccaaacctgaacctacggctgaggggtaaaacctcgccggagaagacggattccggctacgaattacgtagccgcggtccagctaccaggggccttgacgcccttgacaacctggtatcacggtcacgccgatcctcatcctcctgctccgccgacccacccaacgccgccgctccattcccagccgccgcgccaccactcagccctccaccatctccaccatcagccacctccgtcaccgcaccaatggtggaaccctccaacgccgacctcgccaagctgatcgagagcctcaccggcacgatcgccgcctgcagaccgacgtcgcgacgttgaagaaggacaaggaaaagtcctcttcctcgtctggcccgggtggcggcactgacgggcaacatcacaacgaccgacccccgaggttcctgtttacacccaaatttagcacctaggcttaaaataggaaatattgccaaaatttggaagtctaccggtttccttcgaggtaggccagtctgactgccgtgtgttgggcggtcagaccgccggttgaaggctggtcagaccggcggtatgtggccggtctgaccggcaggcccgaatccgattctgttgcgtcgggtttcgaggtttccttgctcgggaaggcatgtttcgggtttcctttggtttctaccccgagttggacgtggagaagggcctgtagagggcaagaccaacccctatataagggacaaggccggttcattgtaa

SEQ ID NO: 18768 - DNA, 658 bp, Oryza sativa
cccgtgagccgcgacacgagcgggcagacggcccggcggtacaggaagatggtggtggcgacggtgaggatgtcgaaggccgacatgctggagggcgggacggagaagcccgggaaccgggtggtgcggcgcatcgcggcgccctgcacgacgaacagcgacgccatctgcgtgaacacgaccgaatagaggatggtgcagagccagatggggaggagccgcaggatgctcttcacctcctccacctgcgtcaccgtgcacagcttccaggggtcacgcggttgggtgcacgtgccaagcttcgggttagcgcccaccaccgccgcacggtccaagaacctgcaatacatggcgagttcagtgcgtgcatgcgtgatcagttcacagctcacaaaaccacacaacactttacctgaaaccttccgtgtgcaggagcttcctcccaccggaatccgccttctcgtcgctctcgtagagtgtcacggcgcccggcgactcgccggccttccagttcctgcacgcggcgaacgcgacctggaagatcctgccaaccgggttgccgctggggcggatgtaccggtagcggagcgtgccgccgaggaacagcagcagcgcggtggccgcggcggcggtggagacccagaagccgagcgcccag

SEQ ID NO: 18769 - DNA, 1828 bp, Oryza sativa
tcctcgccgcccgagacggggacttaaacgacgtgagacggcctcgcctccgcctccgcgcccaacaccacggcgcccgcccgcgcggggccgcttcgccaatggcggcgacgcagcgtcaccgacgccattcgcgaccggtgcgcgcgcctcgcccggtggcttgctcctcagccgcccgccggctgcccaaagaagtgaagagaaaagaagagagagagagagagggagaagggaaaggaggggaaagagggggaggcttacgtggccaggctggcatgtggagcccgtgtgggtcccacgctgactcagccgccacgtaggccaaaaccggggtcaaaaccaccgaaggatccattatgaccggttttgattagttaagggactccgaatatctggttttgtgattaggggacgttttttaactcggtgacaagttgagggaccttcggtgtactttttccgcaaatataatgctccaacttgatgactaataacacactagcaccagcagctagttgcttatttatagtagtatttcatacacggaaaaaattttaagcattagtaaatatcaattgttggatcgatgaatatggaataataacaaccattatttatgaacgctaattgctagctagattcatcattgtcatcacagcctagctactggctaattcagatattccatcgtcctcttctgaaattgcagtaagctcggaggagtgaaagtaagaatccatgacttgtggaggtggcatgccattgccaatgccatccccatcgcagaaaaatggtctcggaggcacttgcagcgcatccacacccccttcgagcatctctattgcctcgctcatcgtcaggcgatcgtgtgatttcatctgaatgcaccacagcccaacaaggcatagcttcctctccagctcatgcatgtcagcaacattggatatctcatcaacttgttgatctgctatcagctggtcatacacccatgctgggtagtatgccctgcttgcatttgagtttgcatttggatctgcattccttctacctccagccatctcaagcaacaacattccaaagctataaacatcggatttgtcagatataacgccaaagctccgggataccatctcaggagccatataacctactgttccccgtaaagccctatctgacacaaagctcttctcccttgggtacagttttgcgaggccaaaatcagcaacctttggaacaaagttatcatcaagaaggatgttgtgaggcttgatgtcaaagtgcagaatctgcatctcgcacccctgatgcaggtagttgatccctcttgcaatgcccaaagcgatctcattcagcttgtcccaggagaaacacttctctaatgagaagatgtatttatcaagagagccccgaggcatgtactcatagacgagcgctcttctcatttcttccgagcagaatccgaccagacgcactacattgatatggtggatccgaccgatggtggagacctcactaatgaattcatctccgttgcagttggagttaccggacaacatcttgatggcaacatgtacattgccggggagcagtacgcctttatatacagagccatagcctccttgtcctagcttgtctcgaaaatgggatgtgattgcaatgatgtcagtgtaggcgtacctcattggaccaatcatctgttgcatctggagaaacttctctaccgcatcgattgtgatccttgttttccagtacttgtgggcaaggaagatgaataccaccagcggcgccaacattaacctgaataaaactttgcagaaatgccaag

SEQ ID NO: 18770 - DNA, 530 bp, Oryza sativa
agtagcacgagtagcctccccgtagctagccggcgccgccccgaccgttgtcgccgctcgccatgtgctcgccaccgtcgccgcccgagctcggaagcgcctctcgtcgccggcctcccccgatgcgtttcctcctaatccaacgctagcatcggattcccgtagccgcataggtgctctcgccgccgggaatcggcccctcgtgacctcgtcgccgttttccccttctcccgccgccgtttgccgccgccgcgattcgccgccgtcaagctccctccggtgaatccgagccgttggctcgtctcccctcgtctcgtgcaaccacccggtgtgctcgctttcgcctgtatcgtcgtggttcgctccgccgctcgccgctgtcgtccgccgtccgttccggccggcgtcgtcgtctacctcctgccggcccgcgtggcagccacgtaggcgccacgtcggcgccagctcggccaaggccgggtcaagtcgaccccggtcagcccctccccgtgcgcgcgttccaccgcaag

SEQ ID NO: 18771 - DNA, 698 bp, Oryza sativa
ataaggtgccctacgggtcttccttacacacgtgatcttccaagcagcatagaatgccatttcaacgtcaccaccaggggttaccgtgctcttgtgtacaggttcaattagcataatcaatattttcagcaggctcatttcttatttacatattgttttgaatcttcctgatcgcttacgcttaatgctctgtaaaaaaaaaaaaacttatgtgggtgcagcggagaccacgaccctattgtgccattctcaggcacgcaggcatggataagatcattaaacttttccattgttgatgattggagagcatggcaccttgatggccaggctgcagggttaagtgattttcctatcgtcttgcatccccatctggtcttatctctgaaaacaatcgattgcatcatcatttattagtcactttcatttttaatatgaacgaaattagacataaaattgacactatgtttaacaaaatatgaagatgaaaaaagagaatgggaaaaaaatagtacttcttacaattggtagcttagtttgctaaaatttcttcttgacctgattagaggtgaatgttgttttcttacaccagattcacaatcaagtatgctaacaacctgacctttgcgacaataaaggtttgtctcgttctctaccccttcgttgggtccattcaccatttttgttcatacattaaatgg

SEQ ID NO: 18772 - DNA, 565 bp, Oryza sativa
taccaattctcccacttagaattggcctttgcaacatgtgtttaataacatcggcttgacaagtaactatgcatgtactagataacaaataatgcctcaatttggtacaagcatagtataagcatagacaaagtatctctataaaaacatacctcgtttcagcatccaaaagacggcggctcaaatatgtaatgatatattccttgccatcttcctcttgcgtcaaaacggcaccaatgactttgtcctcggaggcaacatataaccgaaaaggctttccggctttaggcgctcgcacaacgggtggagtagataaatacctcttcaactcttcaaacgtctctttttgttttgccccccaagtaaaatcggcttcttttttcaagcgaagtataggaacaaaagcatcgattttacccgctaggttagaaataaacctcctcaaataattcaccttacctagcaacttttggacctctttcttgcatgtcggcgctttgaaatcatgaattttttctatcttcttaggatcaatctcaactcctctctcatgcaccatgaatcc

SEQ ID NO: 18773 - DNA, 1276 bp, Oryza sativa
tgcagtcaccttgcaggagcctagaactgggtgatacaggatggtgtcctgtccagaacatgataactccatgagaggtgtgccgcacgacggagattgtgatgcaaggcggagtgggaaccggacttttggtccatgtttgctgcactgatttggtggacaactcttgaagttgaagaagctctcggcatcccatgctgtggccgcatagatgagaagagatagtagcagcacaacaacaagaagtttagccatgtttctgtagtgctgttgaagattgaaggcacaaggagaaggccatgaatgtaactataatgaaatttactgggagtttatgctgtgcttgtcatgaactcatgatagcagcgtacttttggagcaatcccaaagtacaatgaaacttctgtggtcccatgttgcagtcctttttagtgtgactgcattcctggcgtcatcagaaaatgaagccgcacttccatgcaacggtgaactgttgttagtgttaaacttaaactgtgaatttgctggcagtggctagaagctattgtaaatgaccctctgcagcacagccctgtgtagtaaagatattgtgaagttcttcatagatagtttactccaatccatatccaattgtaaaagagttctccgaaagccttattctgcacactgatcttcctaattattttgtgacagatgatgggacggaccagcttcagtccaaatgtgcatctcgtcttcactctggaattccagatgaggtactccagttttatttgctctctccaaatttaccagaccacatgaattgaatcccatagttttcactgctttactgatactgatgctctaatggattgaggctggagacatgctctcttttgtcacatccaggctcgattgtttccttccccaagtcagtcaatgccatcactgtcatctgctctcagccatgtaattgttacccacccgtgtccatttgcaattgagatcctctgctgtattatccctatattgaaagtcactgacatgtgggctaagcatatagctagctagcttggacagcaggcccctctctattgtaataggcttgtttgcactgcctgtgaagctagctaccgtagcgatggctggtgcgtttcgtcgttctgctgccctgcaggccatggctgccttctctgtgcttgcacttgttgtaccagatcaggttcaggggagaggcaagtgcccatctttctcctgcggacgtcttaactatgtgcatttcccattccgtcgt

SEQ ID NO: 18774 - DNA, 2495 bp, Oryza sativa
gatgaatttgtccaatggttgctacttcattgatgaattcttctccatttcctgtagtgtgttctatcattttaactgccacgggcactccgtttggtagttctcctttgtagacacttccaaatccaccctgacctaattgttccttgaagcgtcttgctatcttcttaacatcagagaaattgtaccttgtgggtttcgatgtgccgtatgtcctgaggaacatttcaaccttcaaatgtacctcctcgtcataccttgacttcagcgaaatatagagcacagtggctatgatcaatgaaagaacaacaaatgcagctgccgatgatgtagctgaataaacagagaatgggaaatcagcgcattgcaataggatagaaagctatggactagtgatcaactgattgtagttgcctgatgggtaaggcaaggtagtgtcctttttagcaaaatattgagtcagaagcgccagcaataagaactttttattgctgataagttataacagtgcttcttctctcttttgaataatgaatagagggtaggtttgaattatagcagtacctgaaatgactttgacactcgaacctgcaagtaccaaaaaagataataagatttgattgatggtttaactgataatgaacaagtacttcttgaaaaaacaatgagatccagcatagttaattagttacacaacatgtcaacagaacatggccctagtgggataggatagagttttagttttaaaggaacaactgcactatgagtctatggttatatgaatatgtttgcaatagtgaatttttccttacatcttagttagcagtatcatcataagccagttctgcatactagctctgataattttgtcattatgctagaatgccagataaggatgttagagcgagttgaggttgattgcgggttaacttatcaagggttccacatatcaactcttgtatctactgatcattcattgaagcaaccacagatctagctgcagctcctgttgtatcagttaacaaaagcaatactcaggttatatctttctcagtcaagtgctccctcgcagtctcaattatttacactttcgagctactttgtaattctagaggcagccagacgccaccttggttactcctgggtgttttgttttgtcttgcatggtttcatagttcatatgggtccatcaaactatttcatttttccaggagcacattacctcagtgtattagcaaaatcagctccagaatgagccagagtgacatcgatattcaatcattttctcttttttttttccaggattggttgtcaactggctctcctgcagttccaggatgaaccaggacagtatcgaaaatgcagccacaaaatctgacaagtcagtaatgccagaagggaatgtgattcctatggactcagcgactgaagtataatatggtctgacgtgtttacttctatggcctcatgagtcacttgatactgttggtaggtaatcttttctgttttagtttgtgtttattcctcagaaaatattcttaaggattgtatcaagtgcgtatgaactagcatgtgtactggtccgttaccaactctagcaactcgaagttctttaatttttcctttttgttatttgtgacgatgctgagctaaatatgttgatggaggatttttcttctctatgttatccaaattgtgtttcttgggtaaatatcgtgaaaaatcttaacagtatatgagattgttacatataaaaactggctggttatgcttgtttaaaaataaaaagctggctatttattaattggtgcaaaagactcagacagttattatgtgtgcaatcttttgtgtgtaacattatatcaccgtacttctcatgaaacttttggccaatttaatttcatcatttgctttctggtcctttttgtaacaatgctctagtgtcctgtatacctgaaaatatctctgagaagttccagattttattatcaaatatcaaattatcctactgatgcccgtcgaacaaatatagttctatcttcatttcactaagtattgggacatttttattggaattgtatggaaggaataatgacttaatgtgcgagaaagctagctagtaagcttcctagatggttgctaggagcagactactggcctgcaaaaataattttgcagtatatctcatgtaagattaatgatgcgagagcagcactctagtactgtatggctaaatcataatagctactccctccatttcataatatagcaacctaggaccagatgtgacacttcatagtacaatgaatctaaacagtaagcaggttcggatttgttgtactatgaagtgtctcgtccggtactagattgctatattatgggacggagggagtggaaaatagaaaagtagttcaggaaataaaactagggtgataggattggattttgagaagttagcaatggtaccgtgatgctcgcggctcatgcagaatgtt

SEQ ID NO: 18775 - DNA, 1090 bp, Oryza sativa
atatctaattaattatgcgttaatggctaagacgtatactcaattttctgttttccccttcttggtagcgcgtacgtcgtactacttataagtaggagccggccgagcgagcaacaagtagctagcttggtagcctacactagaatggaagcagctgctttgtcgaccgtcctgtgtgtgctcgcacttgtggtagcggatgcagatcatcacgtcgtccatgtccaaggacgacggcatcgtcagtgccaacctttctcctgcggccatctctcaaacataactcatccttttcgccggcgaggcgaccctcgcaggtgcggcgtctcgtcgtacgagctagactgcagcagcgatgatggcaaggccaccattcggatcaacacagggaaatactatgtgagtagcatcgactacactgcttccatcttttgggtcgtcgacgccaacctgcaggatgatgcaaacagcagctgccctcttcctcgctcggaccagctgccttacgttggtctgggtatcccaggatcacacgacagctgggacttgggccttgatgatatgattacttgggtcggctttgtcaattgttcgcaggaactaattacgaacagtagtagcaaataccagcccatgaattgcctgaccacgacttcgtcctacgtttattatatgctcccatcgtttggagcaccatctatccaagacatcgaaccttcttgtggatacttggccatgactcctatcggcggtggcagtaacggtaacagcattaatctgtccgaatatgaagatgttgtaaaatccatgaggggtggatttgccgtcaaatttcctacatatggaggaccttggactacttggtatggtctcatcaaagattgcctcaacgagtctgttaggtgagcgccttaattccttataatctcgaaacctttactttatcatctgaaaagggccgattttgtttagctcttctcctccaatcccgtttaattaactctttccaataaatgatcttgcagcttagctgatagccatgacaatccattacccagagtaggcatcaaagaccggatcattgacatcc

SEQ ID NO: 18776 - DNA, 1711 bp, Oryza sativa
atctcttaaggggataccacatgtacccttccctttttaaactggacttttcttctttacataaatggacggagatttgcacggttgccctccgaacgtccttctgatgggacggcacatacctacctccacttctgccggggcaggcgcgtcgtgggaacgtggctgtgcgctgacgacatgagcagtgtcagaccggtcaccaatcggtcattcttgtccaccgcgtgtcagcttagcaacgtgcatgtttgcccttcttcacacaacatcttgcctgtaatggttaggatgaagcctggcatatatcgatcggggctaacgtgccatctctgggatgtatcacgctagctccagctggggacgagtgcctagaggctctcgtcttgacgggacggggcgaggcgtgcgtcagaccgccagtcgccacctaaccgttgatctgaccggtctgtgactggtcacagaccggataaaagagcgcgctgcattgcgctgcatgcagcgtgacacgcttgaccagaccgcaataaatgcggttaggtgagccctaccgtgttcacccaacctatgtacatagtgcaaaccccacaaggggtcggggcacctcggccctcggggccggggcaggagcaacccgaccccccctcggggaaatcaggaggagggcggacacctcaccctcgggcccgacgtccccgaaggtgccaggccacgtgggcgattccatctgcctcaagcctccgggcgcaatactcccggtcccatatcaccgacagtagcccccggcgttatgtcagggcgatcatccttctcaagggaagcggtcgggcatgacgccactcataaagcctggtgacaggtgggaccggtctccgtgattgggcagaaacccaacggtctcaaaccacgcatatcggtaatggtgtcttggccgtcagtcatgggcggtctcttcaagactgccacatcacttgagcagcgctcgaatctgggcgtgcagattcgtttcgtctggagatatggtaacgtcgcttcggtcggcgatcgtaattaacgcgcacacgatacgatctatctcgactgccacaaccgcatatccacctcatgcgccgcaagcgggcgaatggaattagtggaagcgtgggcgcgagaaacgagggagcgagatagcgagtaacgagggagcgagatagtgggcacgagaaacgaggagccgggctcagcgatgggaagggtataaagccatcgaggaaaggacttgctcccttcctttcgccactattcccctttccttcgccgtttgcgccctaaactctctctttgctgcgcctcaccttcgccacacacgctcgttctcaaccctctctttctcggacaacatggcacggggctccgctctgctcgacggtagcgtactaccgccttcccgcattgtgggcgagaggcaggctgggctgccgcgtcgcttcatgccggaatccgccaccggccgggagatagtgatgctgggcgaggcgcgcccagcaccagattacccggggcggtccatcttcttcctcccttcgcaatggccgggttggttcctcctttttcttctttctttatggatgttctggagttctacgatctccagatggcgcacctcacccccaacgcagtgatgactttggccatcttcgcgcacctgtgcgagatgttcattggggtg

SEQ ID NO: 18777 - DNA, 1036 bp, Oryza sativa
aaggactcctccccctctgctgcgatccagaccgcgcctccattctgaccatcatgatgggggtcggggcctcagaggaggtggctcctaagggccacgacggcgccggcgggagccgccaggaagaatcaaccccaggagggggccgtgcttctgggccccgcgacgggggctcggggagcaaccgccctgccgacgcccgggggaagaggaaacagggaggaacacctcccccatctcctccccgaggggacggggcggtgcgtgccagccgcaggcgcccggagggggccgcgccgacatcacagcccgagacggagcgcaagaagaagcggctccgcaagacgggggagacggaaccatcccggggaaacctgatttcccctccaaggtggtcgttcaaccgaccccctcgcaggttcgtttcacgcctttcacaaccatcttccctttatcccaatcagcaagttttctcttatccaccttgtttgtcttccggttttttcttctgcttcagcgatgtcccgtcgcgttcctcccgccatcccaagtccggccaatccgaggccgaagatccggcggccgcagaggaacggaggcgagaatctgaccggcgagaggccgcagatcgccttcgggaagctgaagaggccgcccgggaggccgctcgggttcggcaggcggaggataccgctcaggaggaggccgcccgggctcgccaagccgaagaagctgctcgggaggaggccgcccgggctcgtcaggctgaagaagccactcgggaggaaaccgcccgggctcgccaggctgaggcgatggcgtcttccgaggcggttcacgacaagaccgccggcgcgtcgctcgggcccactccctcgggtgacgctcaggcgacaacctccggggcggctcgcgacaaggccgcgggcgcatcgcctgggcccgctccctcgggcgacgcccaggaccaaacgggtccgggggacatccccgagctcagtgcgtcttctggcgggccgagccgcgtcgcattttc

SEQ ID NO: 18778 - DNA, 7761 bp, Oryza sativa
ttcttcagaaggaaaaacggcacagacacaacctttaggaaattgaaactgcttttattgaaatgctgaaataagaaaagtaaggctgtgcatgtgtggtagcccccggctaaccctgcacacccgaggggggtgcggggttagcccgagcccgaaacctgacacccgacccccccctcaggggtagaagcgacgaaggtgttcgatgttccacgggtttggcagctcagtgccgtcgcccgtggccagccgtacggagcccggccgggggacaccgatcactcgatacggaccctcccacattggtgagagcttgctcagtccagcacgcgtttggacgcggcgtaggacgaggtcgtcgacgcagagtgatcgggcccggacgtggcgctgatggtagcgccgcaggctctgctggtagcgcgcggctcggagggccgcgcgccgccttcgctcttccaagtagtcgaggtcatctctacgaagctgatcttgatcagcctcacagtacatggtggcccgaggagacctcagggtgagctcggatgggagaaccgcttctgcgccgtagacgaggaagaaaggcgtttccccggtcgctcggcttggtgtggttcggtttgcccagagcaccgctggtaactcctcgatccatgaatcgccgtgcttcttgagaatattgaaggtcttggttttaaggcctttgaggatttctgcattggcgcgctccacttggccattgcttctggggtgggcaggtgaggcgaagcagagcttgatgcccatgtcttcgcagtagtcgccgaagagttcactagtgaattgggtgccattatccgtaataatacggttaggcactccaaaacgggccgtgatgcccttaatgaatttaagagcagagtgcttatcgatcttgacaaccggataagcctcgggccacttagtgaacttgtcgatcgcaacatacagatactcaaacccgcccggggcccgtttgaacggtcccaggatatcaagtccccagacagcaaatggccatgacagtggtatgatctgcagggcctgggccggctgatggatttgcttggcgtggaactgacacgctctgcatcgccggaccagatcgactgcatcattgagagctgtcggccaataaaatccttgacgaaaggccttgccaaccagggtgcgcgaggcggaatgggctccgcactcgccctcatggatgtcagcaagaagctcaacgccttgttcctgaggaatgcacttcaggaggattccgttagccgcgcgccgatagagggtcccttctaccagcacgtagcgtttggaaatgcgttgtacgcgttcactcccttcgcggtcctcaggtagagtcttatctgtgaggtatgtttggatctcagagatccaagcaatcaatctaagggagcttggagcgctcccttcgggtcccgaggccaggactccgacgggcctcgggggccggtcaggcgcatccgtctcccctaaggggtcgggtcgcgccgacggctgggtaagcctttcttcaaaggcgcccggtggggtctgggctcgcgaggacgcgagccgtgagagttcgtcggctatcatgttatcccgtctgggcacatgccgaagctctatcccgtcaaaatggcgctccatacgccgcacttggtgtacataggcgtccatttgcgggtcagagcaccggtactccttacagacctggttaacgaccagctgggaatcgcctaacaccaggagacggcggatccccagtccggctgccaccctgagtccggcaaggagtccctcgtactctgccatattattggtcgctcgaaagtcgaggcggactagatatctaaggacgtctccggtcggggaggtcaaagtgacccccgcaccggcaccctggagggacagagaaccatcgaactgcatcacccagtgggtggtgtgaggcagctgcgaggagttcgtgctggcctcggggattgagacggtctctggagccggggtccactctgccacaaaatcggcgagggtctggctcttgatagcgtggcgtggttcaaagtgcagatcgaactcagaaagctcgattgcccattttaccacccgtcctgtaccctctcgattatacaagatttgaccgaggggataagacgtaaccacagtgaccctatgtgcctgaaaataatggcgcagtttcctcgaggccatcagaatagcgtaaagcatcttctgggcctgagggtatcgggtcttagcgtcccggagggcctcactaacaaagtagacaggccgctgcacccttcggtggggccgatcctctttgctaggggccgtatccccggggcgttcttcattcaagtggcctttcggggcgcacttgtcttctgtgccgatgacctcggggtcggaggatgaaaggggcggccttccctcagtggcctcggggccgtcctgggggtcgggggctcctggcatcgtcggacaagcaggcaaagggccaactccggtcgtcaggggcctctggcctccgttcggctcgggggcctcttctccctgctctttcccgggtcgagtcagcacagggttagcctcggggtcaaagggcgttaagtgcggccttcccgcagtggccttggggccctcctgagggtcgggggcacctagcaccgtctgacaagcgggcagagggccgactccggtcgtcaggggccgtaggccaccgtccgactcgggggcctctcctccccgctcgctcccgggccaagttagcacagaatgggggtgcacgaaatgaggattgttttcatcgcgctccacaaccaacgctgcactaactacttggggggtcgccgctaagtaaagtagcaggggctcatttggctccggggcgactagaaccgggggagagctgagatatgcctttaactgagtgagggcatgttcagcttcctccgtccaagtaaacggccccgagcgcttgaggagcttaaacaagggtagcgccttctctcccagccttgatatgaaacgacttagggcggccatgcaaccggtgacgcattgcacatccctaagtttgctgggggggcgcatccgctcgatagctcgaatcttctcggggttggcctcaatgcctcgggcagagaccaagaacccgagaagcttgcccgcaggtacaccaaacacacacttatcggggttcagctttatgcgggcggagcggaggttctcaaaagtttccgctagatctgaaagtaaagtttcttggttgcgcgtttttacaaccaagtcatcgacataagcctcaacattacgtcctatttggctacccaaagaaattcgagtagtacgttgaaaagtaggacctgcattctttaacccgaagggcattgatgtataacaataggttcctacgggggtaatgaacgcagttttttcctcatcctccctagccatgcgaatctgatggtaaccagagtatgcatctagaaaacacaaaaggtcgcaccccgcagtggagtcgacgatctgatctatgcgaggcagggggtaaggatccttaggacatgccttgttaaggtcggtgtagtcgatgcacatccgaagcttgccgttcgccttgggaacgaccaccgggttcgccagccactccggatggatgacttcacggatgaatccggcctccagaagtctcgccacctcctcgcggatgaaggcttgacgttccggggcctgccgccgcactttctgccggaccggccttgcgcccggccgcacggcgagacggtgctcaatcacctccctggggaccccgggcatgtccgctggtctccatgcgaagacgtcagtgtttgcccgcaggaaggagacgagcgcgtcttcctatttgccatccagaagaccaccgatccgtgtggtcttggatgggccgtcgcccaaggcaacctccttgaccgggacctcgtcgcatgtggcaatccgctgcctcggggcggtgggggcggaggtgccaagcctctcgtcaccaccctcgggcttggtcgcagcagcgaggtggtccgcgcgctgctccatgcaagcgagcgcgactttaaggtcgccacggatagagatggggccaccggggcccggcatcttcatctggaggtaggcgtagtggaccgccgccataaacttcaccaacgcgggcctccccaggaccgcgttgtagggcagactgaggtccgccacatcgaagttcacccgctccgtgcggaagttggctgatccaccaaaggtgaccggtaggtcgatgtgacctaacggccatgtgtgccccggcgtcacaccgatgatcggttgagacggctggagcaccatccccggggccttgatagcatcaaaggccgcgggggaaaggatgttgagagccgctcctccatctatgaggacacgccccaacttcacattgcagatggtgggggaaaccaccatcgcaatctgccctccccgggcaacgcacggtgggtggtcggtctggtcaaaggtgagggccacctccgaccaccgcgcccgacgtgtcgcctcatgagtaggggccgcggcgagaagctctcgcctcatggccttgaaactccggtgagaaacgtgagcacacgctcccccatcgacagtggcaatggtggccccaggttcttggaaacctaggtcatcatcaccgtcatcgatgtcaacggcgggggccttctgtttggcctcacttcgccgtttaccggagggaactgccgcggacttgccctcacggcgttcctgcctcctgtcctcctcccacttcctcgttcgctcagccaagtttttgactgcgcgacaatccgcgagatcgtggagggaggtgttgtggacggagcaccacttgctggctgggcgctccctgctgggagtaccagcctctttctttttgtcgctcgcaggcctcccctttcgggtggcccgcggaacgccctcgacggcgaggacgtgaccctcgtcgccggaatggaccgaccttttcttcctcctcctgtcacgccgccctgtctgagcggcggatccgggggcggccgaagctgccacaccggaaccggaggggttccaggtccaggcctcctccttacgagccactcggtccgcgagctgaaaaagctctgcggtagtctggggctctttggaggcaatcttttcgagcatgcggttgtgccgcacaccccccctgaacgcgtagatcaccgcgtgtgcagggatgcaaggtatagtattgcggacttggcagaaacgctgaatgtacgagcgaagtgattcatcatcccctcgctgtactgcgtgcaagtccgcttcttcacctgggcgtggataagtgccttgaaagttcatggtgaactgctggcacaaatcctcccaggagtggaccgacgcgggcggcaggttcattagccaaccccgcgcctgtcccttcagggccatgggaaagaaattcgccatgactctgtcgtcacccccagcggcctcaatcccggtcgtatagacctggagaaactcggtggggttgacactcccgtcatacttctcggtgatggtgggccggaaccttgggggccaacggacattccgaagactcgccacaaaggctctacagccgacaccaccagccgggggcatggagggctggtcctcacgtccctgtcgaggtgacactctggacgaagaggcgccctccgttgcgcggggagtacgccggctattacgccgacgctcgatgtcgaggcgggcatccggctctccatgccgatcctcccgagtcggaggtgccgacgagggagtggcagccgaatggcgtgcaacagccgccgctcgccgcgccctccgtctcgacgacgcggaaccggtagtggcggcgccggaggtcttggtggtggcggaccgtccaccagcacccaggcgctgctgtgccgtcatgaccaagttggccacgtcgtccagccatcgctgggctggagactccgggtcagggacgacaggcgggtgacgtaggagcgcgccaacagcctgaagcgcgccctgaggcgtgctgccgtcaccgtagacgaggaggcgacgctccccatctcgccgttctcctgcaccacccgcgactggcgatgctgcggatttttcgactctctcgagtgcctccccctgcttaggattttggtgtggaggaggtgggggagtacgagctcgacggcgtgggtttggctccccgtcgtcgccgctcacactcggagagaggtcgtgcacctttgcttgctcggccattaggctgaacaagaaaaacttggcgcacacggaagagtatgagagctcagaaaacacacgctgagccccctacctggcgcgccagatgacggagctcgtggctcctcaccgggagaccgcgcaggcccccctttgccagttcggccgggggcttagggtgagatctcaagctctctctgtatgtggaaagatcgcgtgcccggaagaaacgcgagacacagacgatgtatacaggttcgggccgctgggaagcgtaataccctactcctgtgtttttggtggatctgtgtaagagcaagttacaaaatatcaaccagccctctcctctcccgggaaaatcaaaatccccccttctcttcgtgggcatggtccttttatctcttaaggggataccacatgtacccttccctttttaaactggacttttcttctttacataaatgtcacgtcctgataaattcatcccaaaataaaaatcatcttctaaaaggaataatagaattaattaaaattcgaaaagaaattggcaaacattaaaatacgtacaagaaaaattcaaatgtgacccggagaatttttgttaaattctccttggtctaaaaggagccctcaaattttagtggaattttcagagcacaaataataattgagaagaaataaacaaagttgaaaaggtttataaaaaagaaaaaccctaaaagtcttctccccccccttcctctcttgggccggctcggcccaactctccctccctctctctcctctccccgcggcccatcagctcccccgcgcgcgcgcgccgctgacaggcgggcccgcccgccactctcgctgacgggtgggacccacttgtcatcgccttcctcccgccgcgccgccgccagcccgtgccctagcgccgccgccgccgcgaatctcgccgtttcccgccgtccccgcgcgcattaaagagggggaaaatcacccccgtgattccctctcccgtttcccccccttttccctctctctctccctcggattcgtccggattcaccccgcgaagttcgccggcgtcttcaatggcgcccgagatctccgcgcgcggtttcctctctccccggccgcgctctccccctcccgttgctatatatttgctccccgtgcttcgctcttccgtttccgccgctcgccgctcgctctcgccgtcggattcgtgctcgcgccgtgctcctctctctccgccgtcgccgtcgaccttcggctcgccgccgacgtcgctccggtctccctcccgactcggcgacacctccatccgcttcgccgtgttgccgccgaccccgtccgccgctccgcttcgtccgccgactgccggagcaccgtcgccctcggcatcccgaaccgcgccgtcgccttcctccgctctggttcgccgccgtcgtcgctccggtc

SEQ ID NO: 18779 - DNA, 703 bp, Oryza sativa
acacaaatcttcgatggttctagttacgttttattttcattgagtgagtaacaaacttgccatgcatctaaccaagtttctgtgcgtttttcaaaagtgtattttgaactcggtagctacaagcgatgggatcaacggtgcaatatgtgcacaaggccgtgaatacgcggccgatgacacgggctttgcctttgtcaattgtcgcatcaccggcagtgggctgattttattgggccgtgcatggaggccctactcccgcgtggtcttcgcgcacacggacatgcccggtatcattgtgccgagggttggagcgactgggacgacccgcaacgagatgcgtacgtattctttctactactacttccgtttcattttatattagctgtatgtttctaaacatgtatactacggttttatttgttttaacagcacgatgttctacggtgaatacatgtgtacgggtgtgggcgccaacatgaccggtagagtaccatatgccaaaccgctgacggagcagcaggcgcagatatacctggacgcttcctacgtggacgcggatggtggttaaaaccgttcaacgattctcttatagttaattgagtacaataccatgtaaataatggcgggggtgcaattctttgtacttaacacggttgtttagtactactaagggaccacctatatattcgtcgataaattttct

SEQ ID NO: 18780 - DNA, 690 bp, Oryza sativa
ctagaaacccactccgcataacgacatggcctaataaaccccgcctttaataaccgatcaatctcctctttgactcggtcatataataaaggattaaaacgacgaagtggttgcttataaggcctaaaacccggtttaactggaagccgatgctcaacaagctcacggctaagacccggcatctcatggtactcccatgcaaagcaatcaacatactctttaagtagctcgattaccttaaccttataatcggctttcatgtttttctgtacaaaagtcggccttggtttagttccatcacctatatctacttcttccaatggatcggccgatgtaaacccttgtccaagcttctcaacttcatcaaaatcttcaacagtttcaccaatatcgttctttgtagaccgatattcttgcaccctcttttgtaaccactctaaactagcctctttactcattatacaaatttatatggcttagccgtgctacactagccggctttacagagataggtacaaatttgccatcggagatactaataaaatcataactagaaagatccctccccgataagcattggatattcccatgacgccactcaaacgtagcatcggccattgcaacttcggccgatgtatccgcttgaacaatttcaacatcatcgccgtcccattgaattaaacattgatg

SEQ ID NO: 18781 - DNA, 704 bp, Oryza sativa
ttctcccatagccactttagattgatctttatctaagcacttcaacaagacaccatctatgtttcggcgatacaaatctccttccacaaattccttcatgtatttctcccatagccactttagattgatctttatctaagtactcaacaagacaccatctatgtttcgacgatacaaatctccatcaagcaatgtatatttgaatgcttgccgccgaatttttcgatcaaccttaaatgtgggatctttcaaatattgaatcaaaggaattctcgaatcctcttctgtatcctggacacaaacgtccgaattcacaattaattcggcttcaaaattacttgaaacgtgccccccagcattctgcctagaaccggtcagaccggccacacagggccggtcagaccgctcagggatgccggtcagaccggcggcatgtggccggtcagaccgcccctggtcacggtcagaccggccgtgcaacgtcggtcagaccgcctctggtccccaactttgccaattttgcgcaaaaatttaaaatcaagcaccggctcttctaatatcagaaataaccccctttttacattataaccagatgtttgttgtgccaagtcatttgctctaaaattatcacacctagcaatatgtctaatagcaaaattatcaaaattggcaataatatctaaacatgaatcgaggtacctatt

SEQ ID NO: 18782 - DNA, 2240 bp, Oryza sativa
tggtgttagaaatggtgagtgggaggaggaacacagaaccaaccgttgagaaccaaaatgagttctactttcctgagtggatatatgagagagttatgaatgggcaggacctggtgcttaccatggagacaacacaaggcgagaaagaaatggtgagacagctagctattgtagcgttatggtgcattcagtggaacccaaaaaaccggccctcaatgacaaaggtggtaaacatgttgacggggaggttgcagaatctgcaggtgccccctaagccctttacatcgtctcaaaatcaacttgtgatttagatcatgagaccgcatcgccatggtttggactttggagaccagcaaagcaatggagcttggccagcatttcctataaaaaggcatcaccatggtttggtgcctgagtgagagatatgcttaatccacatatcagaaaatagttcttagtgagctgaagcatgcacatatagtgtttgattattaaactaaactgggcaaccagatatatgatatatcaccatgtactcttgtaatttgcaacatatctcaatggatttaatttgcaatataataatagttggaagatgacaactaaattaccttattccatcgttgatgctagtccactaatcatccttgctgaacaccaacaataaggtcatatttactcccagtgctgcattttcttttcaagataaaaaaagaagtgctgcatcatccagaagaggaaaaaaaataaaaataacaaaggaaggaagctaagcaaagggattattaccaaggcagcgaggctctggatggacatggactaataatgtgggagacggaggtggtgtgagcgacttgagaagacgaaacatgtggcatcaggcttggtggattcgaccggatctttgccggccgtcagcgccaccattgaagacacggtagcaacaacagatggcgccatggcggtacgggcgacggcgaggcttggtcacgcactctcgcatatgccgggaggaaacggcagcttacccatctgtctacggaggcgagaagcggcggcggaggcggctcgcggaacggcataccgccgcattaaccggagctctcgccgggaatagtggtgagggacggaggaagaagaaggggatttttttttttttgttggagagagggagaaggggatgattgctcggccacaggccggttaggatggcccacctaatcccccgcggcccatgaacggtggattgatctgacggttcacatgtagcccaattcacgagcaaatataatgcggaataagttcaccagaggtccctcaacttaacagcgtgatttttttgaggtcccttaaccacaaaaccagaaatgtctacccctaaacttactcaaaccgttcaccagaggtccctcggcggtatttttgcccggttttgctgacgtggcatcctagtcagcaaaaaaatttaaaaaaagtacgtagagcccacatgtcagctgcacatctttttttcttctcttttcttctccttctcttctcttttcttctctcccctctcttctccttcaggctggcggcggacgcagctgcgatggccgtgctcggccgccaccaccgccgtacccccgcgggtggccgacgatgctaggagaggcaccaccggcgggagaaggggaagaggcagaggaagagattgtttcttggtcgccggccgcctccccctccctcccaaactcgctggccgccgcgctcgctcgccgctgctctgccgcgcgctcgcgctccgctactctgtccgcggcctgctcgcgctccactgctcgacccgccgctgcgctcgcaccttccgctgctccgttgccacgctcgccctcgttgcgccgcccgcatccgtgctcgccgctccgccgccgcgctccgctgcctccgctcagccgccggacgaccgcaccgcgtagcctcgcccatggcgacgacgacggtagagagccgatgacgacggcggccacggcgcgcggctcctccgtccgcagcctgaaggagaagagaagagagagaaaagaaaagaaaagagaagaggaaagagaagaagaaaaagatgtgcggctgacatgtgggccccacgtgttttttaaaattttttttgctgactatgatgccacgtcagcaaaaccgggcaaaaatattgccaagggacctccggtgaacggtttgagtgagtttaggggtacacatttctg

SEQ ID NO: 18783 - DNA, 7462 bp, Oryza sativa
ttatttatgaacgctaattgctagctagatacatcattttcatcacagcctaactactggctaattcagctattccatcgtcctcttctgaaattgcagaaagatcggaggagtgaaagtaagaatccatgacttgtggaggtggcatgccatccccatcgcagaaaaatggtctcagaggcacttgcagcgcatccacacccccttcgagcatctctattgcctcactcatcgtcggccgatcgtgtgatttcatctgaatgcaccacagcccaacaaggcacaacttcctctctagctcatgcatgttggcaaagttggatatctcatcaacttgttgatctgctattagcttatcataaacccatgatgggtagtatgccttacttgcactggaatctgcatttggatctgcattccttcgtcctccgaccatctcaagcagcaacattccaaaactgtaaacatcagacttgccagatatgatgccaaagctccgggaaaccatctcaggagccatataacccactgttcctcgtaaagccctatctgacacaaagctcttgtcccttgggtacagtttagcgaggccgaaatcagcaacttttggaacaaagttatcatcaagaaggatgttgtgtggcttgatgtcaaagtgtagaatctgcatatcacacccttggtgcaggtagttgatccccctagcaatgcctagagcaatctcattgagcttgtcccatgagaatcttctctcagatgagaagatgtgtttgtctagagatcccctaggcatgtactcgtaaaccaaggcccttctcatttcctcggagcagaaccccaccaaacgcacaacattaacatggtgaatcctaccaatggtggcaacttcactgatgaattcttcgccgttgcaattagagtagccattcagtatcttgatagccacatggagatcacccgggagcagcacacccttgtatacagaaccgtagcctccttggcccaacttttctctgaaatgccctgtgattgcgataatgtcggtgtaggcataccttgtcggaccgagcatttgttgcattcggagaaatttctcgactgcatcaattgttatcattcttttcaagtacttttgtgcaaggaaaatcaatacaaccaagggtgccaacagatacctgcatggtgctgcgtacacaagttcgatcggttggaatcaagaaattgtaacatgcgtatataactagatgaaacactagaaacaattgagatgatgtgggtttataagaaaagatagaaataacattaactattaatgggataaattatatagggtagggacgtagggtcctggtcgatgacttacgtacgtgcaagcatcgtccagaacatcaaggcatacaatattatgcccaagagtatattgtatggcgatggaattttagcagttgcgcaatccatgaaattttcagtcaccgaaagactaaaccaatctgaaagtttgcctataccagtcgatttgctgcatgcaagaacaaagacggatagattcaggcatatataaatggaggggaggtcggaggaatgtgcaatcagatattatgtcaagatcaggaactcacggaatcgactccattaggcaatccttgaagcttcgatttctatggtgtctgaaaggaaattggacgcggaatcctttcctcatgaattttactacgtcttcataacttaagctatcaactgctggtgctacacgacccataccatccaaaggagtcatggctaggtaaccacaggaaggctcgaggttttcaatgtaacaggacaatctgccagtcaagacataaacgaaggagctgctggtgcccatgcaagcaacaggactgtacataacattgttgtttatttccttggaacagttgacaaagaaagaccaccaacgtgaagcagggtccaattcgacttggatgttgtatggcgatgattcttcgtcgtcactactaacatcatcatagtaataaggaatgcgtttccagcgaggaagagggcaattgttacgtgaatccgagatgttggcgtcgacaacccagaaggtggaatcactgtagtcgatgcctgtcacaaagtatgttccgttgtcgatctgaattgtagccttgtcatcggtgcaagtcagctcatacgatgcaacaccgcactcgtagcctcgccggtggaaaggagacgcgactttgctaagatggccgcaggtgaacggagggcatgcaggtattccatgaattaaaggccattctatatccggatctgggacgacaaatcgaagcacacacaggacagagaaaacttgcagggcagtcgagcgacggaagaacggaccaggaatcaccatggtgtggtgtagcagctagcttagctagttcgcccaagcagagcatgcaggagctaggtagtgacacggatgatattacaagtgtctatctccgcgcggtgcgtgcactgtatgtaagcagtgtaactagagttttccaagcaaataaatttagctaaaaagcaacacttcatgtccttgactgtgatgctgttgacttggaagtctttgatgacacgaagcagattagtctaaggcgtagcattcagttccacaagagtctaccgtgctgcatcggtcaccgtttattgatgttgccgaaaaagattggtcaaagtgcacacattaccagtcgcccgctatcacgagccttatcattaggggaacagtgcttcacgggttaatttcaaaagcccccaaagctaacatagtgtattcttctaaaactatcttaacaggacgcgactacaccgagagtgctagctatatggtgctaaagagagacacctttctttccaaaaaaaaaaagctacttatacactcaatatctatgtatttttttccttcttagagaagtttctcttaaattacttatctgatttataatccgattacgccgttgtgtttattgcaattaaatctttacaacaagatctcacatgattatattttgatgaaaaatcacaaattacttttatgatatgtctaaattacgtttacatttcactaagttacttcttaaactataaaagtaaattcagtaagtctaaaagtaatttatatatattatagaagtaacttagaacaaacgaagataactttggcatgttatttgaagtaaatccgttgtatagataaaaacatgactctatctaaaaattaaattaatcagcacaaattatggaatttactaaaaagtcatattttatccctacaacgaatttacttctaatgtcgtgacaaagttacttacattttgttttaagttacttttaaaatatatgtaaattacttttagactttattgaatttacttttatgtctaagaagtaatttagtccaatcttgtcacgtcctgataaattcatcccgaaataaaaatcatcttctaaaaggaataatagaattaattaaaattcgaaaagaaattggcaaaccttaaaatacgtacaagaaaaattcaaatgtgacccggagaatttttgttaaattctccttggtctaaaaggagccctcaaattttagtggaattttcagagcacaaataataattgagaagaaataaacaaagttgaaaaggtttataaaaagaaaaaccctaaaagaagtcttctttccccccctttcccttcttgggccggctcggcccacttctctccctccctctttctcctctcccccgcggcccatcggcctcccccgcgcgagcgccgctgacaggcgggcccgcccgccaccctcgctgacgggtgggacccacctgtcatcgcctacctcccgccgcgccgccgccgcgcccgtgccctagcgccgccgccgccgcggattccgccgcatcccgccttccccgcgcgccttaatgaggggggaatcattccccgcgattccctctcccgtttcccccgcttttccctctctctctccctcggattcgttcgaatcgcgcccgcaatcctcgccgacgtcatcaatggagcccgagaactccgcggccggtttcctttctctccggccgccttctctcccttccgacgctataaaatcgtccctcgtgcttcgctcttccgtttccgccactcgccgctcgctctcgccgtcggtttcgtgcccgcgccgtgctcctctctctccgccgtcgccgccgagctccgtttcgccgccgtcgtcgctccggtcctcctcccgactcggcgccacctccatcggcttcgccgagtgattgccgaccccgtccgccgctccgcttcgcccgccgaccgccggagcaccgtcgtcatcgtcatcccgaaccgcgccgccgctttcctccgctccggccgccgttctcgtcgtcgtcgttgtcccggggtgagccgaagaccgccgttcgctttcccccttctctccgctctctcgggcgccgctccgccgcgccgatggtcgccggcggtgaccatcggggcgcgggcgcgtccccctcccgtcggccgtgccggcgaggccgccttcgggcgcgccctcgcggctgccaagtgggcccggccgtcagccgcccgcgcccgcgggtgcggctgacgcgtgggacccacggcgccgaccgccgccagccgcgtgcgcccggtccaccgtggaccgtgcggctgacgcgtgggcccccactcccgtggacccggtccgcgcgccctccctcggctgacgcaataaatgagtttttaattaaaatttaaatgaagaaattcgcaaatatccatttaaagagcatataaacttcaaatggccatatcttggccatttgaactcggaattggaccgttcaagtctctaatttttccttaagaagtaaagaacccatttttgtgctttgtttctgctgttatgtggagtttagtagagtaaaagccttttcttttccgtcggtcgtgtagacgctgcagcttcggaagatccgctcttcgtggaagttgaagccgtcgtttgggaaagcgagcaaggcaagtcacatcacccttgagcatattgaatcccagtttataaaattattttgatttaaattattgcattatcgctttgtttaaattcccgcgttaccactgttttatttagccatgcctatttacctttgttatgacattattattgctattgttattattaccttgttcaccctaggaaaataaaaaccccaactagtgggtactctattcatggttccactagtataaatttaggtagatgcttcgctgaataattaggcaaccttaggtggttttataactttagactttgggaattctcatatcatttggacactatggaattgttggcttatgttggaattggacacacacctctcttcctctttcaaaacccctaaaacctgttttcggtggggtttgggtgcatgccagttgtgggaagtagcaccccggccactataaggattaagctcgggcctctgttgcaaagcactaccgtactaaccacatgtctaatgggtaaggcttaactcggtgctcagtctagtcctgaacaaaaggacacggatagagatggatgaagtcgttgcgacgatggatatctctgaggcaaatgaaggctacgcgagctgcggctcggtaatcgagatgtctaggcaaatgaagactacacgggtcggtgcccgttagtcgagatgccatggcactggactagtacgcgggtggtctcacccctatgtgtgtggcgcacccggtctagatcttgttgctaggggctcaaccctggcctgcctgtcccgggataccggccgtaggcagggttgggtcggtacttttgttcacggctaggatgggtgaagggttatgtcacatctttacgacgggttccaaggccatggaatgcggagtaaagatgtgtcttgtgggtaaagatgtacacctctgatcagagtaaatctattcgaatagccgagccctcggatatgggcaagcctagcaatgtacccaagtcagtgttttaattcttaaaatttgctcaacaactaaaatatggaatggttggcctgggttggcttgggacgagctggaacccaggtcgggttgccagttcggtccaaactatcgtaggccttgggttaaggcaggttcgtgagggttcacggccttgtttaataatactgtgtagctctaggatcgtctttacaaaatggctttgggcaactaagtgacttttaaatgctgtttactgcaaaacctaacccctattattatccccttgtaccccccccttgcattaatcatgcatctgccggtgtggcttgctgagtactgtggttgtactcattcttgctcaatccttcccctcttcagtaagagaagctttggagaagatgtcttaggtggagtcctggcttataccccagttgagcgcctgtgaagatggagccgtaggcccgctagtccgctgctgtttatttttgattgtcaggccttaagtgcctttgtaataatgtaaatattatcgatataataaagatgtgtcttttatatcatgtttgtgtggtgtaccccggcttttcctgggacggggattaatacactagcgttcgggaaaaggcaattttcccggtcgcgacaaatctaaaagtaacttatatatatatatgataaaagtaacttatgtatataataaaagtaatttacaaatataatttttttttcatcgtaagtgaagatttaattgtaacgaacataatagcgtaatcggattgtagatcagataagtaatttgagaggaaactttatttgaacaagaaaaaggcacccacgtgaactttatttgaaaggaaaaagacatccccgtggatggacatcatgacgacgtgcacagttagacggctctcagatgcgtcgtgctatagagctaaaccgagaacgctctcgaaatagatttcgcgatcttaatagtatacttcctccgtttcataatataagccattttaacattgtccatattcatatagatattaataaatctaaatatatatatgaatgtaaacaatgctagaaagttttacattattaaatggaaggaataataaatgatgtatactgcttatgcacgttcctataaaaaggcatcgccatgcatggtttggtgcctgagcgagagaaatggttaatccacatatagtaaattagttgtcagtgagctgaagcatgcacatatagtgtttgattattaaactaaactgggcaactgggtttgtgatatatcaacatgtactcatgtaattctggtagctagcaacatatctcaaattctcaatgtatttaatttgcaatataataatagctggaagatgacaactaaattaccttattccatcgttgctgctactccactaatcatccttgctga

SEQ ID NO: 18784 - DNA, 1418 bp, Oryza sativa
aaccattacaggcaagatgttgtgtgaagaagggcaaacatgcacgttgctaagctgacacgcggtggacaagaatgaccgattggtgaccggtctgacactgctcatgtcgtcagcgcacagccacgttcccacgacgcgcctgcccccggcagaagtggaggtaggtatgtgccgtcccatcagaaggacgttcggagggcaaccgtgcaaatctccgtccatttattgtcgcgaccgggaaaattgccttttcccgaacgctagtgtattaatccccgtcccaggaaaagccggggtacaccacacaaacatgatataaaagacacatctttattatatcgataatatttacattattacaaaggcacttaaggcctgacaatcaaaaataaacagcagcggactagcgggcctacggctccatcttcacaggcgctcaactggggtataagccaggactccacctaagacatcttctccaaagcttctcttactgaagaggggaaggattgagcaagaatgagtacaaccacagtactcagcaagccacaccggcagatgcatgattaatgcaagggggggtacaagggaataataataggggttaggttttgcagtaaacagcatttaaaagtcacttagttgcccaaagccattttgtaaagacgatcctagagctacacagtattattaaacaaggccgtgaaccctcacgagcctgccttaacccaaggcctacgatgatttggaccgaactggcaacccgacctgggtcccagctcgtcccaagccaacccaggccaaccattccatattttagttgttgagcaaattttaagaattaaaacactgacttgggtacattgctaggcttgcccatatccgagggctcggctattcgaatagatttactctgatcagaggtgtacatctttacccacaagacacatctttactccgcattccatggccttggaacccgtcgtaaagatgtgacatagtttccaacccatcctagccttagacaagagtaccgacccaatcctgcctacggccgggatacccgggacaggcaggcagaactgagcccctagcattgggcaccaaccctccgccgtatgacatctcgactaccgggccgcagctcgtgtagccttcatttgccctggagaatgtccatcgacgcccgacttcatccatctccaatccgtgtacttttgtttatgactagactgagccacaaactaagccttacccattagacatgtggaagtacggtagtgctttgcaatagaggcccgagctttagtccttatagtggccggggtgctacttcccacatctggcatgcacccaaaccccaccgaaaacaggttttaggggttttgaaagaggaagagaggtgtgtgtccaat

SEQ ID NO: 18785 - DNA, 700 bp, Oryza sativa
tagagaagctgaacttttttgttagtaacacattgcacatgcaggaagaagctgttatgaaaatagatgcacaacggagacataaattttacgtggaaaacccttgcgggaaaaaaccacggacgccgaccggcaatgatcactatagaggagatgattacaaacgtaggggaatcacaatggaaacgtcactccttcccgtacggcttacaagagtatatataagggataatagaaagacacctaataggactcatactaggaaactaatccgaatatattgtgggcccaaaattcggatcacatatttaacaatctccaccttgagacgaatttcctcttgttgcataaaaacatcaatcaccaaaaaatacctcatgtaggtaaaatcaccgcgcgccaaatagtctctaggactatactgtaacacccaccaagcttgagcaaagctcaaacttagtagcaggaactggctttgtcatcatatcagctgggttatcatgagtacttatcttgcatactttgacatcaccttcagcaatcacacatcgaataaagtgatatctcacatcaatgtgctttgttctctcatggaacaaaatctattaatgcaagacgtaactccacaaagctcagtgtacaaacctctaagccaaatagcttctttacaagcttcagaaatagccattactctgcttca

SEQ ID NO: 18786 - DNA, 1939 bp, Oryza sativa
aaagatcaatcccaccactccaactgatgctacctgccaagatatagccgtccacagcagtgtcattacatatgacagcttcccagactggaatgcatgcatctctccttgtaaagtcatccattcaccacttgcaaataacccaacaagagaagccaatgttgccacgagagctgtatatatctgcatgttcaacacaactgagaaggtctccctcttaataaccttctcaaatgtgacttgcatcagggagagaatgagcgagtatgtagctgatgcccctagtgtcaacaggaaacccaaaatgtacttcccatgtgatatactagtagttccctgagaatcttcatcaactccaaggagtgaagcagaaaacgtaaggaggactacggaattgaaaatcagaggggtgaatttttgagcattgaggaaatatgagaagacagcattgaaggcaagctgactagcacagatgagcgaatatgttgagaccggaagatatagtaggccataggaatacatcaagtcgtctgcagcaatgatgaggcccaggacaacatatatcagagtaattttggggatagaaattgtaggggcaggactactagtgactgtttgtgtagaagatgtctttgaatggaaaagaaatagggcaatgaacaaaatcggaaagccagcagtttggacgaatgtggacatccacttgctattgccgccttgattgtagtagaacctcccaagaagtgtagatgcggtctgaccggcaatgaggaagaacatgttaactcccaccatcagccaccattgccaactcttgacaggagagttctgtataggtacttcatgagttgacgaagttgcagctttggatgaatctgcaagttacagaaggtaggcagtatcaacaggttagcccaaacttcatgtgttaagcatagcacggccaactgaaactttcttttcctattcaaaatagactaccaaagttcccatagtgaagtgaaaccctcctctcctttttttccccccaacaattggccatataaaccccaaaagctctaaatttattgagagaaagtcgagcaacacaagactatagctccatccttacagtattgtccattggtgaaactatcaaatgaaagcgagttacttggaatctcagggaaatcctgcactaatataaaaaaactaatataaagattttacttttgttaaatgcagtgcattactatagctggtgctatcatcaaccacttatccagctcatgtacgcgaacaacaggggtttgccaattaaactcacatgcctactctgccactcgatgatgtcacgatagtctgaaaagttaatatggtctataaacaaaaaacaaatcccatatgggcatatggccatatccaacacgccacgcacgagaaggcaattcatcgaacacctcgcgggcttacttccccacaccatcgaacaccaaataagcccgagagaacgaacgagttcatttcatctgcgtttaccgccgcccatcgcaagacgactctaacctcctcacccccactccctcaacgaagaaaatcggacatagctaaacagtgaggctttcgacagaggaagggggggaaagatttgattgacctgcgatctgtatctggacctcctcatcccggttgctaccgccgtcgctgttgccgctgtcaccggccatgcccgtcgttgggggcgctgctccgcgcgagcgcgagcgcgatccgaggcaagcggagcggtggagagagagggagttgataggaggagaagatgagaagaggtgtggcgccgcacgggggaagacaagtggggaaataaaaagagtaggaaagggtggggcgctgcagtcgtgtgaaaattgaaaactgcctcctccttctttcgcttcgcgagccgccaaccgatccttgg

SEQ ID NO: 18787 - DNA, 1132 bp, Oryza sativa
ggaccagcgaacctccatgccgtggcgcgagaacgacatggtgcgcgccgtgaagtcccatgttatcggccccagggtaaccatccattgggttcccagaacgagatcgtatcccgccaacggcatgacgaagaggtccacgtggaactcctctccatcgatggtgatcggcgcctgtcggagcacgcccgggcactggatcttctcgccattggccactgtggccgtgaggcgcggcttgggctggatggccaggttggtgcggcgcgccgcctcctcggcgatgaaattgtgggtggagctggtgtcgaggagggcggtgagggtgaccgcgcccagcatcacccggacttgcatcgtgtcgcagatcgggactcctgcgaccgcctgcaaagagaagacaggggcctccccatcttggtccgcgtccaacgcggcgtctcggcgtcggtgagcgtcacgccgtcgatgtagaagatgcggcggcagacccggttatggccacgggagtacttttcgtcgcaattgtagcacagcccgaggcggcgacgttccgcctgctcctcctgggagaggcgtttcaccggtttggcctccatcttggccacgggtgcgctcgccggcggtgcagggagcgcgaggcgctggggcagtgccggcagcaggccgcggggcgctggccgggcgggaactggagccggcttgtcgagctccatcaactcaacttgacgggccaggctcatggcggccgcgagcgactgcgggttgtgaatccgcacagcgtgactcagcggcggaaggagtccccccgtgaatagctggaccagctgggcttcctgcagtggaccggcgcgtggtaggagcgcctggaagctgttctggtactccttgacggtacccgtgcgccggcactcggcgagctcgaacagcggcgctgagcgcaggggcggtccaaagcgcaggtggaggaggtccttgaagcgattccatctgggagtaccctcgtcctcctggagttggatataccacaattgggccacgtcctccaggttgtatgaagccatccatactttctcctcctccatgatgcgttgttgatggaaataagattcacatctgttgacgaagatca

SEQ ID NO: 18788 - DNA, 731 bp, Oryza sativa
aaaagtctaatttccctccccctcttcttttctttttcaaaaaggatttaattaaatccttttcctttagaccaaaaatccaataatcttagaaattcaatatcttcccaaccgtaaatccgtttgactccgttcaacttccaaaattcctcaaatctcgagatctatctaatggcacgcttagaggtcattaatagggctttattttcgccgtttgttgagttgtcccgtttcgagtgtagtttcggagcccgaagacccgcagtgcgaggatttcgaggatcaagcccaagatctcgagcaaggcaagccacctttgaacttaattatgttgcttgaaaaatattatgcattgataggatcgcacttaatctgtttgtcccgtctgcaaggcagattggcagacctacctagtttgttgcatttgatccttcctttgttaattgttataccatgttcccttgtaaccatctagttgcgcctcgatattcgtgcactctgtgcgagtatcgacggtcgccttcaaacttaaaatttgaaaaacaacttgggtaaaacttgggttttacaaaagacttggaaaacccgacacctgggtcggtgcttgcgaactaaatgaatttccaaaaccgcggaccggggaacgtaccgggtgtacggttttccgctcttgcacttaaggaccgtttccttggattttcatccgaacataagacaagtacgaccacatg

SEQ ID NO: 18789 - DNA, 1441 bp, Oryza sativa
tttctaaaatggttactgatctttctccctctttcaaaattgtagatggcagtgaacgccagcttcagttcccacggttttggtgagggtcaccacgttgctcagcttcgtgacctcgcccgctttgttggcttctcgtgtccggagtacacggggtactccgtggaccgtgttccccctcgttgtgagctctctgtgtacctttaccctcgtggaggtatacacggagctggccttcgcccacaccacttcaccgtggccaggcccactctccagatcgcgtaccaggacctctcctggactgcgcttcgtcgcttggcccacgactacagccaccgtctcgggggctctgccttccggcagcttccacgccttccttctggccacgcagacgccaggtacccttgtccttacagcgagtctcagccagtgctgactcgcatggttgagctttcggaggctcaggccactcagcacgacctactccttgaggcttaccgctcccttgcccgccgctacgctgctttggaggcccgtctggccgaggagggtgtcacctcagttgacactgtctcctaggactcaggccgcctctgccacgccagccacctgtcctcccacagctcccgcggctctgcccgcactcccagtggcccgcgctcccccagctcgcgtgcgccatactcaccagtgtactctccctacccacacccagttagcccttcctacacccccggacacaccccagttgcttcctcccgccgaggcccacgctttatccgcactgcgcggaagcgtgttgttggttcttccaccgtgttccgtttcgactacccagctcccccaccgccagcggcccgtgctgctgccggccctcgacaggttccgccggtcccttcgcgtcagccgatcgacgtttcttcgactgaggagccgactacaggaagcagccaggcagacgaggagtagaggaggcagtcttcagcagccgtccgtgtgttaggcccttttgttccgccgccaactcttttggagtcgtggcgaggtagtgcgtgcgtgtgtttgttgtgggtattgtttggtagtctggttctcctaggtggtgtgcgcacagtcaagctcggcgtagctctgtgacttgtctacacccgttgtactaggtgtttttatgatatgaaaaatccagtttatgcctagtgtgtgctatctgagttgctatttactttgctccttgccctcctaagtgcttatctgactcttaccccgccctcttctgggagtttagatggttagccgcccccgccgtgctgctcgtgcaccagcccgctttggttttgaggatggtagagttgagccagaagcaaatcatgagtcagctaatgagcagtctcaccacagcaaccgttcgcaccgtactgcttcccgcaacgcaggggtgcag

SEQ ID NO: 18790 - DNA, 745 bp, Oryza sativa
caggcaagtggacaaggttcacgtgcttccaacaactttggtcgaggccgggtgaaccacattcaagctgagaccgctcaggatgctccagacgtcgtgatgggtatgttctctgtcaactccgtacccgcaatagttctatttgattcaggagctttccattctttcatatcacaagcttttgtgaaaagaaatggttggaaaacccaaaatttgcgtgtaccaatgatagtacattcccctgggaggaatataagggccactcaaatatgcccggaagttaaccttagaattgaggaagttgactttctagccaaaccgatagtcctagactcgcaaagcttggacatcatcctagggatggattggttggctaagcacaaaggacagatagattgtgccgaaaagtccatcaccttgcaaggacctggaggaaagcaagtccgctttacctctaacacccctaccgcaagtcggtctatcctaacctgtttacaagtcacctccttggagtcggtgcccatagtctatgaatatcccgacgtatttccagaagaattaacgagtatgccaccagaccgagagattgagttcaccatagaactggcaccaggcaccgcaccaattgcaaaaagaccctaccgaatggcagctaatgagttagcagaagttaaaagacaaatcgaagaattggagagtaagagttatgtgcgacctagctcatcccctgaagagccctagtggg

SEQ ID NO: 18791 - DNA, 738 bp, Oryza sativa
tgcacccctgcctttcttgtgtccattggttggcacaatggcacgggcgtatggggatgctcatgtcgttgtttgggaacaatgtgctgacttatctgaatgcgtctgcaatatgactactatcctcttgcacttcaaaagccagaccattgccctttttcacttttgctttttatatttcagtacttcatataactagttatggtaagcattgttagtcgcttcctttttttatcattatttttatggctatgcattaatatcctttgtgttggtctgcaggaagttcacaggatcaaacgtgaacatcctgatgatgatcagtgtattgtaaatgatagagtgaagggtcgcctaaaagttacccgggcttttggtgcaggctatctcaaacaggtaattgtgatactgtttgagtgggtcagccattcttttaatttgattcttatacttacgatgtttgttttgtgtggtatacatatccatcttcagagcaagtgcatttgttgtcagtactttgtacttttaactagaaactatatctgtcatgtgttctgattaatccaatgccctgattgaattaatatagacactagataattcttgatcatagaacttcgtgtatttgtgcaggcaaaattgaacaatggattgttagagatgttccgcaatgattacattggtgatacaccgtatatatcatgcacaccatcgctttgccatcacaagctcactgca

SEQ ID NO: 18792 - DNA, 771 bp, Oryza sativa
cccctttcgccgttttggagttgtcccgtttcgcgtgtagtttcggagcccgaagacccgcagtgcgaggatttcgaggatcaagcccaagatctcgagcaaggcaagccacctttgaacatcttgagcctatatttgaagttaattatgttgcttgaaaaatattatgcattgataggatcgcacttaatctgtttgtcccgtctacaaggcagattggcggacctacctagtttgttgcatttgatccttcctttgttaattgttataccatgttcccttgtaaccatctagttgcgcctcgatattcgtgcactctgtgcgagtatcgacggtcgccttcaaacttaaaatttgaaaaacaacttgggtaaaacttgggttttacaaaagacttggaaaacccgacacctgggtcggtgcttgcgaactaaatgaatttccaaaaccgcggaccggggaacgtaccgggtgtacggttttccgctcttgcacttaaggaccgtttccttggattttcatccgaacataagacaagtacgaccacatgggtggaatgggacacccctggctgagtaactagcttatcaggggagccttgatgccgagagacatgtggattcgccggggtggtgtcggggaggacccctgggcttcctggcacagtatggtctgggacctaacctgttgttggtctgggacccctctcgtcggcatatggtaaacctgtgtcggctttcgaaatgccttgtcatgaaagcttggaggtct

SEQ ID NO: 18793 - DNA, 1439 bp, Oryza sativa
  unsure (1)..(1439): unsure at all n locations
agtgaaacaagatcggactacctaaggtggaaggatgagcatgaacgtcgaattgctgctgaggctttagaatggcacgtaaatcccctaggactccccacgtggcgtgagcgtccggagtgtcgttgtggtgaccgttgtcaggtcataaggtccgtaaggcaccgaactcgaggacaaaggtgtttcgtgtgtccaaatattgtcgacgatgatttcgtggtaattacaactattcttttcatcactcctcagtactatcattaacttaactatcccaaaatggatgtacataggaggatgtaaggaaatgtcaattcgtacaatggattgacacagtcagagttacttcaagtggcgggccgataacgcaacctgaaccgaccatacagttcattcatgcttggatggagtacgatcgggtggaaattgcaagcttagactggaggaacaatccattagggttacctaaatggtccgagcgtccaaagtgtgggtgcagagatcgctggcaggtggctacatcctttgctgaacaaacatttcgaaggagatattttgtctgccccaatgtagacaacgatttcgttgtatgtctaaccatttacaaaatccgctatgatttgcacaaaattactacccaaactgaataacattactatttttacagggcaatccaaggatgggtggatttactcgatggatcgacaatgtcactctatcatatcatggccagaagataacagagtcagaaacacaagtagagtatcaacgattgaaggaccacgagaatgcaatgcattctgaccgacctagaagatgccgataggttaccgcatgcttgattcgtcgggatcgacaaatttgtaccgtgtatcgatggcacttcttatctatcttatcattacaatgtttaattatggtggtgattttttgtatgcgtaagactaagggcctatttggattgctaccaaaaacatgccctaccaatattttggtaatttgaatagtacttgtgtttgatttcgattgaagcttattcattagtaatacgtaatctagatttgagattatgtagaacattcttcactacaattttacattttggcagcaaaccaaatatgatcaaatgcaattttaccttaccaaatatttggtagtgccaaaacttgcttatattttggcactaacaaaatatttgtacggtaacattccaaataggccctaaaaaataataaaattgtattttaccagtcttggagattttaatcttgtatagttttcaatataaaaagatttgataactattgatatttatacaaaaatataaagcaagtataaattcgccctcccccagagcggcaagggggccgcctgcaaaattccaggccccccgccgcccatttgcaggcggccccccngacgctacggaggcgggc

SEQ ID NO: 18794 - DNA, 828 bp, Oryza sativa
atgtccatctctcttgcagtatttgcatgacttatacctgcctctggactttgatctcccacggtagctacttgagcttttatctcttgatttgttgtttgtgttcttctcctgttgcctaccccgacaaccaagctttctgcttgtgaatttgaaccttcagagggtaccatcttcttcatcttttctttggcatgcaaagcatcataaacttctttcaaagttagagtatcacgactataaagaatagtatccctgaagtttgcatatgagctaggcaatgaacacaataaaataaggcctaaatcctcttcatcatgctttacctccatagactcaaggtcagcaacaatttccttgaaagcggagagatggtccatcacagactcatcatcttgcaacttgtgcaaaaataacttttgcttcaggtgcatcttactggtcagatccttagtcatgcatatctgtttcaatttcaaccacagcccaacggctgtctcctccttaagcacctcctgcaaaatattgttagatagatgaagatgaatatatgacataaccttatgatcctttttcttctcatcaacagaccaatcctgtgtcctcttatcaaatccagaaagcgcatcatcgaggtcttgttgtgcaagaacggctcgcatcttcacttgccaaagtgagaatcttgtgtctcggtccaggagcggtagatcatacttcaaactcgccatgggaattaatcctgaaatttgctagtaagaaattagggtaaactagaaaaaaacacgaactatggtacacctcctgtgtgcaccaagcgaagtactg

SEQ ID NO: 18795 - DNA, 1248 bp, Oryza sativa
ttgcatatcacacccatgatgcaggtagttgatccctctggcaatgcccaatgcaatttcatttagcttatcccaggagaaactcttttcagacgagaagatgtacttgtcaagagaaccctgaggcatatactcgtacacaagcgctcttcttatttcttcagagcagaacccgacgagtcgcaccacattgacatggtggatcctaccaatggtggagacctcgctgatgaactcttcccctttgcaatttgcgtcacccttcagcatcttaatggcaactcggacatcaccagggagtagcacacctttgtagacggagccatatcctccttggccaagcttgtctctgtaatgacttgtgatggcaataatgtcggtgtaggagtatctcgttggggtcagcatttgttgcaattgcagaaacttctctacttcatcaactctcatctttattttccagtacatgtaggcaacggaggtccacatcagcagcatcaccaggacgaacctgcatgctacaccataaacatgttcatccctgctgtagagaccaagtgtatgaacaaatagagcatgacgagactacaatacagcgaaaaaggaaaatgtaactgaaatttgatatgtgtgattgtcacgtaccagaaatgacccttaaaatccagaaagtttgtggcactaacatcaggagcacaacaaaagggtgtggaagttgagttgcatggcggccgcatatcgagaagtaagaattgatattagtaacaatgacgaagatccgatatactgtcggttctccattactgtcgctgcaagaccacgatgtcatgcatgagccattgtacagcaaagcaaatttccaagataatgttatttggcattggtaaatttcactatcaagaatgtacaaggaagacgggccaaagtgttcagttttaagtcccaaataaattgactcacctgatcaagccccttaggcagtcgatgaatcccccagacctgaaaggaaaacgaacagcgaatccttcactcatggatctgacaacatcttcataatttacatcctccagtgtcgcagccgcagtagcagttcgccaattctctagaccacccagagctaaaggagtcattgccaggtatccacaggaaggctcaaggttctcagctaaataagatcccagaccagttagcacatacacgatagaagagttgccgcttcggcaagccacaggcctgtacatgacattg

SEQ ID NO: 18796 - DNA, 1439 bp, Oryza sativa
tagtaagttgttcaagagatttatcaagagatcagcatggtgtagttggcccaataatttgcgtcagtaacaacgcaagccagtggtatttgatacatccttatgcatattgtctgttcttcagccagactgcaaagttgttagtaatggcatccaggcaccctcaacttttaaggaaacagaaaatggagtaatcggtgttgatgagttggtattcacttggtactccagtgacataaccagagattgtcaaaaatgtgaaaatgaagcaaacactgtggtttcagctcacaaaggggccgagcattctcaattatggtattttctctttctgaagcagaaatcttacatcaatattatgacttgctttgcctcggtaggaaactctatggtctttaccttttcattctcttagtttaaagtttgccaattaaattgttcaaaagatttccatagttgaattagttgtaaacactgcagatcagagcagctgctagccaatggaagcataccaaagctctaggttcacatgcatggttattctaatttaaaacgcgcgcacacaagagaaggttataaccgattaagagtaacggaatttttttgaaattcttaaaattaaaaaaaaaaccattcatctacaaggtaacctagatcaaaatgaatttttctttaggattggagcataggcatcccttggtaactagagagggtgctatgaatgaacacactctccaaaataccattgttagtatcaacgtatagtttatttgattgtaaccatttggactggaccgcctatacatgttccaagttaaagaaaaaaaaagaaagaagaaaacataatttacttagcaacaactgctaagcctcacgttggttccatgtattccagccatagaaaccacacccacattccttaatgtcaatactatactctctactctagcttatcactagaaccaaggatggacatgctctcagatttgatgtggtgttctggttatctttaatttctcactttttcacaataagcatgacctgaactttggcttgtcagcaccttcttggatacatattcttgaaaaaaacaccatactgggtacttgcaaaaggaaaaaagaagaaaaagtgaactccatgtagggtcatattgatattttaattctgaactcttgcatacctatgttagatacacagaaagcaacaggatcttcagcatgaacatgtttgcacgagttctaggtcactggtgatccatcatgaaacacagcttggtgcccaaagaaaccagcatcccatctgtctattgataatatatatttttttagagtaaatttcacttagagccatcttttattactgatatttcgctttggccctttaatcaatgttctcactttcgaccagtctttgtttttaacctttgtggcactttg

SEQ ID NO: 18797 - DNA, 563 bp, Oryza sativa
  unsure (1)..(563): unsure at all n locations
agagaggagcagtacaaacaactgcatgcatatccatttagcaattattaattgctccccaactccaactccatcatctccaccaccacctaaacccacaaaaaactaaaccagaaaaccgcttaaccgcaagcgccgaggcggagagcggaggcagacgcagacgcagcagccgagcacgcggcgacgcccacgcccacgcacacagctcggcttcccggcggaaaccctagcgggcgggcgggccccaatggcggaggagggcgacaaggccacggcggcggcggaggcggggggaggagcagccgctaccgccgccgctggtggtggtggtgggggtgggggtggtggagcngaggagganagcgtnaaactgttcgtggggcaggtgccgaagcacatgacggaggcggagctgctcgccatgttccaggaggtggccatcgtcgacgaggtcaccgtcatcaaggacaaggccaccaaggcctcgcgaggtgcggatccgtacgccccggatctgggctcgcgggcgcttgctcgtgccccggggctcgatttggggg

SEQ ID NO: 18798 - DNA, 798 bp, Oryza sativa
gattgtagcttcagttttgtagcatacctaactgaggtcccaactcccaactgaccaaacaatatggactgagtgttatgattaggatttgaatagaacttttgagatagggacaaaatctcaaactaattctggtgcatactctggtggaccaaattctttcttcggaatgaaaaagcttcatgatttcactagttttggaaacttttaaaaaattatgtaggttgatgttactttcacagttcaggtgtcttcacccagttaatcacagaataagactggacatctaatcccactcccaatcagatgagtaatgttgagacgtgaaacatggatgatgatagaaacaaactataaagtcttggaagttaggactttgtcctaatgttggacaaaagttggagtgcatatgagtgtggtagttggtaatcactgactttgggagccagcaaggcacatttacgtgacattttttttctatagtgttaatagctactgttgtgacaccttgttcatgaatagctgccaaacattcccagttgcttctttcttttatctgatgacaatcttcgttttctttcatcaattcaggcatcaagtcctttacaagtaaatatgctgatggagagttggagagactaggtatgattgccctttacatagaactgttctttttgccattgattttattgcactcatgcttgtacttgctatgatctccagaacacaagctttttattggaatgcttccaaaaaatgtaacggacaccgaattgactgatttatcttcggggtgca

SEQ ID NO: 18799 - DNA, 657 bp, Oryza sativa
ttgtgaagccgattgagatggattctgcagatatttaaaaacatcatatctccaatcatcggctgtgatcatagctatctccacctcaacgtcctttatcatcgacttgtatcctgatgccccttgagccaaatcattagcttcaacattttgctcccgagatacatgctttagagttaccagccgaaaactattcatcaattctcggcacttctcattgtagaacatcaatgtatcatttttgcattcatattctcctgccaactgactgatcaccaacaacgaattacccataatttcaacagcattggcttcaaccttcttgagcaactgcaaacctttgagaaccgcttcatattcagcttgattgttaattgcataaggtttgatagtataggcaaactcaaaacttgccccccgagggaaaattattaccaagctgataccacatccatgagtgcagaccgatccgtcgaaaaataaagtccaaggcacaatatcaactgagccgattgaatcatcatgatgttccacaataaaatcggctatagcctgccctttgattgccttgggtaattcatatctaagatcaaattctgttaaggcaaatatctactttccaactcttcctttgagaaccggagccgatagcatata

SEQ ID NO: 18800 - DNA, 1544 bp, Oryza sativa
gttgtttgtagagatgtcgacgtcgaggatgtccagcagcgcgggcaacctaaattgcctgtagtcattctggcacttgcgcttgagccgtatgtgccgcaggacgacgtagaccaggatctgcccgtggagacgggcgtggcgacgactcctttaagttggttcttgtcgtttccatttcctttgctcttctatcttgattagcttaacttaggtatttgcttgccgggcagacctcgaaagtgcgcttgcttatcgcgactgtcgcatccaatactggaggatgaagttcaaggtcgccgaacttgaggggactatgttggaagtgaagagggactgggccgtggaggcactccgaggtcgcgaggtgtggttcaactcgtacctcaggagttgttgcacaacctcgcgaggatcccgaggagtcagcggccggctatatctcgtggccgttgtcgtagacacgggtcttgatcccttgtagtactataccgtttgccctttcgacctatccgttactctgagggtgagaaaccgaggcgaagcatatcttgactcccagtccaatgtagtaatcctggaaatcggcgctgatgaattgggagccgctatccgttatgatgcggtgaggcaatccatatctgcaaaatatccccttaatgaatttgatggctttgtcggccttgatttcccccgtgggtgttgcctcgatccatttggtgaatttgtcgattgccatgaacaagaatttgtaaccgccctgtcctcgtgggaatggaccgagtatgtcgagcccccagcacgagaacggccaagtgagagggatggtttgcagtgcttgcgctggtagctttgtgtgtttgctatgaaattgacaagcttcacaccgttgtaccatgtcgcaagtgtctttgagggcggttaggcagaaaaatccttgtcgaaaagcttttccaaccaatgtacgactggcggcatgtgatccacagaccccttcgtgtatgtcgaggaggaggtgtttgccgtcgtcggacgagacgcatttgagaagtaccccgtttggcgcctttttgtatagatcgttgccgatcatacagtagatttttgcttgacgggttattttctcggcttctgcgtcgtcctcgggcaactcgtcgctgcttatgaatttaatgagtggggtccaccagtcgtccgtggtctcgatgtcggcaacggcgtgctctgcctctgtagccccctgagctgatgtcgggggtgactgggctatcttcgtcgtttgcctctttcaccgatggctttttcaggatgtccagaaaggtgccgggttcgagtggctctcgtctggatgcacgccgtgctagatcgtctggctcgatgttgtccttgcgatatacgtgtcagacctcgatcccatcaaatcttttttccagcttcctgacttctgcgagatacttggacaactcagggctagagcatttgtaatctttgtgcacctagtttgcgactagttcggaatccccttttacgatcagtcgcttgac

SEQ ID NO: 18801 - DNA, 3343 bp, Oryza sativa
cagtttgcccgacggtaccccgaacgtgcacttctcagaattgagcatgaggcgatatcgtctgaggtcgtcgaaggtttcccgtagatcatcaatcaacgagtggcatgtcttggtagtgacaacaatgtcatcgacgtaggcctcaacattgttacccagctgatcgctaagtgccccttggaccgtacgctggaaggtatttcctgcggttatcagtccaagtggcattttaacgtagcagaatacaccgaacggcgtgatgaatgttgttttctcctcgtcctcttttgccatgctgatttggtggtagctagagtaagcgtcaaggaagctcaagagctcgcaaccagctgttgagtccactagttggtcgattcgagggagagggaagtgatccttggggcacgccttgttgaggtcggtgaagtcgacacacatcctccacttcccgtgggccttccgcaccatgactgggttggctagccactctggatggagtacctctctgatgaagccagctttgagaagtttatcgagctcttctcgtatggcatgtttccgatctggtgcaaatctccgcagtttttgctttactggcttggcatcgggtcgcaccatgagtttgtgctcaatcacctccctggggacccccggcatgtcggacggctgccaagcgaatacgtccgcattgtcgtggaggatggtgatgagcgcgagttcctatttctcattcagtgatgccccgattttgactgtcttgtcggggttggcactggagagtggaacgattttgattgcaccgtctggtttcggcgtcttagtcgttttgatcactttcttgggtggctcggctgtggcgggtgggctgggcgtgtgttcgaccatgtcgaggctccgcttgtcgcattggatcgccagctttgcgttcccttgaatagtgattgttctcttcggcccgggcatcttgagtacctgatacgcgtagtgagatgcggccatgaacttcacgagtgcagttcttccgatgatggtgttatatgctgtgtcaaactcagcaacatcaaatgttatctgctctgttcagaagttgctcgcttggccgaaagtcacaggaagcgtgatcttgcccaatggcttggacgaagactgaagagtgattccatggaagggttgatcggtaggtgtctgttgacaaaaaaatcgaatacaccggcctgggagatctgcttagctcctgtgtaggtccaaatatgatgagatgcgggcgtgccagtcagtttgatcctgcaactgacaagatatgcaaatagtagatcaaaacagccgatcggctgacaagccgatggagtagttccagccgataaccgataatagccgatgccgataccagccgatggcgatagggtttaagaaatcggctatatgtccaatgtagataattatataaaggcaatcagctgataatgatgtaataaaataacaatataacccaatataaaccaatcggctagcaatgatatgataaataagcatcgatccgaaagtttaagcacatatcggctggaggtccgatgtcatgaaatccacaagattagattaaacagtgaaacctttgttgtcatcggctaaatccaacttatatgtatatgcaatccttatgagccgatgcaacgtccagataattcaacggctgaaaccccgatgaaacccttatcggcaatcaagaagcaggctagagattatggttctaagcacaacttagtagatcaaacttaactgattcagcactaagtatgaaaagaaacacaatatctagataatcaagccgatgactgattttcagggtggtacatgcctaagctaatctaatctagcaacgcgatttagccgatatcggcagaaaccctaaaacgagaagcagccgatatagctaaattgatatgctaagactagattaatagagacatatgataaataggtaggcaaatatatcatccaaactagagcaatccaagaggtcgaatgtactgatgcagccttgaacgacgccgaagtagatgagacaattgcctgggccgacggaacattggacttaccccttcaccagagattgaacaccgatgcagccccacgtcaggtgccaagtcccgctggacgataaaataaagtagaaaaggtaaaaggtggtgatgcgccgaattgtattgatcgtagtgataaattatatagacccagggtgtacatatttatacccatgggttgatacaagtccttgtcggacaagaaagaaactaacctaaagataaaaggaaaatataaagtccttatcggacactaaacacactttcctaaagataaaaggaaactaacaaactattcctaattaatagataaactgccatgctacatcctctttaaactcggtcacttagggataagcttcctttagtagattgatttccttaaccgaatatagcaggaatccaactattggcgacttgataactcccatcggctgattccgagatactgtagccgataatgattctaagccgatgacgtctttgccgattaccaaatttcactgttaacagtgtcaactcgcttcgtggaatttccattgcgtccaaggtgctggcgaagagaaggttgatggagctgccgccatcgacgaggactcgcgctaccttgatattccgaatagtgggttcaaccacgatcggatatcgtcctgggataacaacagccttggggtggtcctcatctgagaactcgatcttctgttcagaccacttcatcttgggtgcaaccccttgccatgtcgaacaaacctcacgctccacttttttgtattctcactttgaagattacgctgtggaacctccgaagccgagtccgactcctgagtggttgcctcagtggccttctcgactacacgtactcgcttgcccttctccaaagctagttgcttttccagcgactttttgaagatgaggcactcctctagagaatgtctgtccgacttgtgtatggggcaccatattctcttcgtatcactgccttgtgggtctgagtgtttgggtggtcgcttgtatttagacgcgaggacttccgcttgagctttcctcttcccactcttccgcttttcttcttgcttggttcgagtgcgtccttggctggcttcttctctcctcctgcctttgtcttgtcactcttgcgtctcagtgcattgtctgcatgggcgcatcgatcgacaacctcgaacaaccttcgagtagttgtgatttgccttgttgccaactcctgggtagtatagcgatctctgacaccagttttgaaa

SEQ ID NO: 18802 - DNA, 1529 bp, Oryza sativa
atgggattatatggagagaacaacagattacaaagggaataatagaactcgatggtaccgacgagatcgtagtcgagttgattcgactagatcacccgtcgacctggctcctgtagtttccggcttcgtaggctgtggttgttgtgttggctatgagattcaatccttaggtccccctaggggtcccttttatatcgcaggtcaggcggtctccaagtaggactcggagacatcggaccctgcacgatatagtaacgacccagtcctatacgggtaggaacctttccattggtgaacttagtgatggattccttagcgtgtacagagaatgtccgtatatgcgccgatgtaccgtattgccgtatagtgtacatccaagggtagagggtataccttatccgtaaccctgacaagtctattttcccttcctcctctttgggctaacatatgtatagctaaaataagtctatttttcgtcccttctctttgggctgacatatgtatagataaaaaaagtctattttacatcccttttctttcgtccattgtatacaatatgtctatttttactctcctattttttttgtatcgggcttggctgcttgcccgtcgtgtcgggccggcccaacgtgccggtggaggggcccaggcacggccagatggtcgggctgggctggcacgggcccgacctccgtcaggctgtgccgtgcttgggccagaccaaaatgtcgtgtcataggccgggccgtcgggcctcgggccttttggccatctatactcgtataagagagcctaaggaaaaaaaaggtggtttaataaggagatttagccaaggtctggtctgcgtgtcagtaaggttagaggaggatttagggagaggattactgtagggattagattagaaatctgttgggcccactttgtcggtgacccactcctctcccttttcctctcctctttctcgattcttcctcaccgctctactccctctcgttccccttctcacatgcgtgcgtgcccgagcgggaggcggctggcacgcgacggcatgggtagcggccgagcgatggcggcttagcgcggcggtgcgggagggcggcgatgtggggaggaaggcggtcgccgcggcgttgctagccggcggtcgggaggaggcgcctaggcggcggcgctcggcctggcgcaccggcggcgggaggcggtgaggagcagtggcgtgggaaggaggttgccgcgggagcgaggcaggcggcgttggggatggaaagggtggctggtacagcgatgagaggcggaggaggtgatgcggtacggaaaggtggtcgctgcgggagcgtcggccagcggcttggaggaggaggcaggcgagctggatggaagtgaagatggcggtgctgcggctccctggccggaagaaaatcaaggcggtcgagggaggagctcgcgcaggctggcgtggccgtgcgcggcggtgtcggtggcggggagaggatgttggtggcggctcggcaggggtggtggtggtggat

SEQ ID NO: 18803 - DNA, 1850 bp, Oryza sativa
agggttcaatagccttccggaatggatagggcagttcatttatctgaaagaaattagcatcttcgattccccaacttgacatctttgccagagagcatatggaacattaccaccttagaattattatatatttatttttgtccaagactggctgaatggtgccaaagggaggatgctaacaagatatctcgcatcccaaagattatgttagatggtgaaatatttataccgggacaagcaatcgatggatgagaggtatatgagtaataactattcttttcattcatctattaacgtttgcatttgcttcaacattatattttgatctagaaattcaatgatgcaaataatatttgtcttgtctggtatttgttctcacgtcatccctcaacgttttgcaattagttgagctctccaatttccaactgagtgtgctctaaacctgtcacactgtatttgattgctgctttatgaacgaatattttatattactgatgttaatcgattcctcagtcctcacctagctgtacacgtttcttaacttgtctgtttttgttttcatcttgtgatattttcagcacaagcaaggtttggctaatatgctatacttttgcagagcgaatcaaggcagagtgaaccatagatcaagcggtcttttgcccaggacagaatgtgtagagagcaaaaaaggagggacgaagcaaaattctaaatcagtcaattccaacaacttctgaatattatttcaccttcaaggtatactaagtctccactcccatctgtctattacatttttcacttgctggttggtacgtacgctaccgcattttgaatcgacagtaagctaatcgagtactagcatctatcagaggctggaagctccgtcaggggcgtcctctggcctcggccgtggtactcgaagctgtcgctcaagcggcagttcgccgtcacaggcgccacgtccggcgtggcgtgtccttcttcgggagtgggccgtacaatctgatgccgctgtccgccgacgccgtccgacgtgagcagcatcctctcctacaacgaccaaggtcaggaccaatgaacccctcgacgaacagcatctacctccggggcatctccgtcaaccaagaagaagtccggccgcctccctccaggcgtcggcgtgctcatgtcatgactcgacgtggccgcgcgcgccctacactgcaccgtcctgcgacgccaaggaaggcgacgccaccgaggatcgataccgtgcatgccgagcgtgagcccgttggaggattcacctgcgcccatgacacgcggaggcggcggcggggaactggatgatgatcgatcggtgttgagttgtgaaccaaagttcatttgcacataataaatatcagtttctgctggagcgaagcgcccccgcggtatggatcgttatcctttagggtttcaccttcatgtatatacctcttataagccgccattcggtgttgtaactttaccccgatacagtgaagatattttattggctggtgtcagtgattttttctctcctctattgttttttatgtttatttgcctatcgtttcctatcaatcgggtccaactcgctagcgcaggtggcgagagcgacacggcgtgcttggcgttcgtcgactgtggttgggcagcgacgatgagcgcggtgaccgtgcgggcgttccagatggagaacgtacaacgtaacttgttgctgttcgatgaggccgcgtccagactactaagctggttcagtcagtggcaccctttggttcatcaggatatcttgggttggtttggtttgtggtctaaataggtcttaccaaattttgtcaatgccaaat

SEQ ID NO: 18804 - DNA, 1468 bp, Oryza sativa
cgacgttgaggacgtgctggatgaattcgatgctgctcagctcatcaggaaccatcaatccaaggtacttccacatattgtcgtgtttgaataaatgttatatgcttcaactttacggatcagctgctgcacatgtgtgattttctttgtggaacttttttgcatcataccagcccgattaatttctaaaattaaaaaggaaattcatcttttccactaccatgccatttcccgatccatatcggactatcagagactagtctgagtagatgaaaattgatctacaaaggacactaatatagacagtgactttgactccaattttatttttcagctcaagttatacttttcctggaacaatccgctcctccagaaaatgaccatagcacgcaacatgaagaacttgagggataaaatagttgcaatagaaaaggatggcaagatgctcaatcttgtgcgtcatgaaccacatgcaaaagggagtagaagcaacgaaacttttactgtcagtgatgatatggagattggaatgctagggagggatgctgaaacagaaaaaataatcagccttctattgaaaactgaagccaaggaggatatctcaattattccaattgttgggcttggtggactagggaagacaaccttagcccaagcagtttttgcagacaaaagggtccgtgtctttgatatgaaaatctgggtttatgtttcagaggattttgatctgctcaaaattgggaaggctatcatcagaggagcaaacagaagtatcaacctggacaactgcaacttgcagtttgtaaacaataatctgaaaaaagaacttgccaacagaagatacttgattgttctagatgatctctgggaagaatatggagaaaatttggaaaagttgaagcagatgttacaacatggcggaaagggtagcaagattatagcaactacacgtagtggaagcgtagtgcaagtactatacactggttatcttgcaaatgaacggaaagtatgtccggtgcctgagcctgatcatatcaatttgggtgttttatcaccttacgactgctggagcgtcatgaagcggagagtatttgggcctgatgatggccaaaatggcttagaggaaattggaaggcaaattgccgagaagtgtggaggactaccactggtggcaaatgctctcgggcaagtaatgtctgaacataggacggttgaggcatggacagatataagggatagaaagattgttttggatttcaaagcagatcatcagcaagacactatagagcgcctaatgttgagctattactatatgaagcgagaattcaaaatgtgctttacatatttggcagccttttcgaagggtttcgtcatggacactgatcgcttgatccagcaatggatagcccttggatacattgagcacgagataatggtcaaaggtgtgtcaactatcttttgcggatgt

SEQ ID NO: 18805 - DNA, 1976 bp, Oryza sativa
aaattgtattcctaatggaaatcttttttttctttttctaatttcagaattttttttttcaaattttactaataccgtatagtgttcttttaatatttttatttttcaattccagttgtttcaaaattgtattcctactcaactctcttttactttttttaattttttatattattttattttttattttgaattttaattaatctcgtatcgagttcttatatggattattctttcaatattgcttatttttaatttcgaatttctgttaattttaaattgtattcctacttgaactcttattttctttttgctaattttagattttatttttatttttcttccgaatattaactaatatcgtattgggttcttatattgactattctctcaatattccttatttttaatttcgaatttcagctatttttgaattgtatttctacttggactctccttttctttttttctgattaatgtggaaatttctagcacccacagcgaacatggtgccttctttcaaagctgttttaataatataatagatcacttctaacatttgaaatttgtatcaaaatataagtagttttatagtgttcattagtacaggaatgatgtcctggatgggactcattttagattgcaaacgaaccataagtggtcgcgtctataaaaatcgagctctattttcacgtgcggctctttaaaatgaccacactgaaaaatcaattttcgcatgcgggccactttaacaggtccggacttgttaagagacccgcacacgaaaatacctacccatatttttaatgccgccatctccgcccatcgcacactctcatctcttcccacctccctcctcctccctcgactcctctctctcctccatctcctcccacctcgactcctcccttgactcccatctccttcctcctcccttgactcctctctctcctcctccccctcctcccatctcccaatctcgacaacgacggcggcctcagctagggctgtggcatcggttagagcgacgaaggcggcggcatcggttagagcggcggaggcggtggcattggcgcgctagggtggtggctgcggagcggatccgtcgccagccaccgcggggaggccggatccgtcgcctgccaccgcgggaaggccggatccgtcgcaggccaccgcggggaggccagattcgtcgctggcgaccgcggggatgacggcggtgggcctgggcaaggcgtcggcgacgacaatggtggtgacggctgcgacagcggtggtggccgctagattagggttcaattttttttatttttttgttttgattttttattctcccatgcgggcggcttaagaacccacacgcaaaaattgcgattttcggattttcgttgacacctcgttcccgacgagtgaaagttccgcatgcaaaaatcaattccggctgccggaaaaatcgttattgtactagtggtttgcgcttgtgtcatccatcacatttaattttatttatatcttactccaaaacgatcctctcattttcaactcaaatttaagcgcttcattggaatagagtatccttaggaatttaaaggattcaaatcctaaggaaattttggttgtttgcaacgtaggaaaattcctttggattacaatcctatagccaaattccatagaaaattttacacgtaagctgcaacctcattttaactttttgtttaagaagtccaatacttcctcctccttttttagggtgaagttcaatactacttcttatctctttgtctctcttttcttttaaaatccatccaaattccttttttcctgtgagctatccgaacacacagtcttgtaaatttctgtgttttgcattcctgcggaatttgcttacacacgacatttcatttctatatttttcatattcttgcatttctaaattttatgttccaaataagcagtaatgtattcctataagg

SEQ ID NO: 18806 - DNA, 1220 bp, Oryza sativa
agtcaaatttaagacggtagatgaagttgaacatggtcttcggagagtctatgatgtgacagctaggaagaattcaattcacttggcaagatgactgtggtgatatgagagaaggtggagcaatgttgcaggtggagtcaggaggaagaaattacaaggatagcgggagtctcttgtttacggtgagcctgatggaggcttgtcggggcagctcggcgtgagcggcgaaaaaggatcaactcaagtcttggtacacgaaggttcgagcaagtaacagattcggattggcgtgacatattcgccaaggtggagtttgttagagtttgtgtcgaatatgtgtacgtagtcggttacagtttaggacttggagttgtactaggtgtaggactagagtataagtcgactctatcctagattctctcataaatagaggggcgtgcctgttgtaaccgtatggcgacttagcatagcgagagggagcggctgccggcatcgaccggccgtgagtcgttgtaactctgatacgttgtatatgctggatcagggaggagcgcccgtaatcagtgccccggagatgtaggccttggctgaactccgttatcaaatatcgtgcctcggtgtcgtcatcgtgtttggatcttctatgacgtttcttccgcgtttggtttccgatgtgatttcgggccggttttataacagaaacatccaaatatattggctggaacatcaaaaaaaatcatgaaaatgtattggtccaactctggtttcttcctcctctttggtgatcgttggctcctttggtctctgttgcaaatccacaccaagatgtcatagtgcccttctactccaccgaggcgggtagctgctgctgcccaagccctcgtcaccccatcgtcgccgacaaacaggaggcacgctacttccagattcttgtagggaccattgtgttcttgctgcttctgcccatgccaatgtccgtaggatcttgccgggagctgcacgggaagctaggacgccccctcccccaccccccaatccaacaggggcgttgctcgacgacacaaaggagatgagtagtgtctctcagtccgccgttgaggacttgcgtgggagagagacgagagagagggggtcacgggatatgtggaacaaatgctcaatattttcttatccatcaggcgctcaataggtagcgttttggacgaaatatacagggtagg

SEQ ID NO: 18807 - DNA, 955 bp, Oryza sativa
cgacctgtgcctataatacatatatatagcttctgtggtgattgaacttacagtttaaccgatgatgctgcggccacggggcttcatcaatcctttatcttgcaaaatgtccctgacttgcactgcgccactccacatgtcttgatacgcatacaggttagacatggtcacataatatccactattttcaggctccagacagagcaaatgcttggcaacggattcacacatcttcagttcagatttcttgctgcaagcacttaacagcgcaccccagactccatgtgcttgtttcgatggtaaactctccacaaacttatgtgcttcctgcagccgaccagcacgcccaagcatgtctacaacacagacatggtgttctggggttgggataatcccaaaatgttctatcataagatggtagtacttcaatccttcatcagtaagtccagagtgactgcaagctgacaacagagcaataaaagtacttcttgtagctttcactccagaattattcatcttccagaaaatttcaatcgatttcaacccaagcccatggaatccaaaagctgatatcatggaattccagcaagcaatcgatttttcagcagaagattcaaatactctgatcgaaatgtccagtcttccgcacttactatacatatcaacaagtgatgctgaaataaaaacgttagtttgcagaccaaacctgaccacatgcccatgaatgttctttccttgcctaagatccccaagttgagtgcaagcacagataatgccgacaatagatatttcattgggttcaaaatcctccatcttcttgtagaactgaaatgccctcaagccttcgttattctgtgcaaaaccagagatcatgcaattccaggagcacagatttctaccaacgagactagagaaaattaactcagcactttcagtatctccaaatcggaagtac

SEQ ID NO: 18808 - DNA, 3957 bp, Oryza sativa
  unsure (1)..(3957): unsure at all n locations
ccatggctcttttatgtgataatatgattttcggtgatatttgcaaatttcaaatgactttcaaacaaatatcccaaataccgagggttatttgtgtattttctgaaaaattcagggtttacagtacaaagatttcaatgcaaaggaacaggcacttaatttccaaaaacagcaaaaatcacaggatagatactttcctttttctattttctttccatttttttctttccttgtcttctccttaacttcttttctccactcccgttgactccgcacctgccatgtgcggtggccgggatgccgaggtggcgcggcggcggggtggtcaggtggcgctggcggccaagcggcgcggcgcagcgcacggcggcctggcgcaacgcgcggcaggcggtgtggcgcgcggcgaggcagggcggtgcgcggcttcggcagcggcgcggccgtgcagggcgcggctgtgcggcgagggcgctggccggtggggacggccgtccggcggcccggggcggccggagcagcgaggcggcgaagcggccggaggcgaggtgctgcggccaagaggggcggcacgaccgcacgagacgcggcttggtgtggccggcgaccggcgctgcgcggcagccgggcagctaggcagtgctgctcggtgcggcggcgtacgacggtcaggatgcatggcgcgcgtgcggcagtccactccggtgcggatgcggctcgccgctcgcggcaggcgcgggggcttggtgtgagcatggcccgtggcgtccgcgttgccgtgcggcggtagcgcgggtcgcggtagtctcggcgtggccagcgtcgccttctctcctttccgtttttttaatttttttttcgatttcttctttctcttcttcttcctaatggcgcatgcgtcgtggatgcggccgatgtagacggcgcggcctagcgctgtgcgtgtgctttggcgcgacctggtgcggatgcggctcgatggcgcggccgttggcacagtcaggctgcggggtgctcgctggtgtggccgacggcgtgacgcgccattttcccctttcttgcacttttcttgtttcatttcttctctctctccttccttggtggtgctgccatggcggccaaacagtgtcgcacacgcatccagcatgggcttgctgcgtgctctcgttgcagtggcacggcggccagtgacggcgcgggtgcagccatggaggcggggtggccggcgtgcgttcaggagggcgcggttctcgtcggggtatccgtgtgcggcatgacgtggagggacgcgctcagccagctagtgtttttggggaaatccctaatcggctttcgccggcgactccaagtcggcgttagcagatntctccagagaaaagcaaaaacggaacgagaacgaggagagtaattcgttttcgcgattagacggcgagatgcaaaacggatctacgtgttattacccttcttcttcttggtatcgtgctgataacgtattatgcaacccagtgctacatccgtagttcaaaggggttacataatgtttataaaagtggagacacaagatatgagggtgtggcatcatttctcattcacccattgcattctcaagtgtacaaaacctctcctccaaccctctatttatagggcaatgccttgccactttacatattagtgatgggcccaattagggggtaaccgggccgggccttcatgggccggcggtttcctaacaattatatcgatgtgatggaggtgatcactcgatgtgagtgtatgtcggaagacgggtggagacatgagcgccacccgtaacacaaaacctttgcgaaaaccaaaaacttaataaaacaaaatgatttcgactgggcagcatgaatagaatatgggtggttctgtaaacggcaagtcgccaaccctggtcaattaaggactgagtcaagaagctatacaggaaacgaaacgagtacaaccgcatttcttcaatgggtatagacccagcgaactaagaaatagttgtggggtggcaccccagtcgtggtggttctgcagtggtgacgattgtgatggaagtgtggatcgattggatcgatcgtttgaatgccgaggcaaaaacctaaaatgcacctaagtatatattgttatatatattgtatacccccttttattatctcgggagcgccaggactcccttcactgctagctcgaggtgttgtgttgtgacgggagtgcaatggggatctatagtcgttggagcgggtgctgcaatgcgaggatgactgaaaaaacgggacgtgataagtctcatgtgttgggactaggcttatgtgttgggcaagtcgtggagtgcaggattaaaagcatacattaactgcagtgtgagtaaaacaaatctattcaaatagccgtgcttgcggttaatgagcgtcgggacttttactactcttgactaggctcatagattttaatcttgcttagattaggaaaagaggtgtgaccttgtccaatgagtgagaaggtcgtagtgatggaaaatgtgggaaaactagttgtgagggtaaaccggaccaagcgaggcttggggaaggtggatgaaccctcgcagattaacgaaccaagccatccttgaatccctgtgagcactatatacattctgtagtggtggctagctgagaacggttggtactcacccttgcttaattaaatattttagaaggagaagtcggagccgacttatacgtgtgccatgctgatgaagaggtgttgaagacggtggagtagggacctaggttcaccagtcgctgcctgtggaataagatggaccgtcgttgcttcgcttccgctaccgtatctacttctttggatatttggccttgtagatgaccatacttggtctatttggatgccactcgggcaaccattgtattattaatgtattgtaaagcctgtataacgatgtcagctttgtgatatacaacattgccatgtgtataccatctactgattcagagaatggtattgtaatcacatgaagttttcggtgtacaaaaccgggaggccgacacattaacattgctttgccctcgcaactaacaccggcccaccacccgctgctgaccctgggctccagctgctgcggtatcgcctacaccacccatcgctgatcagtcacctactaggccgtctaagcccgatcctccgctccaaagctctatccctatctttaacactaaacctacccctaaaccaaacccgatttacgttcacgagatgaaaatcttgggcacggtcgcggactagccttcccctttgcttttgccctacacgtctccgaccaaaaaatccattctgaatttcagacccgtccccgtcgcctacgtcattgtcggtaactcccggcagccggcacccagtcgccgggcaccgccacacatcggctccgtattctctacgaccagacacaagcccgcgctcgcactcactcggtatgttcaaaactagtactactactagtaactgcaggcatcagccgcagaagatctgcaatgggggccatagccacaagactacgtttccggacccaccggttcgcgtaagcaacaggccccacatgtcagttgcactgcgggctctttggacaatatccactcgctgaaaaaattaaggtgcggacagggtgatgcgagcaccaagagaaaatgtttcagtcactgacaggcggggcagaaatagctgttgcggtgtgggggcccgcatggcagcgagcgtggtggaaattagcggagacggcttcgtcgacgagcgcgatctcctcgcgcgataaggacacgcatagcggcacggcacacgcaggcagagaggcgagagcatcgcgactcgaggccaatttcttccttcccctttccttttcgctcgcggcgcgaggcgatcggatggcggcgtcgtcgtcgtcgtcgtcgt

SEQ ID NO: 18809 - DNA, 1370 bp, Oryza sativa
tttgaaagcacgaatcacagaagcgtcggtgatatcggggatggtatttctgcactcactaaagcgccaacatagtcccttaaagattcacccgaattctgtgttaatgtgtgtaaatcgtcttcgatctcgtggcgcttgtaagtccttggaagttagcgacgaattgctgccacaaatctgcccatcaagagatcgagtagggtgggaggtgcatcagccacgaacgcgcagaacctttcaacgccgttggcaaatagtttgctaacgcgttgtcgtctgccccggcagcgtatagtaccatggagtagacctggaagaattcttcagggtcagtactcccatcgtacttctctattgctccgggtcggaatctcttgggccatcggacatcacgtagagaacggttgaaagctctacacccggcgctaggggcggtgggttgtcggcgattgtgtgtcctccgtggatgtctatcggataacgaagatgaagatgatgacgatgatgacgatggttcactcggctccggtgtgcgattccgagggcgacgtacaggttctcgagaattctgtcgtcgtccaccattgttgtcatggcgccgatccccattatcaccaccgtcatgttgacgccctcgaccagcatcgtctggtgtccgctgttcgtgattgtcgcggtcgcggtggctgtgacgattatggtggtgttggtcttcgttcgagcggcctcctcgctcttcgttctcgcgacgtcgtaaagaaacacgatgtcgggaacgattcttgttgtcttgcgcgtgtcgtgcttcttggcggccattcagatagtcgcggagatcgccggtcccgcgaggtggaggggtagctcgtctaggcgacgtccgctgctccggtggttcgctgtcggcactgccagctgtcggtcgttctggttctgctctggtagcggcctcttcgaatgcgttactgagattggctaccgattcccgtagtcgttctgtccatcgtgcgagatcatcgttaagcacggagtcatagggagcttctatcagtattgcgttgacggtgccgagatgttgggccggcgtgaccgtctggttctccgcctctgcgttagcatgtgtagacgtgctagtcccaccaatggcaaatacgtcacgtgttgtactggaagatgacgagccatagtcttcgagcaagtgtaggactgatggctcgtggggatcaatgtcgattactccaacgaatcgatccgaggtcaacgtcgcttcttgttccttgtctgtctccttaagagagattcctgactgctggaccttaggaagcgtcgttctcatggcgcggagaaagacctagcagcttgagaag

SEQ ID NO: 18810 - DNA, 1086 bp, Oryza sativa
ccgttgcctcccaggctctgcgcggtgaggacgagctgacgtttgctgagcgcggcggcaacggagtggttggggcgaaacgggcagagggcgagtccgtttcgggcactacggcgtgcgtggcagcggcttatttggggttgaaggtggaggctggtggcatgaggcggtgtggaaattatgggtaccccatacgcacacggcatggttatccgactagttatagaggataacttgtatctatggaatatgtaatagatcattacttgggtattacgtttccttgtatattatggaacggcctagagtcctggtttggtaatattgtaaaatagatttaggaaaccgataccgtgttgcttaaggtttttatcttgtaatcatgcccccatcttatataaggtgggcaggaggctttctagggggcatgaacacataagatcgtcagatctatactacacccggcggattcaaatccccaaacaggagtagggtattacctctcattgagagggcctgaacctatctaaattcttgtctccgcttccatccacttttaggtctcgtgtgctattccattttattattgccgaattcatgttttgacagttggcgcgtcaggtagaggtgcgtcgagtttctattgacaagtgcgatggaataaattctcaggagtcgtcggcatcgtcttcgcttttatagcgtgagatccactgccgacgacaccaccttcatcttcggactagttcttctcttctggagtctgcctttcattgccatcgccgaaaattccgatgtgatcaacataaatagccaagcgactaatcaccgatccaatctaccaccggatgtcagtggccaaattatttccctgatgatcaagatttgaagctatcaactatcatgagtatccacagcccgccacgcaagtgcatatttccatctgacgcatgcgcatgtgtccaccgcatgacaattggctgaccaatcaggaagctgctagcaatggcaagcaatcaaattccaatcgccaatgttttttctcgtcgatatcaaattttctagcgagattcaattactacatgg

SEQ ID NO: 18811 - DNA, 1372 bp, Oryza sativa
tacacagatgtgcaattctcacaaaatagttgggtcacagctcaccaaattcggtaattgtatggaaccacaagctgagagtgacggagttgccacttttagcattaaattctaacttactcattgtgcaaaacaagcaccgacacatggctaacgcaatacagatcaaataccgacatcaaatctagcagaaaacagctatacgcgaggaaatttgcatggtatcctctgatagaatggctacgctaaggctaaattaatccgtctcgcatccaaatcgaacgaaacataaatcgcattgaccagggtcgccacagtcagttcaaatttccgtacatccagatccaaacctcagaaacactgcctactcatgaatccgccacgagctaatcagaaatcgaaccgcagattccgctcgtcgggggggcattgcaaccagacgcaacggaaacgaaacggaatcaaaagcgagcaaggcgagagatctcggcaatgcggggctctcaccatcgaagccggcgcccggatccgggccctccgatcccctcccgcgccgcgcgaacggcgggagccagaacaccgccgacagcagcacggcgacgccgagcacgagcgccgccacgcatttcagccgcaccaccccaccgacaccgcagcagcagcaccaccaccaccccagtcgcccgctacctccccttcctcctcctcctccttttcctcctcttccgcctcctccgccccctgccccatccggcgggcgttgctgctggtgctgcccctcgccgacggcctccttccccatgcggcgcgatctcaccacgacgcatcccggcgccaggcagccgccgcctccgcctccttggacgccattgctggggggggggggggcgatccggttggtggagctagggctgggtggtggtggtggtggtcctccgctgctgcggcgtcgttgcttaaggaggaggagattgaggtgggcgagggaaggtgagagaaagtgagaggtaaaccgcaccgcaccgagccgaaggtgaaacgtgaaatgaattggagtggaattttggaagggaagggaggaagacgacgagcagcgctgcggttggagtgacctgacctgacctgaccacgccgagtagtagtagtagtagtggactagactagagttaagtgggtaaagctcacttattgttggctcggtttattaaattaaggtcgttaatttctttctggttgtgttggtgtggaataaatttgtaggtttagctttttctttctctttttcctttttcatggtgttgtgattggtttgttttatctgggtttttggtgaggattggtttgaagattttgaatttggaagggggcaaag

SEQ ID NO: 18812 - DNA, 1424 bp, Oryza sativa
aattaaggacagattagtaggatagagaaatgaccacaataaccttatttattgaacacaatacatgcacacattccatatataaatttaattaaaaggaatgttaagacaacaagttagagatgtgatggaaggaatggagattacaaggaaatgtattttgatgtaatcaatttgctagatcccacattagtagaaatacaatttttatgggacaaaggttcaaaggtagaaattcattttctatgggatggaggtagtacaaagtttagagtttgaattataaaaatcaaacataaaacggtaggttcacaatatcatgtaaaacctgaacaaaaaagttattaccactacaaattcaaaatctcaaccgagtgatctatgaagttgaaattaatcagcatacagtagttcccaaggtacatcatcttgtaggaaattggttttccataatttcggtatcgttcctaaacatatcatccaggcaatcccacgtcattcctataatttataaagttatcacaacttccctatctccaaaaaaaatccaatcgagacaagcagtctaagatacacttagttcccacctcattcctataatttataaagttatacacttagttcccacctcattcctataatttataaagttatcacaacttcccttctccaaaaaatatccaatcgagataagcagtctaagatacagttagttaaaaactcgttgctagacatctagcaattatcccaaactacactgctccaatcaaaagcagaaacagaactagatagagatagcagcatttttatgcagtcacatttccatgtaaggccgtgtttatttctatttcaaaacgataatcttcagataactaatttaaactcaaaatcatccagaattttacaataacatcattaggaagcgcaatagttcctcagcaacagcaaacagatctagaggtagagaatcttgttacagatctgatctaacgatcaaagtaaagaagcttgttcctcaccataggtagcccgggatcttgatgcggaggaagagcatggccatagcgtacgcgatgacgatggcggcgacgccggagccaccgaaggagacgcgaaggctccggggcctgttgcggtcgacggcgaggtcgaggaggatgatcccgatgccgccgatgacgaacatgatgccggaggagagcccctcgatgatgtactggccgttgacgcggccggggaggaagacgacggggcggacggcgccggtggcggggtcctggacgctgccgatgccggggggctcgacgatgacgtcgtagacgaggccggagacgacggcgaagtaggtgaggaggatgagggcgaagacggtcatgggggaggggagcgccaggttggagggcagcctcaggcgggtgcgcggc

SEQ ID NO: 18813 - DNA, 1507 bp, Oryza sativa
gatttcgtctagctcgacatcgagctacacgtggatggagatgtactcgccgatggccatgctgcaggcgtcggtgacgaggccggctagcccggacaggaggacggtgcgcttgtcggcggggcgcgccgcgctgatgccgagcatgagcgatgcggtggagacgaggccgttgctggcacccagcaccacggcacgcagccactaggagtgcacgctgccgccgtcgtgggtggcttcctcttcctccttggcctccgccacgatgagctcggcgtcgccattgatggtagccatgcttgtgcttgttgaggagagagcagagtgagacgcgcgccaagcatactcatcggcgctgcgccgctcctcgctactggccagcgtcaccgccccgctcttatccttcgccgacaccttctcctagtccctcgtcatcgcggcacaccgccgccggcactgccactgcgacgatggcagcccaaggtagcccgggtgagaaattaggtggaaatagagtgaaatggctcaaatggcaaacaaatgtaagccaagtcttggcagtggcattttaacgatgccatttcggggaatggcattgtggcgaaacccactcttacagtggcagaatgtccaatttctctcttccgagcaggcagtgtacgattggcccctggtaggacatccaaaaagacaaaaaaaaaattaaccgaatacaaaggcaaaatttacacaatggtggtgtttgggatagtttaatctctctcacgaaaacataagttcctataataagtttcttccatcccaaacaccacctaactttaaaattttacttatatgacaccgtaaaagtaaatctttagactaacgtactaccgaaaaatgtatatttatcgaaaaacaccgtcatgcactattttcttctttgtgatttgattaggagagataaaatggagcaattgctcgtttgaccctgttttaatgtctaactaccaatatgaccctgtttttaggtttgctcatttgaccctgctttttaaaactaaagatcagagatgacctattttgtgaagatagataacggtgttaactaagagaaaaattgtcctttttacccctgctcaattaaccatgttaaatttggcatagttttaacaaatttgagacagatttgtctatcactcatttgttcattcttatcctctctctctctcacgagaccactgcgaggggcagcaggaggagcgacggctcggcggcggctacagttgcggaggggcaaagggaggagcggtggtggaggggaagcgtcgggccagcgatgaggagggccgtcgctggcggcaaaggagcggcggcggcaacggttgctgagggaggagcggcggttgcggcggaggaactgcggcgaggcaactacggagggctgacagctgcggaggagcgccggtggtggctgcgaaggggcagtggcggcttagcgacaccagcagcggcggtggaggggaag

SEQ ID NO: 18814 - DNA, 1145 bp, Oryza sativa
ggttggtgtactctcccgccgccgctgatggcgacattgtcttcaccaccagctgccgtcatcgccgctgaccggtttcttcgccaccacagttggtgtactccgccgctgtcgctgatggcgacattgtcttcaccgccggctgccgtcatcgccgccgactggtttctccgccaccatggttggtgtactccactaccattgctgacggcgacatcatcttcacagaccggcttgccttcactgccaccgactggtgtctctgcctacacggctggcctattatgccaccgttgttgggcttctacgacttcaccgtcggcttgcctctatcgctgccgactggtgtcttcgcctatacggttggcggactcagccaccgttgatgggcctggtcatctacaccgccggcttacttccgccgccgctgaatggtgttttcattgccattgatggacgactttgttcccacatcagccacctctgccgtcatcaagaggaatattacaaagctaagtcatcatttttccttatatgatattttccttatcctctgcctcactacatcaactggttcgccgttgacttgtgagtcgggggctacagatgttatatcatattttttaaacaattttcataatatttatcttgattgcttgcgacataatctgagtacaaaagtgccaatcgagttatggagttctatcttcctatacttttcgtttggtttgtcgatggatagttgcctttgggctgattcctagcacccgggggcttattggatggaccgagtaacgcaaggtgctaagtattattaggaataaatcaaaagcatagagataagataaatttattttctgctctttacaattacaaaagtacccgagtagtaaattctgattcgtgaaactttgttccattaatgatgaactcatgtcactcatatgcatgtttgggaagtgcctaggccgactcccgatgcttgtgggctatgactagttggacagagtgtttaaacgtacggaatcatctgctcggggaaatcaaaattgacaagaggagaaatacatatttataaacatttttaaatacttgaaatttcctcgagtattatatttacatcaaatactactcatcccatatgt

SEQ ID NO: 18815 - DNA, 794 bp, Oryza sativa
  unsure (1)..(794): unsure at all n locations
cccccgaaagacagaaaactgacatgtatcttgtactacatttggttaacctgaccgatccattacattcgacggataaaacaatttgagtttcctactaaaatgttttggagtgagacttaaagcacatccagttctaatgaacatccaaggagatgcaagcgtcttacagagtaatataagcagtataatgattgatgggctcaacttaagactggatctagatgtgtgtgaaatttcagttaaaggtgtcaaatatgaatccactctatataatgacagtacgacatattaggctatattcatgaagcagaatgtgtgatgtgccaaattgtcaaagtggcaaaagcatgtgccatggtatggagggataacacatgcaacaaagctaagaatgaaataccttctgagcgtgcatttgtcttcagagttttagtaaagacagacttttcaaaggccaactttgacgcattactagaccaatcatccgagaagtatttcacggcaacacgtttcccttcagaatccagaagcaaaatgttcttcacagaagggcaagattcctgtgtaacgaanatggacaatcatgaatcattacatgagcttgtgcaaaggacagaaaaagttacttaatgctgcatttcatgttcatcaacaaaagcatcattgcatggaaaaacaaagttaaacattgatagaatgaatcaaataagaatgctgattcagtaaagagtacaaaaataaaaataaatgatatgtatttttttttaaaaaaaacaataaactggatcgat

SEQ ID NO: 18816 - DNA, 799 bp, Oryza sativa
cgcggcgatggcggcgttgtaggccttgaggtcgggcttgatcccggcggcaccccgcgccccgaagacgggagaagagcgcgagcgccttgggcgcgtcgccctcgcggagggcgaggtggatgaggttggagaagagcacgaggtcgggagccacggcgtcgtcctccatgagtggcagaaaggtgagtgcgtggtcgaggtggcccgcgcgggtgagcgccgcgaggagcgtggagtacgagaacgcgttggcggcgacccctctgtcccgcatatccaggaggaggccggaggcgaggcggagcatccggcgcggcacgtggagcagagcaggaggttgtacaggatgaggagcgcggaggtggggaggtctggcgcgaggaggtcgagcagcgcgacgccgcggcacgcgtcggggaggcgggagaggagcgtgccgaggaggcgcggggagacggggcggtgcggggagagcgcgggggccaggtcgtactacctgcgccggctcgcgtcgtccgcgcttctctggctcgtcgtcgagtctggcgctgcgacacggccgctcctcctccatccccgagcagcgccgcctcttttgttcgccggaggagaagaagaaaaactgcaggagagagagaggggtattttggtcagctgaagtgggaaaaatggtgaaaatcttgtgaaatggtgaatatagcaaagcaacggtatggcatcggttggaaatgacattttaacgacgccattccgggaaatgtcattgtggcgaaacccactcttggcagtggcagaa

SEQ ID NO: 18817 - DNA, 585 bp, Oryza sativa
tatagtaatttcactccatattaatctctgaaatgcttataggggtatttacgaatacaaaattgcactcatagaagaaacgcaatcaatgcacacaccaaacaactcatcatgtatcgagcttatgatgatcagaattcataggtatttacactgaaagagcacacagtacatgctcaaggcagtgtgagggggaaaaaaggagaaaaaaaaaggcgatcacttcttgacgaactggaggccgttggcctgggagtacctctccatgaatcgcatgaacctgtcccactcccgcggcgtgcgcatgacgtacttggcctcgatgagcgccggcttgccgttgacgaacttggcgctgacgtccaccgactggagcacgccctcgtcgtcgatcatgtagaagccggtgatgtcgccgagctctgccgacgagtcgaacaccgacggctggtcgaaggtgaagatggccacgccgttggtgccgtcccgggacttggtcagccgcacgtccgggatcgtctgctcgtcggtgccctggatgaactggatcgccggcctcgccggcatcatcaccacctgcatcga

SEQ ID NO: 18818 - DNA, 893 bp, Oryza sativa
atgccatatgttcattcgggaagttgggcagaatttcagatgatctcatcaagacaaacatgtttctcaaagacttggtggcaatccatcggagaccaaaggagttttgaatgtggagctgacagtcggcagcaagactatccctacaacattttttttcatcgatgggaagggttcctatagcctgttgcttggaaggaattggattcatactaattgttgtattccttcgaccatgcatcagtgcgtgattcaatggcaaggtgacaagattgagatcgtgctagccgacaggtcagttaatgttgctagtgtcaatttagctctttgggagatggatgggattgattgcctgtctggaaaagtttgggatggagattttctaaaagtgtccgattgtgatatacagccaattgaagatggagaccccaaattattattttaagggcgtcgtgcagggttcaaatttctacaccaaggacacggtggatgatctcgatggcaaactgggacagggtttcatgtcggctgatggtttagaagatattgacataggcccaggagataggccaaggccgacatttatcaacaagaatttattggcagagttcagaaccaagttgatagagcttttgaaagagtatagagattgctttgctttggagtattacgagatgctaggactcagccgatcgattgttgaacatcggcttcctatcaaaccagggtacaaaccttatcaacaacctccaaggagatgcaacgccgatatgtatgatgctatcaaggccgaagtaactcgattgtatgatgttggctttatcaggcagtgccgatacactgagtgggtttcaaacatagtcccggtcatcaagaagaacggcaagcttagg

SEQ ID NO: 18819 - DNA, 1277 bp, Oryza sativa
cccggcccgagtgcggtttgatttttgcaggcattttgatcatcgttttcttcataaagaaggagatgggtttgcatgcaaacttcgtagtttaactcagtttttttttcctcccgaacggaagacattcagtttttcacacaaacatcgtagttttaactcctccaaagagtaggtttgtcattgcgtcttcttttttcccctcagatttggtagtgataataagttgtcattgttttgatccaagggatagaattcagttagacaaaattgaactataacaagagcatgtacttgccatttcgttttttttttcaattgagggcatgcatgcacccttactttgttggtttgagcctctcaactattctattttgtgcaaccaggttcttttatgcagcaaattcttgctgacgtgttatatcatctcttagataagaaattacacattctccatcttcaccaaagagattacaaattctccatcttcacgatgttcaagccgacttctcctcatattcatgaattgagggtgtgtttggataatgggaaatgagaggtgggattgggattaggaattgaatgaagggttaggattaaatggatgagggagaatgaatggttaagatttaaagaggggtgggaaatcatttcccttagatatttgccaaacactgcctgagctccaatttaaagatttctccatcgtagcgtaatcccgaaatggattcagaaagttcagatatatagttgagggttttggagtttttgacagcgacaaaataggatcgtatactttaactccacaatagtccttcaggcctagaaagaaagaaaaatggaaataccattaattagattagaagtagggcaagcgtattagggctgagctacaactcctaatttttgcttcaggagttgggtctagagtggaattgtggagctgcctaaacccagctccatatctctagtatattttgtaagagagctccactcagctccgctcctattttaggtggagctgaaactgtttggctgagctacaactccaatagaggtggagctggagttgaagctgtgccaaacatagtatttgcataatcaagagatccgaaatacgtagtaaaacttactccatctcggcaatttcgctttacacgccacaaaggatttgtgttccaaactccgtattgcaagtctttgagccctagaaaaaaaaaatataaaatgaaccagcaaagtcaaaaataagtaggattcgagtgtttgcataagaa

SEQ ID NO: 18820 - DNA, 2032 bp, Oryza sativa
gtggattgaagtatgaagtacctgctgatgcttcatgatcagcaaaagaagaatgttgactcattctcaagccacttgtggtatcttgatcagatacgcttactgtgttagctgttgaaagctgttttacttctgtagttttggctctaagtgccgttggcttgatagcttcaatgaactcaatttttgagcttcccgaggtaaatatatatgtcctcctccttttaggatggattaaagcatctgtatctagtgaaagaggaatatttgagtcatttgtaccagatcttgtgattacttctgacacctcatgatctatgtctctttgagtaatcccactgctgatgtttctttttgctttccctgccatctgtttcgtatacttcctggtttgtgatgtgtttgtatgagagactgaactttcaccattttcccttactgtatcatctaccttgatttgcttgtattctgttgccactcctgatctgtgacgcaagaagtttacctttctcttttgaattggtgaatgaactgcacatgtcttatcaactttggttccttttgtcatatttttaacaacagaatcttcaggacgttcattctccttgacatcataactgacagttgaagcattgaacaatgcttccatggcttcagctgccatctgagtatttggcccaatatcatattcttggtataaatcatcagtaccacaaaatggttccgttttcttcagacaattagtacccaagtcctcatcaatgcattctagtatgggccaagccctggtacttgatccacagccaccgtgtttcacttgattattagcacgatctactgtattttccatggaaataatactggttctgcaatcatcaacagtgggggtatcaacccagtcaaaatttccagccttttttagtggggaactgcacctagcccttttggccaggcattgagctatatctgaacctaaagtagaagctgactttgccctcgttgtctggtcgatgcttatttgctgataagtttctatatcatcttctactagcagcctatccacaatgtcaatagcgttgatctgtgattcatcaccaggctcctgcgaactaaggtaatccaactttgcacatccgcttgcagaagtcatcatgtgcatgctgtaatactgaaatagacagaaaacacctgttatgaacttgtaggctaactgtgaatggtgttaacaacatggagttgatcgatcatggcctaaatgctgagtagacaatacttgaaaccaagagctggaatcttctcagactgaactgtgtatatgagaggaacatattttaagatgctacagtttctaaatcaagatacacataccaaaatatttatgcacacggaagacagaagtgtatgatcataagtaaaataaacaacgtttatgggcttgtttgagagctaggggtgaaaaaaaacagggaagaacatccacaggagggaccttttgggtgtcacgggatccccttgggaaattccacccaattgtttggaataaaaagagccaacaaaaatccctgccttacaaaaataaacggaaaattaagaaaaaattgcaaaatccaaaatcttcttggcgcgggtggtggtgtgaccaggcattgagctagacagctagtgaagggagggggctgccgcctagctcaccaacagagggggcaaccgccgtcgagctcatgaatggaaagatctccagatgcaggtagtgacagcagttgattagatgcggcaccggcggtcagtggttgcaagctaaacgcgggcgagagcgagagaggcagcaagatttatggtcggtttttagtattacagttgatgtggggttcgtaccaactagaaagagccaaaaaaaaatgttggattctgattcatatcagacagtgtattcgcagaagtaatgcatatgcttattgctattggaaaaatggattttatgataaatttggttatcacccagtccaatatgtaacagacgactgacgaatac

SEQ ID NO: 18821 - DNA, 737 bp, Oryza sativa
gagctgggaagctgtgaaagcctcgcgcttaaggtgctcgatcaattgccgctgagagcgcacgcctctgatttcgctgctgaattacggctgttggcgagaggagacagatggtcgggagcgtgcacgtgaatggatcggtgaacggcggcaatggcaccgaggagaggctcgacgagctgcgccgcctgctcggcaagtccgacggcgacttgctgaagatcgtcggcattggcgccggcgcgtggggcagcgtcttcgccgccctgctgcaggacgcctacggccgtttccgggagaaggttcagatacggatatggcgccgggcggggcggtcggtggaccggaccaccgcggagcatctgttcgaggtgatcaactcgagggaggacgtgctgaggcggctcatccgccgctgcgcctacctcaagtacgtcgaggcgcgcctcggcgacaggacattgtacgccgatgagatactgagggacggcttctgcctgaacatgatcgacacgccactctgccctctcaaggtggtcaccaacctgcaggaagctgtctgggatgctgacattgtggtgaacggccttccatccaccgagacgagggaggtgttcgaggagatcagcaagtactggaaggagcggatcagcgttccggtgataatctcgctcgcaaaggggatagaagcatccttggacccaattcctcgtatcattacgcccacgcagatgatt

SEQ ID NO: 18822 - DNA, 1958 bp, Oryza sativa
ttcctgcagccctgctttccttaattattcaaagtaaacaattcttctgttttgttctttcacaaaatttacaatgctctacgatggactgttgccccacattcctttcactggtttggaagattcagaacaggaatggtccttcaatctatagttaatttcaataggcacatgtcactgccaccattttcatttcctttctgtagattcaagtaactaaactgctttcgtttcccacttcttcagtgcaaaacttgaagaataagatattttttaacggtcaaaaaaacttgccacatactccaattatacttatttcatttcagctgaaattaatgagctcacataaacttgccacagtattatccagagaatgtcaggacaccctgtcaatgtagctcaccgaataaatatttctccgaaccggttttacttttccctatcgatatattttttttcgcaacctatcgatattgagaatttggtcagatatgtagccggagtgcccaatgttatgtgcagtcatagaaaacacctgttttgtgcagtcataaaaaacatcataaagaccttttgtatgagtgttctgaggtcatacaatactgaaatgatcacagatttaatcttaagcaggctgtaattcttaagcatagttgaaaagctgatagggaaagtgataagcaaataattcaacgtgtagcagtcttcagttgttactcaatcaagggttatacaagctaacgtgccagtataattctaatttgcaaccatagaggatatcaacttcttcctgttgatggtggcatgtcctcaaattcaggcaactcagtgcttcaccaagcagcaacagccactcatataccaaattagacatttgcaaccaggttctcatatatccctgttcagatcagaactgctgaatcatgtttcattttagcacagcaatttccaatcaggttcacatttgaaattcgtaagaactttgaaagaacctataagaaaataggaaaacaccaacatgactgtagcagcccaaatttaataatcaactgtatgaagtgaattaggagaattgcagcctgcatcattcagtcattagacaattgcggagatcaaaatttcacacagcagactgttaaaatgattaacagcacagcacagcagaggcatcaggcatcatatcaatcgaagatatagtaacagagatcacaaccttcatgggttaggaaaatcagaactgcaagtctaaaatattggcatcatcagtatcaaatcttcattgcatctcatgttatggtaacaaggattcatggctcaatccttactcaaacgtgttgccaaatttagaaggattaccggagcagaattaacagaatgctgaacaatatgcacaaaattctacccatcccgatgcacatgcagtctcacctgttccagttgtttgattgcttgcgtcttaaaccattcaagaaaggcgacgtatgggggcagatagaaccaagtccacggcgaggagtctgatggcggctctcgcggcgggcagcggacgatgccctgctcgcagcatctgcccgtgtcgccgcaggggaacggcccctggacctgctgcgcctgcgaggtcgagctccctgcgccgctgaaactcacggagtcatccaggaagtagatgttgggagggcactggctggatttcctcatctcgacggcgaaggagcagcctcgcccgaggaagatcgtctggtctgcgagggtgtccaaggtgagtttcttccaggacggcggcttcagctccagcttgaagacgtcgaacgccaccgtggccttctccgtggagacgaacctgacgaccatgagagatgcccgcgggattccacgaggtagcgggcgagcacctcccctggctccggcatggtgggtcggggatttctgcggagctagtacttgttcacgggctgcag

SEQ ID NO: 18823 - DNA, 661 bp, Oryza sativa
ggtcggcggccaaatctacgtcctcggcggctcccgcttcgacgcccggagctatcccctcgacaacccctccccctccgccgccgcctaccggctcgacctcgccctctcccgccaccgctgggagcgcctccccgacatgcgcgtcccgcgagggagcttcgcctgcgcccccgcgcccagcggcggagtcatcgtggccggaggtggctccaggcacccgacgttcccctcctacggcagccgcaccagcggcgtcgagttgtacgacgccgcagcgcgcgcgtggcgcgtcaccgcggcgatgcccagggaccgggccgggtgcgtggggttcgtcgcgcacggggcgggggatgggagggaggatgagttctgggtgatgggcgggtacgacggctacaccacggtggggggagtggtgcctagtgacgtatactgccgggacgcggtggcgctcgggctgtggagcggcaagtggagggagattggggacatgtgggaggaatgggagagagagcgccttgggccggtggctgtcatttctgctgaagatggaagggtcacagaggtgttcatgctcgatggtcatgatatcttcaggtcagggattttgttcttttgtctgcacaattgtttttgcatatatgtttgtgtctgc

SEQ ID NO: 18824 - DNA, 1483 bp, Oryza sativa
tgcgcacgtggcagtttcaacgtagccacgcccccttcacatctcatacctaagaatcctgcaatttcttttagcatatttccattttgttggtccttactgaacggcttccttttccccctgagatttctatagaaaataatgcgaatgtgaggtagcttacataaagtcgaaaacaatatcttttctacctacacttcaagaaaaagtagggggggaaaaacacagtaaattccgtagtaatagcaaataaatgggccttacatagacggcccagcccatttcaacagtaagatctccaccgagtcaataaaacgcagcgcctcctctcctctactccgctccgccgtcgctgttgctctctgatccctagggtttactttcccctcctcctcgaactctagggtttttccgctcgctctccgccaccatgacggccgccgagacgcaggaggagctgctccgcaagcacctcgaggagcaaaagatcgaggtgatccgtccactcccagcttccctccccccgccgctgttgccctcttcttgtgtgatagaagtctgttcaagaaggatacgatcttttaggatttgtgcgactttagatcggtgggtttggttagatcgtagtggtaaactgccggatctcgtttgctgctgaggttgcgcggcttttaggtgcgagatttgggtggcgaactgagtggttgttggagtgtggatttctggggatcctattgtcctctgcgatcaggagttctttttttactttatggggattctcgttgatgaactctgttgacctctgcaatcaggagttattttcctttcttggaattctcgttgctgtaagtctataggcctcttgcgtgctagtagtagttatgtgctccatgttgtttggcgattcacctatgaagagagatcggtacttctgctttcatggtactcctgtattaaggattacaagttctaaattgattatgaacatgctgaagctagattaaaagcgttataattgtttagcaccctgaagctagattactgctgtttaactatagtgattgttacattagtaacttgggctcatttgttaattagattgttactctaggattctttgttttcctgctgcacaaaggtacaagcctttctcttttactcttgagaaaagtccttccttttatgcatagcatgcttattttcaatttggaaatagcatacactggcgtgaatactcactattttattctgcatgtggcttggtctgttgtgggttatggccctgctttgcagggcatgtttgttacttgacagtcagttaaagaaaatgtcattttgcatgctttcagggagatgagcctatccttgaggatgacgatgatgcgaggatgatgatgatgacgaggatgacaaagatgatgatgtagaaggtgtgttggaatccatccttagttattgtaatataaaggatagatatatcagg

SEQ ID NO: 18825 - DNA, 1171 bp, Oryza sativa
tgctctctttgtaaccgcagcaatccatctcctcaacgaatcttcccacttgccctcttattcttcttcccaccattccaatcggatccaaaagtcaccagaaactcctcctcctccccctccccctcccatggccaacgcgaacatggtgtgggcggagctccccaaggaatgcctcgccggcatcctccgctacctcccttgcctccctgacaaagccatgtgctccggtgtctgcacacaggggcgcagtgtcgcttctgcgcacctgacgcctatgcaaccgtggctgttcatgccgttcgccaccgtgatctccttcttctgcgtcacctgcgagcgcacccaccaccaccagagcccccgcctgccggacaatgcccgcagcgcgcgcttctgcggcaccttcctcgagtgctgggtcgccgacgccgagatcccgtatgatgagcctctgccgtggaatcgtttccccgctctgctcaacctccgcaccggggagcgcgtcctcctcccgagacacctccgcaccaacaaccctggttccaccgccatcaaccgcatccaaaccttcgtcctctccgattccccatcccagacttaccggtactgggtcgccgccatagtgtccggcaaacccaacctcatgttctggagcaacaacatgaacgaatgggcgccgccgatgctgaagtgggactcggggttcaagatttggcagaagatgctacccaaggacccgatcgaggacgtgaaatacttctatggcggcccgctcggaggggggttctatgttctcaacaataaggaggacctgctggtgtacacgcccaaggccgacgacgaacacggcgagctcacgatgtcgtccgtgaagaagttcgaggtccggaggaatccccgatcgaccatgccggggccaggggaggtgctcggccgctacctcgtggaatcccaaggggatctggccatggtcgtcaggttcgtctccacggagaaggccacggtggcgtttgacgtcttcaagctggagctggagccgctgtcctggaagaaaatcaccttggacgccttcacagatcggaggatcttcctcgtgcgaggcttctccatggtcgtcgagatgaggaacccctgccttcccagcatctacttcctggatgactccgcg

SEQ ID NO: 18826 - DNA, 1112 bp, Oryza sativa
ggggtaaagatagaggaggataagaggaatatttcccctcaactaattttagaaaaacacaaggggaaaggtcagatttggaggagaaaaaccgagccaatcggtctcagttcggctgctagaggtagaagataaacagtgtcgagggaggcaaattagactcttcgtcttgggctggctgaaaactaagcaaagaaagaaagagaagggggaaactcggctgggccgactagggctgcacggccgtgcacacaaaagagggagatgggccggaaagggcccaagactaggaagaggattattattacttttccaattaaattaatcaatgaaatgatctttgaattgttaaaaatacttcctatgctcaaataattccaagaaaaatcttgaacatacttggacacccaaagtatttaacaatattaagaccagaccatttaatgattaatttaatatgtgggtaattactgaaatgctctttgtatgattaaaaattaggaattgagctccaaaaaatccgagaatattccagagagtataattaaccatggagaatttaataaaaaattaaatccatccatgctttatatttaggaaattttatttcccacatttaacttcacttgtaaattaatgaacatttaatataaattctaataataatttattaaataatttataaatcctgaaacaaaaatcaggatgtgacaacccccggggggacctaaggatcgaatctcatagccaacacaacgaccacagcctatgaagccggaaactacaggagccaagtcgctgggtgatctagtcgaatcaactcgactacaatctcgtcggtaccatcgagttctattattccctttgtaatctgtggttctctccatataatcccatatcaactggattagggctattacctattaaggggcctgacctagtataatctttgtctcttgtttccttgatgtcgtatacgtagatcctcgtaccagcgtaccccaataccctctatatccggtctacgggtaccaccgtcgacaagacttattttagctatacatatgtaatagcccaaagagaagggacgaaaaatagacttattttaaaaa

SEQ ID NO: 18827 - DNA, 781 bp, Oryza sativa
tgtggtgccaaaatcagaagaagacaaaaaaaaatgaagaatgaacagaaagatttgagtatgggaaggcgggtttaccatcctcaaggtgacaatgatcgaagaaaatgctagagaatcaaatggtatgtcatccaaggcaaaaagtgcacattctagcgattcaggtccaggtgagaagttgggggtcttcaatcttgctcggaaaataatgtaactctactgcatgtcatcataacaaacaagatcaacttagtagagtattgagctatcatggagactctgacaatgctaatttcactcacttggccaatcagtggaatatccaactgagcaaaaggtgaaagtatctctacatctgcacaagcttcctccaatgtttcccgggaggctccttccgctgcagactctccaacctccaaataaccagcaggaagagtcctgttgatgcaaccttgattaggattatggaccaaacaacaagcaccaaaattgactgggaatgactgcctatgctttacaaatgactgggaagagacaaaagcaatctcaacattgttgcattagaaaaataggaaaaaggaacaccgttttacatactagaatcatatcagtcaccagtcgatgtgctaaacataaaaaagaagtgtatttaaactggattggcaagagtgaaacaaaaactaacactataatgtaaagaactgtacagttttaaactgaattggatacagcgtgcatgtactaaattgattttgattattatattcatactcaaaat

SEQ ID NO: 18828 - DNA, 986 bp, Oryza sativa
tagcacccaagttgtccgagttcgcgacaaagacatactccttgccctgagaagaatgggaaaataggtaagcacacgagtatcaatatgcaataaagaactcacatatttttagtcatagtattgcattcattttttatgattgttagccccaaaaggtgatgtcatagtttggttactatttctttggaaaacatgtttttattcctctaattttctcaagcaacaagattaatgcagtttcaccaaacgtgaaatggcaaagaagctgtccgtgtgatgaataagcataagcacacatcacacagctcagtgtctgtatctttggagtgtggtgcatgactatgtgcgcatgtttacaaccaatttgaatcaagtagtgatgctaacaacaatgccaacatgaaaggtcaaagcactttagctaacctgtgccaacaaggtatcaagttttccactgttattcaaggaggggaacacatcaccatggcctgggggatacctgcacattcaaaaactggttattcagatttagggaggtttgatctgctactataagtggttatagtcaaatgtataaaccaaagccattttggaataatctgagaatactaaccagccatccttgccagtcttccccttgcttggaagtggcaagaagtcttcagtaacaatgcgaggatattggctctgcatgaaacacgattatgttaattaacaatcaccatggtgcaaaaatgcgacaaatcagaaacatagcacagaagcagctctatacctggttgaaagtgtgaatttcaatgttggagttggagtacttctcaacaatcttcagaaaaaataaaaagccgttagcatgcaagttggcccaaatactaaaatcctagtacatctaaaaaaaattgaagagaaataacaaccttctgtgtgtcatcatgagtgttgaatgagttcattataagcaaagggacattgcatccatactt

SEQ ID NO: 18829 - DNA, 594 bp, Oryza sativa
cgtgcgttaccactttcgtcgtcactacttccagcgaggaagtcgtcagcgagggggtcgtcgtcatcttcctcctcctcctcgtcatcgtcctcctcgtcgccgctgtctcctccctccaaggaggcatcgtcggagtcggagagctcctcggcgccggagtccgagggggcgtcgaggtccgaccctgactcatcctcctccacctcctggagccgctcctgctgctgctccagctcggagtcgtcggaggacggctcgagcagctcctgcttcttcttcggcgccctcttcgccgccttcgggggggccttccccttcttcgccacggccagttgccgcgccgccggcgccggctgctgcctgcgtggcgcgcccttcttcgccatgggaggagaccgtcgccgcgtgggagcggaggcttgccggcgaatggggaggagaagggaaaaaaaaaaccctaaaaccctagccgcgagaagcgaggagaggagagaccctcccgttttaacgctgggcctccgcgagaacgacctcgccttccatatgggccgggccggatcagcccatcccagcttcgcgaagtctgattct

SEQ ID NO: 18830 - DNA, 1198 bp, Oryza sativa
aagtgatatccccaagtgtctcaattagaaaataatgctttagtagatgaatttacagaaaaggaaattaaagatgcaatttttaaaatggaacatattaaatctgtaggtctttatggatttcctgctgagttttatcaagtgttctagaatgttatcaaatctgatttggtagatttatttaaggattttcatagtgaaagtctaaatctttattcactcaactttggtactattattttactgtctaagtgcaaagaggctattaagaatcaacaatataggcctatttgtttactcaatgtcagttttaaaatttttactaaagttgctacaaatagaatttctggagtagcttagaaagttattagtcctacacaaacaacatttatatatgggagaaacattatggaagggttgctatcctccatgaaacaattcatgaattacataaaaaaatgaatggtgtaatttttaagattgattttgagaagcctatgatatgatagagtttaatcttgtcattaattagaatatatgcatggttctattttgtttacatgtagtataggtcactgcatatttagtttggctccagctcattggcgagatgccgacgtgccgtgcgatgcggtggtgcgagaatggagcaaacaacgttcatgaagaccaagctcaactgcatgtggagtgctgcgagaagtagccgaattgcaagcaagacaaggtcagtattagccgagtgaatcggtcctagctgtacatgagatttagttgttgctagtgattagccgcatatgctgcgattagtggtaatcatgtattgggatttcttggcaaataagtaggattagttagttacttagtgcatgggcatcccacgtctgtgtgcatggcgtgagttgtggctgagtgggtttggccattgtaatctctttgcatgtactgagtctatataaacaaggaaacgatgtgagctaggggacacatcaaccaaaagcctgtgtgttttgttcagttcttgtgtgtttgtgtccaccgagtaaatacaagtgtttatgttagtgctagtgattagtacttaaacattcagagaggagagattcccaacaattggtatcagagccaatttatgcccaagatcctgcgcttcaacaagatgtccatcgtcgagcactccgcgtcgcgatcgatgagg

SEQ ID NO: 18831 - DNA, 997 bp, Oryza sativa
gagaatggagcaaacaacgttcatgaagaccaagctcaactgcatgtggagtgctgcgagaagtagccgaattgcaagcaagacaaggtcagtattagccgagtgaatcggtcctagctgtacatgagatttagttgttgctagtgattagccgcatatgctgcgattagtggtaatcatgtattgggatttcttggcaaataagtaggattagttagttacttagtgcatgggcatcccacgtctgtgtgcatggcgtgagttgtggctgagtgggtttggccattgtaatctctttgcatgtactgagtctatataaacaaggaaacgatgtgagctaggggacacatcaaccaaaagcctgtgtgttttgttcagttcttgtgtgtttgtgtccaccgagtaaatacaagtgtttatgttagtgctagtgattagtacttaaacattcagagaggagagattcccaacatgataaagtgtagtggtctgttgttcaacaaactttgagaatggggggtttttcgcaaaaatggtgtgattggattgcttctttcattcaatggagacatgttggtattaaagtaaatgatcaagtgagggtaaattttcaaacttgtaagggtttaaggcaaggggacctgttatctccagttcttttaatatagttgttgatgtgttagccatattaattaagagaacaaaagttgatggtcagatttatggagttgtcacacatttggtggatgatggtttatctattttacaatatgctaatgatactattatttttcttaagcatgatttagagaaagcgaagaatatgaaattgttattaactgcttttgaaaaattatctagcctaaagataaattttcacaagagtgaattcttttgctttggccaggcaaacaaatgttatgagcaatattcaaatatttttggatgacaaataggagactttcctgttaaatatcttggtatccctatgcattat

SEQ ID NO: 18832 - DNA, 7108 bp, Oryza sativa
tgtttatgcgtggaatgcatgaaaagttagggctcttctctcttcttttcccccatatccatcagtgatagccataaagtattccttgcttccatggaccatagctactttacaaagtacattagaaggttttctcagttctctaatgggtcacacatggttcacttttctaggtgctcttgataagacaaatttaacatccaattcttggttcatgtcgcgatgatgtgaaatcctacaacatgattgtacaggggttaggtgcgtcatcgtttcatgatgcagagtataaaaatctaggtcagttgcatgttgatgctaccttaaagcttagacatccttcagtgtggccctgtgtagtgtcgtggctttacactttattctccccgtcaacctccaactttactcactagtgaaaaccataactgaacatgaggactgatcccatgtttattgtaaattagatcaaagtgcacatagtgatacatattgtatgtccactcttaaatttacattagtcgtgttcgaagactctgcattagttgaactgttgacatttatattaagtaaacatagagttcaaccaaaaccattggtgactgaaacatagtccgatttcaaacaagtggaatcttgaaatagcaattcagcaactaccttaataaaaactgctcaaaagttatggggttgttcagattgatgctattttcaaccataccattttttggtaaagttaccaaaaaaaatgtctacgtttagtttgttgctaaatttggtaaatacataagaaaattttggcaatattgtcatcttgccattgccaaaatttggtaaggtttattttggttacaatctaaacaagccctatgattgatggtctaagagaaatcaatagcagcataaattcaagttgcaatttttatactgttccctgccgaacttgaagttgaatcctcaagaattttactctaaatttgtttagtactgataatgaacattcaatccaaattgaaaatatgcacatgtaaattagcaaacaacaagcgtagaatgtagaagcatataatccattaactttgtaagattacagctgtatattatcagtaaacagaaaattaaagaagcaccttacttcggttcactagtgcgctgaaataatttttcatccacattgttgaacttgaaatctccccatgattccaatgtagaaaagtccaacctgtgcaaaaggaaataaagtaatttagatcatttattcattttcatcattttagttacaggactcctatgcgctatgtcggattttcaagaagaatgtggtgttgggtgaatttgacaagaaaggggagtgcagttcatcacaggctaaacgaaatgaaaaagttacagatgtcggggatgctggacaatcctcgggagcaaatgagaatgataaagacaattcatggatgcaattcatagcagaggatctatggtgcaccaacaaactaaagtgaactagaaaactgagagaaaacagcttgttaacttcatctaaccagatatttcggtattagttatactgcgtgtatcttctgtatatgtttgataaggacacttctcactttgcataggaggaccactttaagtttggatgctggttcttaaattaggtttatacttttgttcctttagtactgtataatatatctaaaattgtgctactttgtacttcaatcttcaattaacatgtacctatcatctaatgaaatgatacaaaaggagaaatccaattttatatatccaccatgtattctatggatatatgtgcaatgtgaccaatatggattaagcaatcaccatatatcactaataaaagaaagttaaggatggttcagttttgaaaaatcaattgattttgatattccggctaacaaaattttacggtattattaatggcaaattccatcaatgtaataatgtttatgtttcaaggttcttaagttgcacaaattagtataagaatgtggcaaccatgctcacatctaacagctgctaggacctattcagcctaagcctgatacaatttccatgtagttttctagtttttttttttttgacgcgatacagttttctagttgcaggctgtaagtatctgtttgggcgatcttttattctcagagtttaatttagatcaccttttacccaaaaatcttttcactttggactaactaatattgcgactaccccaactctattctcgagccagagactgcaataagtatgggtaactaaacccagatatataagcctaacctttcggactccagcccagtactacagtgttttaatcatatatgtttgaagatgcccacttagcatttctgatgttttttttttcgcgaatgcagcatttctgatgttgcattcaaccaaagaaaatcagctgcttcaagtttttatcccaactaatttaaagttgcagtaatttcctcaaaattagtgtgtgctttcagggattagagtccaatcagtagagcatacatcaattccagtcacgaattaaagggtaatcatatcaagctttagaaaaagacccaaatctagcgtgagaaagtcacaaagcaaggcaaagcagatcaataccggagggaccagccgcacgaattccggcccaagggtgaggactcggactcgagcagcccaaggattgcagctcgtcgcggccacgcccaatgcctcctcctcctccaggcgccgcagcacgatcacacgcttctctcccgtagtctcatcccagaggcgaatacctgaggcaaccacgaatgttcatcagaagcggtgcatttggtggatgcgcagcggcggcggcaatgggggaagaagcccatgcctcccaggtgctcgacgaaatggcgaggtggggataggtttcgggcgcgtacctgtgcgagcgggctgcgccaccggcgccggccggacgatgagcgggatcgtcgccgacgcggctgctctcccttccctccgctcccatggcgagagatccgtgctttcgacttgtctccttccccttcatctgcgctctgtggcgacgagtcggtgggttggaatttggaaaccgactcgctgacccgcggtctcttcctcttcccctttgaataattttgaaaataatgggtcctctttcgaaattaaattttaaaccaccttcaaataatctgaaactgagtttaggtgttccaaaattcaaactccaaaacccaagcgggaaatcataaatttagcgctcgggatggttccaaatttccgatcgcgcgcactgaatttggaccccgcgtcaaccacattgcaagatacctcatcacctcaggagattcctacatgaatatgggcatttccgcggttccgccccccaaatcgcagcgggaaatcacaaattcagtgctcgcgatggccgatggttcgaatcaggtagccaatactgaaaatcggaccgtgaaaatccaaatagggagcaaatcagaaactgctcgtgctcttgaaatttcaaaatcgctcaaaacaaattgggcaatacaggtcaaccagtgtcaccaactagaacaatgcaggttgcaaaacgttcacatagcacggcaagagattgcaactgaatttagagggtaaatcactgcagatttcctattccattcgaacgaacgaaccagtagttcatacatccctaattaatgaaggaacaggagacgagatgaaacaacagctacaggagaagaggctaggctactacgacgaactgaagaacatggcactaatcgaatccctatccaatcgcgtggcctcgcatcgcctcgcctagccgccgaatccgtagagggtgcggccctggcgcttgagcgcgtagacgacgtccatggcggtgacggtcttgcggcgggcgtgctccgtgtaggtgacggcgtcgcggatgacgttctcgaggaagatcttgagcacgccgcgggtctcctcgtagatcagcccggagatgcgcttcacgccgcccctcctcgccagcctccggatcgccggcttcgtgatcccctggatgttgtcgcgcagcaccttcctgtgcctcttcgcgccgcccttcccgagccccttgccgcccttgcctctcccagacatcgccgccgccgccgctcgccgccggtcgcgaggaagaaactttgacttggtgaggagtggttggcggcggtggtgatgaggtggggaggaggaggcgtgtgggggcggggctttatagaggcgtgggtttaggggaagcgatggggggcacgatccgcgtgctgctggttttccgccgttggatgggagatggacggcggggagtgggggaggtgggggttgcgcggatcggtgacgtggcgtggtggtgagcgggaggtgtgtttcttttgtgaggatgtggcgggggtgcgggaattcgagcggggagtgggctcgtgttgggtggatggcaggtgggccccgggtttttgggtggcgggtctgcgcgcggtctagaaatttcggatgggttctatctatgacaagtgggcccatagttgggtgccatgaggttagtaaaatacgtttctgtagtttgaaggcgtaaaaggctttgagccaaaattatttgtgagatgaattaagctggccatgttaggtactcctatttaactatgtaagtcaaccaaattaaatttctgaagacttgcaaaagcttcacaatgcatttgtgactgtaaacaatcgtgttctcttctctgacaaaaggttacaggtaataagacacgtataaaattgtaaaaggacggcacgaaagaataatttgcatatgccaaatgagcgtagctctactcatcatgtttcttttcctgaaaccatcccacccgacatctacgctaggggcctgttcactttcatgcccgacatctacactatgtcaaaattttagtatgatttcttatatagttgtcaaaaattagctacaaaataaatgtagcaacttttttggcaactttaccaaaatttgataaggtttaaaatagcatcaaaatgaacaggccctaggtgtatcattgtcactcctacttataatcggtgttttaaataacgagataagatatttagtagttgaccttcccaaacaactatagcgggttaaatgaagttatagcggctaaattatacatgggagcaaatggttaggacccttctcaaacgactatagtcggagatagcggtaattatatttttgtatggtatttcatgtatggaaaatgcagggattaaatagcacaaattataaagtacgttgattttttaaaaaataaaaattataaatgcgaggctagtccagttggtacgtgctgatgcactaagatacagactttgcatatgtagtttaaatattctaacttgattaagatatggattttaacttggttttcgttagcatgactttcgaaatgctaacgttgtattccgtgtaaaaactttctacatataaattgctttaaaatatcaaatgaacatatttttaagttaaaaaaaataaaacttaactaaccctgtgctaatggttttctcgtttgtgtggcatcacttaatatctattttcatcagatttaaacagggttaaccaagcatgacgaaccgatgaggtcaacaaaatataatgtttaagagcctgggaagcatatctacgataacccataagaaaaaaaaaacgtgaccttattcctaggcaaaggatggttcacatcaggtggtctagtgcaaaccgcttccttttacaaggaatagaatgttggagaattaggctatgtttgaaatgatgtgataataacttgtgattaactgaattttaattattacaaaattaaaaaaaaatggattaatctgatattttagaataattttcatatagaaaatttttgcacgaaacacaccgtttagcagtttaaaatacgtgccatgaaaaactaaaacttttatctcgaacagggccttaatgcacatgcttcctatggagtactcccttcgtcccacacagggacggacttaggcctcaggccacgtggcccaggaaagaaacattatcaggcccaacaaattctcaaacttgggccaaaatgccatgtgctagcccgggtctcgtgagaaatctggatatgtccctggtccaaaaaaacgaatcttgataagtttctgtctagatttgttttactatgatatatcacactcagttataggtttgttttctgtgagacggagggagtaagttctaaatgtggtatcttttttttaaaaaaaaaacaaaaccatgtatgtatttaatagaaagctattataactccgatgtagacttcacagtgtttgatttgtttgtacccttaaataattatcatataatcattcatctatttgaaacggtaattatacccttgaacttgattaaaagttcatgtagcacccaaaactttaaaaacatccatccaacctcccaaattttattccattcatattcatataatccactatggtggttttgcaaagtgtttttttttctaaattacatatatattttttaggagtttaactacatgatatacacattggtatcccattttgcaaagtagtcctttttgtctaaattgcatatccatttttcctacctccatcccatattatagctacttatatcatttagattttgtcagatgatatagctacttttctatccaaaccaatcacaagcctccctcattttaatatcaccatgttacttaatttcttcaaaatagcattcataagtcactataaaaatgagacaaagggagtacatcagttctgttaacatgcatacaaacatgtgtataagtgaatcaaacatcgccctcacgccaatttcactacaaaattcctacgacactctttggcatgcaacgtgtagccttcaaagaaatatccatcggtatcactcgacatcgtccattgttttttctatccaaagagaatttattcgaagtgttggtaagatagctacctacttcattcaaccatcatggatccaacatacaaggtgaccaagataatatcacttttt

SEQ ID NO: 18833 - DNA, 1005 bp, Oryza sativa
gacaagctcgaccagatcaggtgcgagttcatcacactccacttccactggatctacccgcgcgatcgtttcgtccccattttttttgtgctgattttttctgtgtgtgtgttttttttgctgttgtttttgttgcagcgagaacgagaagtccgggttcatcagcctcgtttcgcgctacctcaggtgagatcccgtagtgtttgcttcgattgatttgctgcttccgcggtgggttttgatggtgatggtggtggtggtttttgcagcggcgaggcggagcagatcgagtggagtaagatccagaccccgaccgacgaggtggtggttccctacgacacgctctcggctgctcccgaaggtactagcgtctcgttgtgaattgggtgatctgagatgctcgtgtggtggttttttccgaaccgatccgaggttcagtgactgtgtgtgaacactggatcatgtggtgatgtgtggatgtggtgcagatctcaacgagacgaagaagctgctcgacaaactcgtcgtgctcaagctcaatggaggcctcgggacgaccatgggctgcactggtcccaagtgagcacaattccatcccatcctgtttagaacttccagttggattgattagatcgtatatggccgtcatgctattcatagccagtataaactaagtcttacaaagcaaactagattttctcctgcttgtggcgtttacaatgatactatagtatggttgcctgctttgagtgatgttgatattgtactttgttaatttggtaactataaggcttgctcacgcatatgcaccaatttgccaaaaccatttcaaagttgttcagtgtgtttgatcagatcgtgggaaagtgtgaattatgtgttggttttaatgccacttgcccctttttaaattctacatgttattatattatatgtatgctcttctgtctatgtctcttagtggagttctcaatgttaacgatatggaaggactcaatattgtaa

SEQ ID NO: 18834 - DNA, 6092 bp, Oryza sativa
cctgcagcccttgcatctaagcttggggtaggcagccactcataaatagtagcttttcatctccctcaacacaaaaaccaagtgtgcgaacctaatttctatgttgtaatttcgcaataagagtaacttcgttcctgaattccttcgttccttgttgagaattcctgcttaaccttttaatagcacttactgaccccctagcattccctttaaattgtgagaaaagaaattagatttgagcatatgacatacaaaataaattattgaataacctagaacatataaaaggaagctactaccgaatgatttaccttgtagacttttccaaaacctccctgaccaattttgtatgcttccgaaaagttgttagttgctagagcaatatcctcaaatgttacaaatgggaattcaagatcttggacaggatttccttccccaacctcttcagctgcactcatgccaaacaaaatttgctttctgtgcttttctcgatttcttttcttgcatgctgaacaagatcaatcttaattatagtcatcagcttttaagaataacatatgtttacaagagaaaaaaacactaaatatacctttcatttttaaccatgcaaaagaaatgcatagaattaccagaatactacttgctaacactggaagcacaatcttgactgcattgctcttcgtccttccacctgtgcaaagttttagtgtttaagtagttttttcaaaaaaaaaataaatattattggaggtggaatagaaatataatatttttctgttgatttgtataggactttcaaaaagtacttaagactaaactttaaccattcatttattatcgtataataatatattttagatagctataagacctactccatccgtccccaaaaaaactcaacttatggagattgaattttgtcaaaaaaaaaaaccaacttctgccattctacctactctcagcacgtaaaacgagaaagttttatctcttaaataccctttacctacctatcaatattactacttttttcaataacgaggggcattttggtcatctttactcttcactaaatttgcattgggattctaggattgctctttctgtgagacggagggattaccttgttagtctaaaacatgaatggattaccttgttagtctaaaacatgaatttcttggtagactcatcatagaggaatttttataccaactgatcaaaatctatagagaatttgacttttagacatcaaagtactcctacgtcctatgaacaacaacggatgtagtaattgattttagaaaaaatgtactaaaaattaacggtgtgtttacccgcatgaagctgaaggcctgcaagcctgaggtagagcgtatcgctgcccagcccttgtgcaccaacttttgccatgtcaatcagctcccctgaccacaccaagcacctcgtcgtgtcgcccctggacctgctgttgctcaggttggcgtacgcgtacgccacgcacgagcagttgctgctgcactccgcggcgcacgcctccagcgtcctgttcgggacgtgcacgaacttgtcggggcactgcatcccctgcacggccaagaagccgtcgccgcaccgcaccgcctccttccgccggcaaccccgcgagaaccggccgctgctccactccgccgcgctcgccggctcgaagccgtcgaggcacctgcacgccgggagaggcgcctccgccgccgtgctgtcgcagtacccgttcgggccgcagaagtcgtaggggtcgcacccggccggccactcctggagcaccacccacgccgacgatccgctgctccacctctgaagctggtacttgccggcgtaggtcagcacgaacctggtgtgcggggcgtcgtcagcgacgctgaacgtgatgtatatctcctcgtcggtgtcgatgatcgcgacgtagacaatggcgctggtgttcgtctggtactggctatccaccatgtagcctgtccacggcccgtcccgcatcaacggccgcgtcccgttccacatgatcacctggaggaacgtgtccgtgtcgccgccgtacgagaagctccccggcgacgggtcgccggggcccctccacgacaccagccggtcggaggcgcgcgtcctgtacatcatccgcagcttcatcccgggcaggaacgagtcggtcggtgctcgaagctctgccaaaagatggtgccgttcggtgaccggacgacgaggttgccggtgttcatcagcaccgcggtcgtgttgccgttgccggcggcgccaccggtgatgttggtcgtccagcggacgcggccgtcagcgtcggacacgacgaggttggaggattcggtcagggacagcgttgtgccatttgtgaccggagtttctcggtcggcgacccacaccaccgtgcgccgggggatgtcgttgtaccatataccgaggtagagcttggccggggtggagttggagggggagaagaagcccatggcgaaggcgccgccgtcggagacgacggtggcatcagaggttagcggcttaccggggacaagccggtcgtcggctgaacacggcggcggcaggaggacgacgacgacgctcatgatgatgacgtagatgaaagcatctgatcgatccatggaaaccaagccctttcttccttttcgtgagccaatgtgctagctcgtaatcgcgtagttgttgttgagcatgtgtttgactataaatatgtggaaattcaaatgtactagtctgtgcgtagctaaccggcgtatagttttcgtatcacgggtagattttctcgtgcaatttcagcggaccagctagaaatgtcgagatgtatttttttttaaaccccgcggggtgtatttgtattaagtagggagaaaaactgtaaaatagctcgaggctaggagattacgaaaggaaaataaatagaaaagcgagagggggaggggtgggctgctaggggaaaggggttgggggtatatgtcacgacttacatattgttgattgtacttccacgggtgtccgggagcagggattgaatgttccttgctccacttgtgcgccatagccaaacttcatcaatcgaccggttaatgattactacttgtgacggtgctgtcgagatgtattttgatgtgcaactcttgcttatgttttcataaatacaaactgtattttgtaaattatattgattctatctccataaatacgatttttacgacaaagattggaaatgatgatactccttcattgtaaagtcggagctgctgcgtcactattgcgggcttgacaacgacgatgatcgtttgcatgaagtcgaagctgctatgccattgtcagctctcaatgtcctatcattttcttacttttctacttcatccgttcctaaatatttgatgtcgttgacttttttaaacatatttgaccattcgtcttattcaaaatttttttttgtacatattattcaaaaacttgagtagtagtaatatatttaacaatgaatcaaatgataggaaaataattaataaatacttaaattttttaaataagacgaacggtcaaacatgtttaaacaagttaaaaatatcaaatatttagggatggagggagtatcatgttaagtggtgtcattctctcgaaatgaccgttggtccaaaatgtggactattctgcacgcaggcgtggacaatttcaaaccaacttgcgttcttatcatgcttcaaccaacggtacagcaaaaaatatatttctaaaagaccaaaaaagtagtttgaatttcactttgctgcaggaggggcgcagtattagcgtgtgctttggcatagtttggcttagaagctagccgaagctaattttagaaattagaccttaataaactgagccctcctttggaacacaataattttgcaggggtcttattggagttagttttaattagcttccagaaaatttatccaattacctgtatttcaaacgacgcataagagtcttgctgttgtctgagaccgaagattgcggttgttaaatggcactatcattcctagtggcagaaaaaaacccgagcagtccatgcactgcaactctgcaagtttattttccacagacagaccgaattcggctcttcttttctctgaaggggatttgcctaaaatctgaagctgcggacgttgtaactttcgcccgcgatctctatcctccatgtgtagcaagttttcaagatgtttcttcgagagtcacgtcggaagaaacaatacaggcatgcagaagaagtcttggatcctagccatacgttttagggcccctttgaatcaaagaatttatgtaggaattttataggattcaaaacctataggaaattttcttatttggccctttaattcaaaggattaaagttttccaaatcctatgaaattcctatgaaatggcacattgcatgtggattttggagaaaatttagcaagagctccaacctcttggaaaatttcctttgagtctatctctctcatccgattcctgcgtttttcctgcgctccaatcaaacgaccattcatgtgtttttcctgtattttgcaatcctctgttttacacttcaattcctgtcagaatcctgtgtttttcctattcctccgttttttctaccctacgattcaaaggggcctttaatctgagggttcgtgatggcctgggggccagggttcggagattaaaactccgaccccagtaaggttgtattttgttcacactgaagtttggaagtttggttgaaattggaacgatctgactgaaaagttgtatgtgtatgaaaggtttgatgtgatggaaagttagaagtttagaaaaaaactttggaactaaacagggcctaacttctaaaacagccatctcaaatcgcatccaagaagaaggcacatcatgcgaagaaccaggataatccaacaaaaaagagatatgcatcagtcatcacattagaactgcgaactatggtagatttcagttgctaggtgttgacagaaaacacgaggcttgggagatctgcttaactctagtgcaggtccaaagctcgccttcgaatgtatgagcgtgccagttgatttgatcctgcaatcaacaagaaacaaagacaaagaatctgtagttaaatccataaatgatagccgatcggctagatgccgatgacatatcatttatctttgagacgatgtcatatgtgaatcgatcggcaatcgttaataagaaagaaagacctagatctgctcaatcggctgtaggtatcaacgatatataatcttcatgctagtatatacttaaatcgagtgattgggatagatcggtcgtaatgccgagacagtataaatcactacgatcgaaatatatactaataagaggattatatatgtttatagcatagccgatcatgtagacctggcacgtatcggctaatactccgatactactctgtattaagatactaaagcaaatcaaatataccaaacagtagcctaatatactttagatgcgacaagatcttaatgcaaatggcagatttaacgtatcaaataagcgtataggatagaagtagttaaatcagataagatcggctgaaactccgacactactctactcggcaactagaaagcaggctagagattacaattctaagcacgacttaatagatcaaactcaactgatgcagcattaagtatgaaaagaaggacaatatctagacaatcaagccgctagatgtttcatagagtggtagatatcttgtataatctaagccaacgtcgctatttaacctaatcggctgccttctactaacagatattggccgattatagattagataatgatattgtcgaagattatacaagatatatgatagctcgacgaattacataaacaagattagagtgtcataaagatggaagcactaatcccgaaaacacaagtcgccatgacaagttttacctcttgttgaagatcgaaaccgatgcagctcaacccgaaagcgagaactcgtcgaaataaaactaaagcaaaaggatggcgatgcgccgaaattgtattgaacgtctgttgttttt

SEQ ID NO: 18835 - DNA, 1561 bp, Oryza sativa
tctcggatcctagccgtacgttttaatccgagggttcgtgatggcctggggggttcagagattaaaactccgaccccatccaagaagaaggcgcatcatgcgaagaaccaggataatccaacccaaaaagagatacgcatcagtcatcacattagaactacgaactatggtagttttcagttgctaggtcgccaacattgcaggtgttcacgtagcggatggaagcttttttggggtttcggtgttttctactccgacccctaacaaatcgtggattaaaacgtgattcctgtagagactaggactactattttgtagcccataaagcggcccaactatatgagcccgttactccaaggggccagggaatcggcctcatcaggtgatccatcatctcagtcgccggaggccttttcgaccacgcctgcgacacggccatcagatcttcaaatattttttgtgcgttggctgaacaactgtagactgtactggtagccttgcttcttagcacagaataacgggggtggattctaaactctcgaggggacaccgtctcgttatttgtatgtcatcgaaatggttatgtacaaatttgctatctaacaatcggtaccatagagatggaactaagtgtttcagttagatagcactagtaagcagttggagcagaattttcaatatcaggcgtttcgattggggaggtagccagaagcgatttctccgagcttccatggttgcacttgcagctgagcatgcccgcaaagaagatgatgaccgaagtcgcccaacacaccatcttcaacaatttggacatcccatccatagtcataggaaacggagtactcccttcgccccaaaaaagacttaacctagtattggatgggacatttttctagattcattgtactagaaaacatcaaatccaatactaggttgattttttgtgggacggagggagtaggtggcagcgttcctccgcgcggtcattttcgttcccaccttgtaaaagcctctcacgagtcgcgtaccacgttcctgaccctgttccttgcttccatcgacccgggaactttgcaactttgtgactttattattcccagggacaaagaagctggagagcatgacacctacagtgacgagggacctttttatcagaggcattttggacctctcgtaaccctcccaaatgcgagccttgatcacctcttgtgtaatcgaccgtccggaatctcctctggatatcatctatgaacctaagctgcatatcaacgggtacgctgtattccgtgtgttcccggatgaggtgctgcttgacgtacttgggtgagccccgtaagaagcgatccaatctatccaggatgaatcccttcttcatatcctgcagaggtgcagcttcttggcagcacgcttatcggccgcagcatcgatccgcaacctgtgagattcctcccaagcccggatcttgacccgcttctcgtgatcgcctaccccgaaattctgttccacacgttcgttaagaatctcctggacttcgtcaacgatctcgtatctaactctaaag

SEQ ID NO: 18836 - DNA, 1092 bp, Oryza sativa
aaatgacttataatatgtaacgggagcagggtttaatctgttggtttgaccgatcgtatcggggttgggcgatataccgaaatttcggtccaaaattttgagcaaaaatttaaacaaatactaccgaaattcatgaaaaattaaaagaattaaaagtttcgactgaaataatatcatatctgaggatccgaaatgactgaattttagaaatttcagtccgaaactttcaaccctgaacgggagtatatatctgaccagaaaatgaagtggttaccaagttttctacgttagcaagaacactgtgtgaactgtcaattcttcaagccggacgaagccaaaaatcctataaatgagatcagatctgcagttctgcatcgccgtgcgaggaatgatttggcagtcatctgtaatttgcagacagaaatggagctttccatcgatcaaaatttaatctgacggtgcgtttggtttccttgcacacggcacccatttgcctataaattgcgtgctcccctcctcgtgttgctcataacgcagatcagccaagaacgagttcatcttcttcttcgtgttgttgtagcatttgattcgagatatggcggcgactgacatgtctcccaaggccggcaagccgctcgtcgagaatgacgctggctcatacctggcgtggtccggcaaggaccagccggccgtcgccggcgagaagctcgggtgcggcctactcgtcctgaagcccctcggcttcgcgctgccgcactacgccgactccggcaagttcggctacgttcttggcggcagcgcggtggtcggggttcttccggcaggggtggacgccagggagagggtggtgcggctcgaggccggcgacgtgatcgccatgcgcgccggggaggtcacgtggtggtacaacgacacggacggtgaggatgtcaccatcgtgttcatgggcgacaccgccggcgccgtcagcccaggcgacatctcgtacttcgtcctcgccggcccgatgggcgtcctgggaggcctcgacgccggcctcctcgccaaggcgttggggctgacgtcgccggagcaggcggccaccgccttccg

SEQ ID NO: 18837 - DNA, 13831 bp, Oryza sativa
  unsure (1)..(13831): unsure at all n locations
ccgcggacgacgccggcggcatggagctggtgtcgctgatcaaaagccccaggtaacaagacgagcagcggcaggcaatcgtgacgtcatacgtgagcgcatgagttttcacttgggatttcgttgtgtcatgcaggccggcgacggagcacttcaccgggaagggatcggtgatcggcggcctgacggcggagatcgtgcaggcggcgctcaacgtgtcgccggaatttgtggaacagctcaggaccaagtactgaacgccggatttgatgaatccggtactgtacgtccatgtgtcctctcgtctctatacgtttcctgttttcagcacgcgacgaagttaattaggcagtggctactgctccggtgttcagtcttgacacgtgaatagtctctaaacgaaataattaatcgaaaccatactgtaattagctgaagctgaaactacttgtatgcaatattattataaagtacattacgcagcgtggtgtaatggtccattgtactatctatacgcaactaaaacaatgtgtctatagagtgtctggacaatgaatagggtgtagaaaagaggatcggaaaatcaacagttcttccccctctgccataccaccttgaagacaacgattcatcttcttgcgtactgcacactatcaaaaagaatctgaaaggaggtccagtgttagatcgggctaaaccaagtcctctaaagtcgttagttgtcctcgtctcttggaaagccatggtacgagcgtaatgcaagaatcttcgggcgtatcggagctgtatgcgcccagccgcaactatcatcataaagataaaaggaataagctgcaacaggcaaaggcggggacgagtcccttgcagagtttatatttttagagacagaggttaaatatgtttgaacaactttttctgctctatcaatatatatacgcggcaaagtttgtgccctcttttcaaaaaaaaaagaaagaaaacaatgtgccgattaccctatagtcaaagaaaacaatgtgccgattaccctatagtcaaagaaaacaatgtgccgattaccctatagtctccgttgtattgtaagattggcagtctttgtttaagataaaattggcgctctttgtttaaatgttactcccttatttctaagatataaggacttttcgagtagaatacaagtattaagaagaaaggtaaaaattaaatggcaaatggttgtaatcagttaaaatgatgtggtagatagagaaattaaataggaaacgattgtggatgattaacggtgaaaatatagctagtatactttattttaagacaaattttaaatgttaatactagctagtatattttaggatggataagcaaacattatttactttctttacgccaaatatatttgaccgaaacccaagcgtgggatctggatcagctgcaattatagtattgactgcaacttaatcagttgtagatactgcattggatcaaatctaaacgatatatagattagcttggtactgtagcaaaagtgtttgtagcataaaatgttgttcgagttttgtagcgatgaatctgtgctactgatcatcgaaatgagcgactgaaaatacatgcaatcatatatactccctctgtcctaaaaaaaaagtaaactctagatttcgtgtccaactttgactgtccgtcttatatgattttttttataatttgtatttttattgctgttagatgataaaacatgattaatattttatgtgtgacttgtctttttaattttttataatttttttaaataagacggacggtcaaatgttcgacacggaaaccagggtttgtatttttttttgagacgagggagtatggtgcagccgtacgtagctatgactgcacaagccggatctccaatccacaagcctgtgcacgttgatgtccccgcacgcaacaagcaccgtacatcgatcatccccggagtggctaacggtcgaagtacgcggacgtgtcacgcgtgcgtggtggggcctgatcggcgaagatgtcgtcggtcgttcgcctgctcgatcgatcgatcggtcgcgttcttgcagatagctagctctgatatgatttgcttgtacgtcttccctgtggttaggcaagggttactactttgcttcagttcagcttctgtagccacgcgaatcacgatcgtcttaaaataagttttaccgtaccccatccaacaggtctgtattgtagctaaagtgaatgttcaaattctaaaaataagttttttaaatggtttaatttcaaattaaaaattttaaaagttcaaaataataggaaaaaaactctgcacacggacacgggaaataacggccacgacgactatagccttgtttagttggaaacaatttttaggtttaattgtcacatcagatatacagacacgtatttttaagtattaaatgtagtctaataataaaataaattatagattccgctaggaaactacgagatgaatttattaagcctaattaatccgtcattaacaaatgtttactatagcaacacattatcaaattatggtgcaattagcgatatatctcgcaattcacacgtaaactgtgtaattggttttttctttatctacatttaatattttatacatgtgtcaacattcgatgtaataggtaaaaagtttttgttttgcgaactagacaaggcctatctataaattgcgagctcccctcctcgcgctggtcataataacgcggatcagctaagagcgatttcttcttcttcttcttcttcttcttcttcttcttcttcttgcttgttgttgtagcatttgattttagatatggcggcacttcccaaggccggcaagccgctcgtcgagaatgacgccggctcatacctcgcgtggtccggcaagaaccagccggccctcgccggcgagaagctcggctgcggcctgctcgtcctgaagcccctcggcttcgcgctgccgcactacgccgactccggcaagttcggctacgttcttggcggcagcgcggtggtcggggttcttccggtggggttggacgccagggagagggtggtgcggctcgaggccggcgacgtgatcgccatgcgcgccggggaggtcacgtggtggtacaacgacgcggacggtgaggatgtcaccatcgtgttcatgggcgacaccgcccgcgccgccagccccggcgacatctcgtacttcgtcctcgccggcccgatgggcgtccttggaggcctcgacgccggcctcctcgccacggcgtcggggctgacgtcgccggagcaggcggccaccgccttccgcagccagcccgccgtgctgctcaccaggctgagccgcaagctgcaagacgtccgcccacgcgagcacgacaggcacgggatcgtcgtgaacgccgcgcgcatgccggcggacagcagcaccggcggtgccgccgccgggacgaagattgtcaccgcggcgcacctgccggtgctggggcagctcgggttcagcgtcgggctcacgcctctcgacgcgggcgccgcggtgcgcgggccctgggtgctccgcgacgccgcggcgcaggcggtgtacgtcgcccgtggaagcgggcgcgtccaggtcgccggcgccggcggcgcgtcgacgctgctcgacgcggaggccgcggcgggcagcctgctcgtcgtgccgcggtacgcggtggcgctcgtgggcgtggacgccggcggcatggagctggtgtcgctgatcaaaagccccaggtaagtagacgatcatggagcatgtgcatgcattctgtgtcggcgtcgtacgtgagcggatgggtttttcacttggactttgttgtgtcatgcaggccggcgatgaagcagttcaccgggaagggatcggtgatcggcggcctgacgccggagatcgtgcaggcggcgctcaacgtgtcgccggagttggtcgagcagctcaggatgaccaagtgagcgaagccaactccggatttgatctctccggcgatggggtgtggtgatgcccacagtagaacactgcgcgtgtctttgtctttcagtcttcaccttgcgagaagtcatggcaggattaagtgttgatcagtctcagcatgcgaataatgtcaccaagtacaataataatcggaactagcagtgcaataattaaagctgaaaatggatggatcgatgaaattttacttttaaatttcacgacgtgttttatatgtttggtctattgtactacccaacagaaaattgtgttcacatacatatctactcccttcatcataaaataaatcaatatgttaacatgagcacgctcatagcgtgatcacttttgtgagtttggccaggggacaagtcacgttcgagtcttaatttgtaacaaaaacacgcgggattgggagcttgggtttatactggttcgaactattcgaaattataacaccctactcttgttgtgttgttgatttttctctcggtgagaaaggatcttacatgtttacacaaactcaacgtagttcctattattctcttctggattctctaaaaatttcgcaacaggtagcacaccaaacccctctctccatggttatgacacgtcaaaaagtttacactctttactgaaggacaataatgcacttgtgttggaaggcatcataaaagagtgataattggttattggacacccacaacattattttattatatccaaaatatacggaaagagaaataacggtgcacgtgcaagtatgaatcttcctatctccattggttaatgatcacttttaatccacgtctttgaatccacatcgcggttaatccatagccattcaccggtcgggttgaaagcagttagcccgtaagcaatcttgtctttagtgaatatttcactctatatttcttccggatataacgaattaatattgtgggtgtctagcagacaacaacaaattactgcttctatatgatgcctttaaacagaaacacgttcttacagtatcttcgagcaaaaggtataaactttggatactgtctattactaataatagctatatattttaggacagagactttctattacgttacgtcgccatctcgcgctgcacattcctcacttaattactctacacaagaaagcatcggcatcgagaattcgagatcatcgatcatatatggggcatttacaaatttgctactgtttcttttagttttgcaaggatgccacttgaatgacagttatagtggcatttttgtaattttttagtggtatttttgcaataccgattcaaagcagtggtaaatttacaattgacccatcatttatatatatatatatatatatatatatatatatatatatatatatatatatatatatatatatatatgggcgtggcctccggcccggtcggtgcgtagttcatgcatcatgtataacggtcgatccggacaaaagcacataaagtatcacgtcgcgatcggtcgatcgatatatcctgacgccgacgtgtgtttgtggtggggcttgcatcatcggcgaagatgttaggcaagggctacgtacgtacgtactgctttgcttcagtgcttcttcacttcttcagtctcaaggtatttataaattctactcccgggagtctatatgggatgcttttaagcaacgatatatcccttttggaaccggatataacaagttaaaacaaaattgaattggaacttagtaaacggacacgaagttttgaaggattctcgactgggttctgaagacaaatttccagtttaagaagctaatgtgaaaggccatatctcggatggagatctccagcgatcgctgccgttgaggcggtgctacatacgtacgtactccgtgcactacgtgcatggtgggaaacaacaattaattaagctactacgtactgtagcaactgttgaaatctccagctctctctggtggccgagtaccgtcaggtttagcgtttgataagcgaccagcgttactcggctcgctccgcctaccaggcttttttcctcggacaacaatcctttgcttacggtgattttctaggcgggctaaaagctctactaaatgcatgctcctcctttagcttgaatttcagtagtgttgttggacggccgatctcttgcataagtgttaaattgacagccacttggtctgttcgttcggtgtcccgaaactcgagacggcgaatcatatcgtcctcgatcgtgtctttgctcgctagatctagcatcggattctgtctccgcctgacctgtcgaacctctctcctgcccttggctcctctcttcaagcctggtggccacctttcaaagcttgtatngcaccacacctttacaaggggtttgattacttagtccttctcgtttcctggcaactatgaaaaggacaaaactccaaaattttcgatttctctctttgtaggtctcggtagttctgagctccatcctgcaaaaagaccgcctgaggtctgctgcaggtgtcatgtcttttgaagactcgttgggtgagtagtggggcttagccttcaccttccccttactagcgtccagcttagatcaatcatttttctcttcatcgttcagttttttcctttttcctgtcccaatgttgcgcgttcgaaaaaaaaaaagcaaccgttgaaagttcaaacaagctccaatattcttagaatgcgaaaatggagtggttacaagtagtctacgtacgttagcaagacacactgtgtgaactgtcaaatttcaagcaggataaagccaaaaatattttaaaaatttatcagatctgcatttccgtatggcgagatctgtgtgtagccagaaatggagatttccaccatcaaaattcaattttcacggtgcatttgatcgatcgtgcacacggcacctacgtacggcgacgaagaccgccacccacttgctgatttgcctacaaattgcgagctctcctcctacggttgctcgcgcaacgcggactcttcttcttcttcttgcttgttgttgtagcatttgatttgagatatggcggcgcctgacatgtctcccaaggccggcaagccgctcgtccagaatgacgccggctcatacctcgcgtggtccggcaaggaccagccgaccctcgccggcgagaagctcggctgcggcctgctcgtcctcaagcccctcggcttcgcgctgccacactacgccgactccggcaagttcggctatgttcttggcggcagcgcggtggtcggggttcttccggtgggggtggacgccagggagagggtggtgcggctcgaggccgccgacgtgatcgccatgcgcgccggggaggtcacgtggtggtacaacgacgcggacggtggtggtggcgaggatgtaacccatcctgttcgtgggcgacaccgccggcgccgtcagccccggcgacttctcgtacttcatcctcgccggcccgatgagcgtcctgggaggcctcgatgccggcctcctcgccacggcgtcggggctgacgtcgccggagcaggcggccaccgccttccgcagccagcccgccgcgctgctcaccaggctgagccgcaagctgcacggcgtccgcccacgcgagcacgacaggcacgggatcgtcgtgaacgcggcgcgcgtgccaccggacagcaccggcggaaagacggtcaccgcggcgcacctgccggcgctggcgcagctcgggttaagcgtcgggctcgcgcttcttgacgcgggcgccgcggtgcgcgggccctgggtgctccgcgacgccgcggcgcaggcggtgtacgtcgccagggggagcgggcgcgtgcaggtagccagcgccggcggcgcgtcgacgctgctcgatgcggaggtcgcggcgggcagcctgctcgtcgtgccacggtacgcggttgcgctcgtggccgcggacgacgccggcggcatggagctggtgtcgctgatcaaaagctctaggtaagagaagtaatttgtacacctagatgtcctgactcatgacatctaaatgccggtttaatagttatttaaaaatttcataaaataataagatagattatggtaatataagatactacgaaaacattcaacaatgatgggatatcacctcgagagataaaaacatgtatttttctcattcagaaatataaaagtttaaatttaatctacacacgaagaaacagaataacatattttatttgttttgtataggtactccctccgttttttaatagatgacgccgttgattttttctcacatgtttgaccattcgtcttattcaaaaatttttatgcaaatgtataagatataaatcacacttaaagtactatgagtgataaaacaactcatagcaaaataaattataattacgtaaattttttaaataagacgaatggttaaacatatgagaaaaagttaacacgtcatatattaaaaaacggaggtattactatttagcgtctgatttttctattgtttaagacgatcatacatcatgtgcatgcatgcattcgtgtggggtgccgtacgtgagcggatgggtttttcacttggactttgttgtgtcatgcagaccggcgatggagcacttcaccgggaaggggtcggtgatcggcggcctgacgccggagatagtgcaggcggcgctcaacgtgtcgccagagttggtggagcagctcaggaccaagtgaacgccggatctgatctgtccggtgattgtgtgtggctgtcgtctcgtgtctgcgtgtcttgtctccggtgttcgatcagtccggacacttgaataatctgaaccaaataataacaatcaaaactgtactgtagtctgtaataataagctgaagctgaaattacatttcacaacgtggtgtttatatatgtggttgtggtccattgtactattcttggtgtaaacaatgtactatatatatttgatgaaaaacaatgtgttgacattgaatatttgcatcagactatggccgtgtttagattcaaacttttttttaacttccaacttttctgtcacatcaaatgtttggacatatgcatgaagcattaaatgtgaacggaaaaaatcaattacacaatttacatgtaaatcgcgagacgaatattttgagcctaattatgctatgatttgacaatgtggtgctaccgtaaatatttgctaatgatggattaattatgcttaatatatttgtctcacagtttacatgcgaaatctgtaatttgttttgttaattaattcttattatcttactactatcgatggtgtgcagtaaaaatggaagtacaaccctatgatcatggtcaattggattttttttttacttcagcgaccttcaaagttttgtccaattagagggcagtagtagaaattgaaaagtgttgttgagaccaagaaaatgcgaaggacgatcggactgacgtcaattcgtatacgtcaattccacgatcgatcgacttcggaagtctagttcacaccaaaattaaaagtttggttgaaattggaacgatatgacagaaaaattgaaagtttgcatgtgtagaaaaattttaatataatggaaaagttgaaagtttgaagagttattttggaactaaacatggtgctatctctcctccaaagtccaaacgtttccattcatatgtaccgtacatacgggaaaaaagattaacacagctttgtctgttatactcctaccttccaaaagtctaagccctatttctttttcatcaagaccaaggtgtaattaattcatttatcatgtgacaaaaccaatgagcatacaaccaataagtactaaaatgacttgttgggttcttatcaagaatctaatagacttttaaaaaaaccaaaaaatgaaatatgacttaaacttttggaaggagggagctgagtatgtaaaatactccatcgatagtaaaatataataacttttagatttcagaatttttccaaaaatataataagttctctccctaacattttttttcaaacaatcacaactgaaaccattcaatttatttacatacttctacttctcaatcaataataacttctctcgttaaattctatcaacttcttcaataatcgttccaaccttaaattccttttatattctgagacgtgggtggtacgtgtactgtacgcacattatatatctacacgtgcatatatacacgcagcggtagaagtacaaacgggtcgctttgggcctctttgtcccatggatgatcgatcgagctgagtatccccccgatgcggacgcgcacggtgggcctcgatcggcgagatgtcgcccggccgatctgatcgaggcgtcgtagttgcatgaaggaattccttgcatgaatataattttctcgcacaagtgtcgccgatacattgtaaatccaatcaaaaatataaagtggtcaaatcaagatagtagaattagagattgggaacaacaatctagggaaggcggaagcttgatattaggattagagaaatagaaaacaggggaggcagaactagaggaggaagaaagtcatggcagaaccagtttaatttctgttctttatgtacaatcctacgtgttcgcggaaaataatttgtgttcttcgtgccgatatagcctggacgctaataggccgggcggcttctctatcaggagcagagatgcacgtggacatggagagcaatccgcacggcccatatcaaccaccggaaacgaacgttgcggcccatagaacaccagtgctcaccaaacgcatcgcatggcccacttatttccgaccaccgacggccgcgagcggcccattatcctcgtcggtcgccggcacgccgcaacgtcagcccaccacggcaacggccacggtggtgcacgtctcctgttcgtttctgcacgtaaattttgcgtggactacgtggtttttcccatagagtgtagtgcgagtctgccgcgtttatccgttacgttttcattttttaatacgccccgttctactactagacgcaattaataccaacaagggcctgacaggtgcacgcacacgtgccgcatcaaccagacagccactttaccactaactacgcaatcagtgcggcctggcccatctccagccacccacccaccggcctaaaccacggcggcccatttcaacataaccacacaaacttatggagcatatagcgtacagttgactagtggtccgcctgggttccggtcccacaagtcagcgaaacaaagtgattcaaatcgaatagtagtagtaccactgtaccagcttataataaaagttagtattacaattaaggaggcaattatattttctaattgcggtgtgattaggttaattagcaccgggatctctctcgtttctcgcggcggtggcggaacggtcacttctcttcttcacccgacgcaacaatcccatcgctggtggcgatttcgcgaatccacctcgtttaaaaaggcaaagtctagcctagctttcctccctcttgctcgccggctgcggagaaggggttcgagtgagatagaatccggaggaggaggaggaggagattgcggcggccggacggcggcggatcggttgattgattgattggttggttggttggttgggttgatcgatggcgttcttggggaacggctactgctcgtcggggtcggagggggaggacgaggacgaggggatggaggggtaccggaagggagggtaccacgccgccaggcccggcgaccgcttcgccggcgggaggttcgtcgcgcagcggaagctcggctgggggaacttctccaccgtctggctcgcgtacgacaccctcctcaacgtacgcctctcttgccgcccccgattcctctcttgctttccgtttcttgtcttgtttttccccctctctctttgcctgttctttactcgatgctcggttggtttggttcggttgcttttggatattggaaacttcggttgaggtcgttggaagcttgctttttatctgaaactgtgcgccctgtctcctatctcctgttcatcaactgatttgtgtttggtttcccttcttcttttggtacagatttctgaaatgctctgcagccatttgtttgcttctgatgaaaaaaaaaagggagaaattttcctacatgtttatattgtttctaccgcacgtctactattccgattcgtgcaaaaaaaaagttttttttctccatcacaaatatagcagttgtatggtgcaaccaatatatcatgagttgtcaatttgagtattgcaagtccgaattttgcagagatttgtcgcgctcaagatccagaaaagcgcgagggattacgcacaggcggcactccacgagattgagttgctgtcggcgatagccaaaggtgacccgacaaattccaagaatgttgtgcaattgctggaccatttcaagcatgctggtccaaacggacatcacgtttgcctggtcaccgagttcctcggtgatagcttgctaaggttgatacggtacaaccggaataagggcattggtctgagcggagtcaaggaaatctgccgatcagtgttggtcggtcttgattacttgcacagagagctcggcatcatccacacggatttgaagccggagaatgttcttcttgtatcgacaataaacccatcgaaggacccagtgcgctctgggttcacaccgattcttgagagaactgtgagcaaccagtacagcggatcagtaattagtttcagtgagaagatgcttaagatgcgggcaagacgcgctgtcgccaagatttcactgaggagggagtctcttggtggagttgcagcagagatggagaaggagagaagcctggatggtattagcttgaagtgcaagattgttgattttgggaatgcctgctggggtagtcagcagcttgctggtgaaattcagacaaggcagtacagagctcctgaggtgatcattggtgctgggtactcatattctgctgatatgtggtcatttgcttgcatggcctttgagcttgcaaccggtgaagtgctgtttgctcccaagacttgccagggctgtagtgaagatgaggtaagaaactgttatttatgttgtttaatttcaacttctcaagaataccatcctatgtcttagtattcctgctagttctgatgataatccaggcatacaaatatgcatcaatatgtcacatagtcccttgcaacatacgacatattaaccaaataataaaatgcttttaaaagcatctgctagggccttggcctcttgggccacttcatcaaacaaatgtgcaagcagttatcatgaaagatgcacccaacctgacaagcaccaacctagctactgaatctttagaaaaatgaaaaatgaatttattgggtccacactcttactcagtagtattcaaattaacttaaccaacttctgatctgcagaagttgatggtgaaggatatcatgtgatgttgctatttgagcagtttttatcatcttgcaaagtcactttcgtttcaatatcaatttccgattaaaagtactgaacctattaaattttttcgcataaaaggtgccagccaggatactaggactgttgtgcagtgtaaactgcgtcgtaatatgtactgggacaaattgatctgtgttgttattgtattgaagaaaaaaggaaattgtcctctgttctgattctgttaaattcatacttatgaagaaaaatatctaactgagaaattcctcttgccagatataatgcactggtacatataaagtaccaaccggtgatccttgtcctattaaaaataact

SEQ ID NO: 18838 - DNA, 2311 bp, Oryza sativa
tttcttttatgaaatgcttgaccatcatcatgtatctggatgtagtagcagaatttccattagtgtgttttgggtgtggagctagtgaaatgctaattaacgtcagcatgtgcgctggcctgaattctgtcggctgtgcctcgtgttgatgtaaagataaatatttgctaatgtgatctgggccatctggcagtggctaccaaaccttttatcttttggttgagaaagaaagagcagttccagtgcagctgtgcattgattctttttgctcaatggattctgtgctgtaaagttgcttactggttcagagccagcgtgctccgttgcagtttgcttgctactgcagtttttatctgtgattcgagctgtaacctgtcccgtacacgttttctgaaaaagagaggcatttgtgttgtttggtgaggaaatgggattatatgataagaagttaagaaccttttaaactggtgtatctgcaacagttttgtgccaactgctgaatcgctaagcaagcgagatgtaatgttgtgcaaatataaaaaacgaaaagttatgctaaagtactttggataataaagtaagtcacaaacaaaataaacaataattccaatttttttgaataaaacgaatggttaaacagtgcaatcaaatatatcaaaatcccttatattagaggacggagggagtatatttgaaattatatttgtcaaatgtgacaagtccaggtgaccaggtggaattttacaccaatgatcttaaattctggttacatctcaatcaactgaaaaatgtaggatattaagattgcacaaatgaaaaatactagtaatttttgaactaacacgtcataaaaaaagagggggggggggagtatgaaactgttgaaaaagtaagttcatgatattaaaaattcacaataacccataatcatatcataacaagggttcatttggtgaaactcttactctgagattcttgttgcatgaagctcgaaccatagcagacactttagagattctggatgatacagagtgatgttgttgctccgctcctaaaaattacactgggagcggcattcccactacttttcagctccgatccactatcacagtaggagctataccaaacaaacccaaagtaggcaagtaccagtaatgatacatttttagcctttgtaaatatccaaaggaataagtttactttgggttcctctatttgtcgcccagtctgattttcgtcctttgatcgcaaaaccgggtataataggtcccccaacttacgaaaccgtttaaataaggtcccttggtagtatttgacccggttttgactaaggtggcgactacgtggctactttgactcggtctttatctgacgtggcattgacgtggcgcttatatggcaattcgatccgaaaaataataaaaactatgagacccacatgtcagtttcacacacacaataattttaaaaaatggtggggcccacgtggaccccacctgtcatcctcagtaccctctctctatacccctctctctctcctcttctccgccgccttcttctgcgtcgcgtcgccgctatccgtgtcgccgcgccgaccacccagacaccctccgcgcgcagggacggcatcgccgagtgcctctacaccgcgctcgtcatcctccagccgccgctccacaagccgcctgccgcctctcaagtctcagctccgttgccgcccctgtgcgccttccgccggcgctcaccattctcagggagagagggggggatagagagaaggggatagcgagcactgcgccggagaagaaggtggcggcgggccgcggcggcgctcggggcagacccaacaaggaagtcctcctcctcctcgtcgctggactgcacgaaagcgaggcgacgaggccgaagatggcgagcatctcggcgagcagcgccttgggcctccccatggcggcctgcacgaatgccaccgccgcggtgctgttcgacgacgcggcgtccctccaccccatcgcggcgtccgccgccgccgagacagcatccccggcggcggcgaaggtggccgccacggccctctcgacggctgctctgatggcgcagaggaggaggcagctgaggtagcccgggagctggaccagcatgagcaggagcacgacggccatggcggcgcccttgaacacccccgcggacgagcaggtgatcaccgtgctcagccctgtgatgaacagcttcgccatggccattgccatcgatcgcctcttgtctctgtcgttcttttgcctgaacacgacgtgttcttgagatttcttga

SEQ ID NO: 18839 - DNA, 5033 bp, Oryza sativa
ggagcgacgcacgcatgctcgccggtagacaagggagctcgcctagccgtccgccgcccttctagctcgctggcgggagaggagggagctcggcatggctctagcgcggcgtaggcggcgggaggacgacaagcgcggtgtagaggcgctcggagatgccgtcctggcgcgcgtggaggtcggcggcggcgacacagatggtctggtggtcggcggaggtcccggcgcgcgcgttggtcggcggcggcgacacggatggcggcgtcgatggcgtcttccagggcgctgccgcgctgctcgccttcacgcggaccggcggcgctccggtcggggggcagcgccgaccacgcccaccgctgccgccggagctcgcctgctccactgctcacccgcgccgtcctctgcccgggaagaagagagagaagggagagggaagaagagaggagtgaggctgacatttggggcccatatggcaccaccattttaaaattatttctttttgcagctgacatgtggggccacacttttttttattttgctgagatatagttgccacgtgagcgccacgtcaagctacgtgggacggagacctagtcaaacaagccacgtatgcgccacgtcagctaaaaccgccttcaaaaccaccgaaggaccttgtttgcccggtttccgtaagttgggggacgggtcatgcccgattttacggtcaaggggacgaaaatcggactgggcgacaaatagagggacccaaagtgaacttattccatatccaaatccaaaacttcacttatttgtgtggcccaataggaccgattttgctcggaggatagtatggctttgggtgggccggattcagcccaattaatggctcattcgccgggaagaaaagctgggcttccttttcctgagaagaagaaaaaatgcagaggaaaatttctccttagcgacgacgaggcggcgggcggccactctccagtgtcatttgcccgcctcacctgcactctctccatctctctcctccggcgaaggcgcggcgcggcggcgttctccccccgcctcgcctcctcctcctcgcgcgcgcggccgcggcgagccaggctcggaggcggcggcgttgacgggacgggctcctctcctctcctccccgaccacaccctaccttcgcccccgcgctgcctcctcgcgcgcacggccgggagacaagccaggggcgacgcggccggcctcgctccgctcggctccatctcggttccagtcgaattggaggtatccattctccctctctcagtctctctcctgctgcctcgcgccacctcatgagccggcgtccgcctctgatgctgcggattctgaaatttttggtttacactggtgtccaattcttcaatctcaagttggggtttaatacccgaccacccaaacctagaccgaagggtagatgcaggatcgtactagagattgttgagttgctgcagaatttaacttctggataggtaggtagtttgtgcagtttggaagaggggatggacatttttgggcatgggttacgttagttgtttgtcctagggggaaactgatcgtttgttgggttcgtggtggctactccatcaatgtaagtggaaggatactgtggcttcttacttctattatgttcatggtgcctgctcatttgatctgacatcatgttcacttcttcaagcaacctatctaagtgtacatttgaagtttctggaagaaacttctgatcttgtctactgtttttcttggataagtttcgctgccaacagttgctgattgtactattcccccagaatgcttaaatgcagacaataaaacggttgccaaaaagtgtccatagctcgttgcgctcaagcattgttctatttgacctatcaagggttgttgaggagctggtatataatagcattgacgcaaatgcgagcaaggtattactttcacatacaaaaaggcaaactattatgcatgcagtatcttcagtgacataagttttctttttgattcatttcagattgacatctcagtgaatgccagagcatgttatgttaaagtggaagatgatggtatgcctttatagctttgtaccttatgttttaaatttcttactgctggtatttgcttttagaatagtgtttcctgttgcaactattgcaggctgtggtattactcgtgacgaactggttcttgtaggagaaaaatatggtaagttaaaacttctactattatttatacattttcgtttactccctatactcaaaactgctgtttttgtcatattaaacaatgagggtgcattgttgcaagctccttcacttgttgaagcaggccttatggatgcttatctgatttctctaatgtcagaatagaattattatcttacagaaaagaaaaggtgaatacatgatttgcttagaattagatagtaataatggaaacagtatcattctgtgatatttgacatcgattattgatattgaaagcagatgtgtttattactattttttatcatcagatgtttttattgttattcgtatagattgatggttggtaaatgaaatcactgtgttgtttttgctgctgatgtcacccagtgatgctttatgcaaatcatcattaggtgcataaggatttcaagacaatatatctttgatttctcacttatgggtcatgagaagttagttgcattaatacctgttggcaggtgtgaatttactattttgtttattatgcttattcaccgtttctttgcaaccaaatatattttgatgtgctgtcctcagggtaaaaaagaattaattgtcagtgggtaggattatagaaacccctttatttaaacttttgtatcttgttagattcattcttttttaagacgtgttaaatgtatatccaccaccttaattacagtaaccattcactcttgttttcaatgcgctaataatgtataactcttttattccataacagcaacatccaagtttcataatgtcatggttgatggggaacctagttccagaagttttggattaaatggcgaagcactcgcatcactatctgatatctctgttgttgaagtcaggacaaaagctcgcgggcgaccaaattcatattgcaagataataaaggtagtttacacacttaaccttttaaaagctcagcataatcttgatacatacatccatagcgtatctgaattcttctggcaaatatacagggatccaaatgctcacacctgggaatagatgagcagagggaagttgttggaaccacaggtacatttttactctacatttaaagatcaagaaaataaaattttactctagtcgtgtattcatgtgtggtatatttacattttttgccatgttatataagctacgtatcgtaatgtttttcatttttgtgtagttattgttcgcgagcttttttacaatcaacctgtacgcaggaaacaaatgcaatctaggtaaatcatgttatctttttcatctgtacatgtttcttacaattcacaattttgttggaaagaagatttgattgtctttctcaacattatgtttttgtagttacaaaagagaactacatcttgtgaagaagtctgttctgcgagttgcactcattcatccacaagtttcactcagactttttgatattgagaggtagtctattgtgctacactagccatttttattttaccaataccgcgtgagaaagtgtatctattgacatatcttttttatgtatgtagtgaagatgagttgctatacacgattccttcatcctcccccttgcctcttgtatcaaacattttggggaaaaatgtctccagctgtcttcatgagatagctacctctgacaagcattttgctctttcagggcacatctccagaccaacagatgtgttctgtaataaggtaacatttatcatataagttgtgggttgttgaacaaaagtttggcaacatgtattcagcaaagtgtgtttttcctctgtaggatttccagtacttgtgtatcctacaatccagttcttcactgtctatttccatagtttcacataccatttttctgaaagcttgagttgggagatatccttgactttccaaagatatcaactcaagattcgtcagtaaaagcccaatccacaatatgctcaataacctggcatctagttttcaatcttctgcaaggaatgaggaaattgatgttcggagtaagaagaggcagaagaatgaagtctaccctgcatatctgctaaacttgtgctgtcctagatcaagctatgatctacattttgagccttcacagactattgtggaattcaaggtgatccattacacatttatgctttttaattccccttctttttctggtaaagcttcatatgtaaacaactgaccggataaaagtggtttgggcttttttttttttttgggggggggggcatgttgatttgtaccttcatttctatttattttaaaagcaaattttctttcttatagcttgacattcatttcccattcttttttatggtttttctactctttaggattggcaaactgtcatgtatttctttgaacgaactatcacagactattggaagaagcatgcacctcaactgccagaaggttagaaaaatatttacttccgtaatgatgtcttccctgaacaattttgaagtctagaagctgttgattgaatgattttcttattgttatccttttctattgtagtgaaagctattggcaatgatacctgtgtgcctttggaaagagatggtcagtgatttagtgtacacgattctcttcctcttttgattcgtctgccttgtgagctttgtgcacgtgttgtttttgcagtgaaatcaagtcaggaactgttaaggcgtcatggtgtgcagaagaaagaagatgtcgctgaattgtaccaaacagctctgcagaagaatacagtacgagacatgaattttgatacagctgccccagcaggtcctaaaggcaattacctttctttggatatgg

SEQ ID NO: 18840 - DNA, 933 bp, Oryza sativa
aagttccatgatatgcaagcagtttgcgaaagtgattacatggataggtccttcatcaaggatacatgtggccttcatttctttcatccattctcgttggctgatacacctcgcagtcacagtcgtgcaaggattgacttggaattgcatggaaggtcaaatgaaagcattaacagttggaactgtgaaaatattggcactgattttggatttacttcagacaggtttaatattgattcatcaatgatttttgaaggaagcaaacatctcaataactttggcaatggaactcaatctcctagttacttcaatcatgaatattgttctgtcggtcagtttgcttccaaacaggatcggatacccttgaaatcaaaacatgatgcaagaatgtcatatgatatttctcctgagaaaagttctactggttgtcatttgaatgtttctttttcccaagtggcaaaaagcagcaagcttactgaagatcagtatggatgcagtcagaggcccaggctttccagaggtagatataggagtcgttctgcaccaccattttacagaggcaaaagaaaattccctagattaaacgaaccactaaccaaattgactacagaaggtggtaaatataccactgttaatgactcaggaggtacgtcttctcagagccatggcaaatctttatactgctctgtcatgagcaataagtttgtatcttttatactggatgcagatatcacacctgttcaggagtatacatcacatatgaacgcaacccaacctattcctgagacctttagcaatgacttttctgacctaaatttcaggtatgcttcttttgcatgttgccatactactgagaatgtcttactctttttttattttttcataaacctcttactatgtacttatttttgccattttcttagcttgaaggga

SEQ ID NO: 18841 - DNA, 1100 bp, Oryza sativa
aattcctgcagccccttgagcgcataaaatgtttgaaatatatgcaggataccggaaacttgttggattttttctttctttaagcaggaagaattcattttttatgttcacatactatatgaagtagtcagtgtgtatatggtgacaaaggtacttctcggacagattttagtaacttactccttgttcttactattttacagcatgcagctgatgaaaggatacgtttggaggaactccgtcgaaaggttgtttaacttaaattgaccaggaatgttcataacattgtttcccctctttcatattcactttgtttggatttacaggttttatcagatgatggcagagggattacttacttggactctgaggaggacttagtacgtcactttatactttatagcagttggcatctgctgcactgtgttaatagcttaatataatatatctaagagaattattttgagattaagataagttttctttgaacactaggatgtgttgtttgatcttctatcatctatttatttgccaggttctccctgagactggatttcaattgttccaaaagtatatgcaacagatccaaagttggggctggatcatcaacagtactaattcctgtgaatcattcaaaaagtaggtgcctgacaatcatgtgaatgaaaaactttcttttgtgtacttagccttcggtgctattttatcgaggtcttcttgcacatcttctagttatgttcatttgaatctacttctgtaattaagacaatctgagccttctagtgctgtttaggttgcacaattttagtttgtgtttatcataccttcagcttcttatagtataagaatagtcagttcagaaggtcacatgaatttcttcaattaacatttggtgataacatgttatgatgcttttggatggctcagtccatcattctctacccattgtgaaggagcaaaaagctgtttatcccctctgtatacactagaatataataattgacacataccatttactttatattttaaaggaacatgaacgttctgaggagacaatcgcgccgtcttactcttgctgctgtgagtaaccttttctgcga

SEQ ID NO: 18842 - DNA, 1564 bp, Oryza sativa
ggagtgctctgtgattatcgaagaactgaaagcaacatctttatgtttccaggtaccatcgaaatgctacaatttccagatcttattcttactgttatctaagccattggtttactgatgaaagctccattaataaaccattagtagtgtctaatcaaggtttttctttgtttttttttcctggcagtgtgctcatggacgtccgaccaccgtgccgattgtgaacgtcgcatctctccgcggcgagttggcgaggctcggagcggtgaacggaaggcaagaagagacctggcatggtctctcgcaccatggacccagccttgaacgtgctcgaacgcgcctcagagaactgagaaagctacgtggtggcctgtagctgtacaacagtacaagatgtaggatcatatagagggtaaatagtccaaaagaaaaggagaagtgttgcatagtgcttcaataggaagcggcttgtagtttgcagagatagatatgccattggttcacgaagaagaggtaaaatggccatgagccgtgttgtacacttgtaaaccattgtgatttgtgaaggccattctcaccctgtaaatatatgacaatatttttcgcagttttcagagcaaaagccaagtccggctctctttttttttttttacaaagcaaaaggtaataagcttagcagcttgggctcctttgaaacacatgaattttaaatgaactaacttgatttctacaaaatttatcttacaaagtccgccttaacaaggtttttgcctttctttccagatgatgaccaaagtagaagagacagtggtagcccaactcctcaatcctcaatctaaagttgggccttgcttatgtgggccagcctatgatcccaagccaattcagcccatgatgagaggacggcctctctcgtgaaccgtgcaatgtactcctacggtacagcgttggcgcgcggctgcggctttcggagttccatttccccccccaaatcctcccgcccaaatctcggtcagtctctctctctctctccaattccccatctctctctcctccacctcgccgccgatgggcgccgccacggcggacgaagacttcgccaccccgccgccgccggcgcgggcgcccggcggcagggtgtaccaggtgggcggcgtgccggtggagttcccgtacaagccgtacgggacgcagctcgccttcatgggccgcgtcatcgccacgctggaccgcgcgcggcggcagggccgctcccacgcgctcctcgagtcgcccaccggcaccggcaagtcgctctccctcctctgctccgcgctcgcctggcagcgccactacccgctgcgtgccccgcccgccgccgcccccgacccgttcctccacggcggcggcttcgtccccgacgacacccagaagcaggcgacgcccggtacgcccccccgcgcctctcctctccgctcgtgtcgcttttttgcggcggttcttggagccgcagatctgcaaccattcttgctcatttcgctctgcccgttcttgatgtttaggcgtcccggagaaggcgaccagg

SEQ ID NO: 18843 - DNA, 1362 bp, Oryza sativa
aaatgaattactaaacaaacaagataaataaataagagtaccttgtaaactttgccaaaacctccctccccaatcttatatgcttctgaaaagttgtgagttgctagagcaatgtcctcaaattttacaaataggaattcaaaatcctggacaaggtttcttttcccaacatcatcggatgtactcatgacatccaaaattagctctctgtgcttctgcctatttcttctcttgcctgctcacaaatgaatatagatatcaatcattttatgagtaccacattggcttctaagaaacaaaaatacgttgattatacctttgatttttaaccatgcaaaggaaatgcatagaacagtcaaaatacaagctaaaactggcagcacaatcttgactgcgtcgctcttcgccgttccacctgtgcaacagtgccagtatggtgcaaagttttatgatccaaataacaaattgtaaatactactacctccattgtcaaatatacagagccacacattgaaatcctaaattgttaataaatttaaaattattagcatttgaaatgtggaaatgatgttaatataattgttatgttaaaaaactttatatattttcatttttaatatttttataaacatgtaattaaaaaataacaacttttttattgaaaactatgttagaacgtcaagtaaaaaagacggacatagaaatagtgatgcatagaaatataaaatatgctatatttgtttttaaattgataatgctgttgactttttatataatttttgaacattgcttttttttaagaaaaaatatacacttcatccgtcgcttaaatataagcatttatgtctatacactagctacatagccaaaaaaaacatctatatttttttaatggaggaatgatcatttattttgttgtgacttgtttatcatcaactatatttcaatgatgacttattattttttaatatttacactagatttttctaaaaaaaattgaaaatttacccaacgccatgtgtaaaaatcaaaatcagcagcatatgattcgttaaaaaacatgaggagcaaacagtgtgtgtcattttttacccgtatcaaggcctgcaatcctgaggtagagcgtgtcgctgtggccgctcccgaggccaactttggccgtgtcgatcaggtcccctgaccacaccaagcacctcgtcgtgtcgcccctggacctgctgctgctcaggttggcgtacgcgtacgccaggcacgagcagttgccgctgcactccgcggcgcacgcctcgagcgtcgccacgttcgccacgtgcacgaacttgtccggcggcttcatcccggccacggccaagaagccgtcgc

SEQ ID NO: 18844 - DNA, 2110 bp, Oryza sativa
gtagagcttggccggggtggagttggagggggagaagaagcccatggcgaaggcgccgccgtcggagacgacggtggcatcagaggttagcggcttaccggggacaagccggtcgtcggatgaacacggcggcggcaggaggaggaggacgacgacgctgatgatgacgtaggtgaaagcatctgatggatccatgaaaattggtctctttcttgctatttgtgagccaatgttgctcagaaatcttctcaagacatctgcttgctttagaaattgacggggaaatcaaaatatacaagcacgtaaaactaatcggtgtgcattcacgctatttatactcattgcttcaattaattgaaaatactcagtgtttgactcttttcagtcttcaaggtacagctttgacaacacaattatttattcgaatacggttaaaaattctaaagccgattattggctattggtcaccgaagagtatttttgacgacattcagcattgacgcatcagcttagctttgacaacataaggattatctattcaacatgctgtggcggttattggtcatctcaagccgattcgcgttgtgaaaccggttagaaactcgagaagtaaaaaaaatcaacatttcggcaaatttatcaagttttaccggctttcgtggcggtaattgtgataaccgacaaaaccgcctagcaaacggtgttcgcctggcaagtatgtatttgagaccttgatgtgtcctctcattttttccatctaactggctgttttggtccaaaacttcgacaaatttgccgtggattgcttcaaatcaaaccaacttgcgtccttatcctgaaagcttcaataaagacagctaaaaaaaagaccaaaaatacttcgccgctgctactttacgatattaataacacacagggtcagaaaccagtatttgactacagaggggatgcagtatctgtgtgcttggcataaaatttgaagctaattttgattattcttagcaattattggaaataaaacatgggcaagctagggcaacgaagttgacggagaagcctttgaaaattaaattctaaaattcggctggtgggtttcaacaacaatttcttcggaatcagtaattaataaaatcttagtgggctatcagagagagtggttatgctagcagccaagcaaatagctctattccattatccatttatcctactggtagttgcgttgtatcatatcttaactagtgaaaatactttctcatgatgaaaaaagaaagagccacgtcataccataaatattggtcataggattggctataaaaaaagagaataaatctcagccggggttgcaaggaagttactagatcccaagaccacttacgaacctgccgatctgtcacaccaatggcccattttcatttttaaccctataattatttctctttagatgtatctatactaatataaaaagaagttgtcctcctccaatgctacaggtcaaatcatccaaattgatctgaaccgtccatccgcgcgcaagttttctccaccgcacgatttcaccgccgaggattccacgcgcgaagacatcgttcctcctccacccgcggccgcgaagaccgcgcttcttctcctcgctcgctcctcctcctccccgcgtcctcgccggagctcctccccgctgccgccacttcgccgcatcctcgccggagccgacctcagccccttccgccgccaccgacaccggcgtgcactccaccgatggccggcaccgaggttggccctcttccccatttgccacttcatcatcatcagcatatcgccagtattggccccattgttgaaagcctagagtacgagtaagtccctaaatcctgttctttccttaatcttctccatacgtgtggaaattttgatctctatgtctgatgatcttcgttcttgagcattggtggttgcatttggtagatgaaaacacgatctgaaaacgagtaagttcccttccacctccaccgctgccaccgtcggagccgatgtcttccccagccaccgccgaagctgtggtcttccccatccggcgccgccgaactccaccgaccccgcatgccaccctgct

SEQ ID NO: 18845 - DNA, 4445 bp, Oryza sativa
caaaagtgataaaggaagtgtatacatcactatccacacattcaaccctcgaagcctgaaactttagctccaatcccgaatacttcttgaaaaataatagaaccaaggatctcattgatgtatgaggcaatatgagtcgcaattagtggtatcgacgcgttggcacctagttacacgataagccctcaaagcaagttcttgaaatagtgtgcaaggtgacatgagtctcttcggctcttgaatcatgcagaacattcatatgtttgtctattaaccatttcacacagccaaatatcaccatcaatatcattcatgctatcccctcaaagtaggatgtagcaattttcactcacatccattttcctcttgattcctcttctcttagggcgacactaatttccatttccatcgaataatgacaaaataaaatgaaacagataacattatttccaaacaaaattctttttctcttttttttctcctccctctctttggcactctctatataagctttcatgctggttatgacatgtctcctatttctatttgattgcatgcatccttaaggctcttctccactatctcatctagttgtttagcggtatttgctctccgtcatgctaatgtttcagctttaagactcttagaaaaagttgtatttgcattattttctgcttgcaagacttgctcagtattcacttgttgcttaatgttagcaaatagcaaccctcttccttgcttccgtagcttagcatatgtgtttgaagttcttacccctcgatcaatcaaagagccatatttgctacagctagcactattactcacacatgaatactagcagctaggtcatgtgtgtatgctccgtaatatatattatctatgtcttataggagtaagtaataattattatttttttaatgatattacatttatatgagtaaataatacttacatgcatatgcattaaacagtgaatcacaactcacttgaataatatatatagtgcactacgatcactggattaataacaagtgttgatatctaatttacccataaaaatatttatatgacttatatcattcaatattattaatccttatagcattatagattaagtttagcaaaaatatctttcgtattaaatactatatatacacttgtttaatatctttcgtattaaaagtatttatatgacttatattgtttaatgcataaattaggtatcaacacttgttattaacccagtttctagtcctttttgaaattgagtttttacatttctttagagaggtatttaagggtattgtttttcttatagagaaatcgattttttaagggaggagaggatacaaaaatttgttttttcgaaagctgtaataaaaaagtataacaaaaatcaaaagttattttctgagtatgaccaaaaattgcttaatttcagcgcaaatggttatgggttcaggggttgatgcggagtggatactatgtgcttcgacaggaatcctcgagcctctgaagtttgaaccatgaacgtaatccattaataaaactaggaaagaagccgcgcatatgcacgggtatcttgttcattgtctgtaaaaagagtgctaaaagaaatgatatgtcatattgtaagtactatagattatcttataataaaaagagagaagaaatatctacgtagcaaaatagaccatatactgtaatacactaacaataagaatgtctcttggattcaactaaaaatcactttatcccaactatacataatcttgtctattatcaccactacttattatcatcatcttcaaagctaggtcaatggaactgcacttataccacctaaataagcctaatacatcattaatacactaaaaaggtcatccacgctacatatctaagtgttcatatctcacttatttccaagtcatcctcgctacatatctaagtgtttgtgtcttatttcttttcacatcatacccgccatagacctaagtgttcatctctcacttatttctaaatctatttatgactgagaatactacttctaccatataataagataacaccgttagaattagacatgaatacccctctagtgggtgaagccgaccgtagccaccaagtctttcttctctattgccttgaaacatggttcttgcattaggttatattttaaaacatgtaacttagctttgtttttatcctatatttctagaaaatatataataattagtagcaagtataaacatcatgaacatattttgcttctaattttaattctacagttttaacaacttataggtacaacttttgaatttataaaggtgagatggagtattcataaaacacatatttctttccctctaatataccaccttcatcaacttgttagcgtatattactatgatgcggtgtttcttactcagtatcccacaaaaataaatctaaaaacacaccaaaaggatattttaaaggtacaatgttgatacaactttttaagtatttgattaattgcttaaaaaaatctcacgttctaaataatctctaagtagtatacaaatgctaaaaaaagttttataggctaaattagcaagtgtgccaatagacacgctgattttctagtgtgttctataacacaatacattggcccagtttagttcacgaaaagaaaatttttgggtgtcacatcagatgtttcaccggacgccgaagggggtttttggacacgaataaaaaaactaatttcataactagctggaaaccgcgagatgaatcctttgaacctagttgttgttagcatatgtgggttattgtagcacttatggctaatcatggactaattaggcttaaaagattcgtctcgcgatttacatgcaaactgtgcacgtgtgggttactgtagcacttatgactattcatggactaattaggctaaaaaaattcgtctcgcaatttacatgcatgtgttcaaaatgtgatgtttttgagaatttttttttaaaaactaagggggtgtttggaataaaaaatttagtccctctctccaaaaaataagggggtgtttgggaactagggactaaatttattccctctcacaaaagcataagtcattatggtagggacttatgtttttgtaagagggattaaagtttagccccactttagtccctccaaccaaacaccacctaagtctctaccctaagactaaagtttagtccctctctcccaaacacctcctaaaccaggcctaagagcaggtacagtagtaggctataagccagctgtaaacatattttaagaaaataaatgaggagagagaagagcaacgggctacaaatttatagccagctgtagcacggactccaagacaccgtgtgtgtatgacaggtgggaccatgtattaatagtgtagtatgtaactattgtatgaatgagctattagattgactatagatgaattgaagctagtagttggctacgctattaaacttgctctaatcctcatcatagtaaaaagtttgggataaacagagagtagcgcccccaccaatgacacgtgggccccgcggagaacacccaccaacatccgtgaaacttccgagaaataccaaaaatacccctccaagaagcacagggggaaagcacaccgcccgaactccgcctccgccccgcggccggacaaaaaatccggaaccccacccgtagaggcaatgacatgtgggccccacgtgaacccagaccgcctctctcaggacacagcaaccgcgggctagcgtacgcgccgcgtacaagagggaggcggtagccgcgtcgcgcgccgcgcggccaatgggaggcgagctcccggatcggtgacgtggcgagaaaatgttttcagatcccgcgcaaactcgcccaccgcccccgcctttaaaggcggcgcccttctccttcccctttcctctccaaatccaatccacccgcatcgcatcccacccacgaacgcttcgccgcttgataaaccaaattccccaccgccgcttcgttctcgccgatccggaggtaaatccatggctggctgcctcgaaatgctgctcgaatctccgcgtgttgggttgtttgtgttggttcgggagtgtgtgttgggttttgggttgttgtgttggttctgatcggttttgttcttactcggtagggctcgagatgaaggcgaggtcgaggtccagcaatggcgactccaggtgagttttgttggtggttttgtgcttgtgctcgcgggtggtttcggttcgttttggttgggttgggttttgatttggggttttttgtggtgtttcgtgaaggctctcggtgaggaagaccaaggcggagaaggacccgaacaagccgaagaggccaccgagcgcgttcttcgtgttcatgtgagtcttagatccgtgggtttttgtgttagtggttctccg

SEQ ID NO: 18846 - DNA, 2219 bp, Oryza sativa
agattggcaaggctggtggtgacaagtggaagtccatgactgatgctgtgagtgtctcacttccccttatttgaactgttccatgtgcatttgcgctaattggtcgcgaattgaggagttgctcggtttctctgatgccgtgtctcgttctagatccgtttactcttgtgatgccagtgttgtccatgtctctgtattgctcgtatggatctaattgttgctgaggattaattttagcctgcttacttgtatcactgttgctggttcaacttcaaatatgtgggggaaaatgcacttaaatttgtttgctcatgggtaaattcagattaggggttatgtcgtagttgctgtgccttgtaaggtcggtcatacatgttcaccaagttgaaattgctcctcgttccaatcctacaaatagatctgtaaattactgccctaccttacttggttaatgttaagtcagaatgttcaccgcgaagtcaaattctagtaaaattttgtggccatatgtactcaaccgcgatgtttaggcttgtatttggaacagtggtttcatcatttgtgctgatttgttgtctctgtcgtttgttgtgaatgctctgttagtgtttcagtccaccttgtgctttgtttagctcttacatttgaggtgttgaaacgatgcaggacaaggctcctttcgtgaccaaggctgagaagctcaaggctgagtacaccaagaagattgacgcctacaacaacaagcaggtaatccccctctccacaactctgcacctgcaactgtcatgacacattgaaactgatctgttgtgcgtttctcgttgcaggcaggaggcccggctacctcaggcgactctgacaagtccaagtccgaggtgaacgacgaggacgagggcagcgtaagacctccctccaatccgcaacaccgtgtctccattaactcataaatcttcttgtgtgacctcactgactgttttgtgtttgtgtatgtgcagggtgacgagtgatcgatggagggctgcaggtagtagggaaagttctcgagtcggcctaaccaaagtggacgttgctggttgctgctccttgctagtgttcggatgttgctgcctttagcttttagtcttagaggtctcctcctgtagcttagctctcatgtggtgtcctcgctctcttcggcacttgaccaccatcttgtcgtctgttttgtctcactgtctgtaatctaagtgagtactcgtatctgttgctgttttaaatctcagatctcagtagatggtgccatctgtgttagttgctgaagaggaaaaggaaaaaaatataacaagtctcttgcatcctgtttaatgatgcatccggatctgtcagttcgtttacttgctttgcattgtgatgcctcgcttctgaaatgtttctccatgcgcttttgctgtgagcctgtgtgcagttctctgcattggtttgggtaaggttcagtactacaagttgctgaatgtttgtggtgcatctagtaacctgtgtggtacagtaactgccactgctcgatcttgtgatgtacagtaataacttgatggatagtagttatgtcttgtttagccgcgattgttggaactgtctgagaagtggctggcaagttgcattctgttttgggtatctcatatctgcatgcttgtgatgatcttctggttggttcgttggatgtgaagctcccggcatgtggtggtattgtacacgttctgtcaggattggagccgaacagcagcttggtggttggaaaggttcttttctcagttttgttgttactcccattagggcatccacaatgttgatttttaaccggtaagaagtattaaatgctctcttcctatccggtaggaagcattgtaagagtggcaaagagttaaaacccagccatacatctactcactgatgtactgtagtgatgattcgaatgcatggaaattgcggagagtggaatatatcttgtgatttctactgtagtaacttgccacgcaatgtccacaacttctgattcttccagtgtcaggtgaggattttgttggatccggacctgctttcaagagatattattttttgacagttttggttagtatttatgacactcgaagtgcgtgagctgcttccgtagcatagtggtagtgcgttcgcttcgtaagcgaaaggtcgcgagttcgatcctcgccgggagctcgatccctttc

SEQ ID NO: 18847 - DNA, 4947 bp, Oryza sativa
aaagttaatttaagcacaccgccacactgatgcatgattatatctgtacctatatatctagctttctgagaaattatgatgtagattcatgtgcaatcttttggcaatcaattggtccatttggtttgagcaaatcaagcataaggttaattctttaacacactagtgtcataatggtgttctattagttaggaaagagagataagttaataagagagaattaaagaagacggccagccgggtaggaaggggaggatgcgagtatgatgatggattcagcgtggaataaagtggaaagcaggcgacaccgacatgcatggccttgagagggaagaggctggagatcgagaagaagctcttggctttgctttgtctctgcgctttaatgtctcatgatcaatgcactgccctattcagatcagtgtctgctcatctcagtattaaagggaggattagttgtaactcaccaaagaacgcagcattactagtgctccttagacctggcctggctttgtgtttttcacaggccagtaagctagactacagatttgtctcatgcatttggagtagatcataaagcaaagggatacatgtcacataactagtagtagtaatacactattacatcacttggaagttagtacttctactgcagaacagatgcaaaaaagttaaattttactccctcccagaaattttctttgtcaagggcgaaagaaagggatcaaattctcaaagccctagctactatacccaacctagcttattatagctgaccaattagcagttttccaagcaattaatctagtagtagctgtctagctaggatcgttgccctatatcacagtatgatcatgaccgtgactgatcattgatcatgatgagtgaaatagtcatcaaagagatataagtcaatttagcaaatatatttacatggtagatcgatctatatacacatgtagtagctaaaaactaagatgatagaatatagatagatagatagatatataccttgatgggcatggtgtcctcgcagtccttgtcgtcgaggcggtactcgtgcatgacccagtcggtgcggacgccctgcggcgcgcggccgcggtagtagaccagcgtcttcttcatcccgatggcgcgccccccgtgctggtgcaccacccgccgtctttccccgtcgacttccagtaccccgccctcgtcgccctgttcgtcctgaacccgttcggatacttccgatcccgaggcccgaagaaataccactccggatccctactcggcaagaacgatttctctgcaaataattccatccatatcatcatcatcatcatcatcatcgacatctcatgtcatcgatcatattaatcagcatgtgttcaattgttcatcatcaggattgattatatatatatatatatatatatatatatatatatatatatatatgcaggcatgcatgatcacttaccagcgagctcccatggctcgcacttgtagaggtcgacttcagggatgatgtcgagctcgatcttgagaccgtggatcttcctcttgaggtagtagttcaccaactcctcgtccgtcgggtggaaccggaaccccggagggagccccaccggcgccatcaacgtcgatgtcggtggccgccgatatgacgacggcggcctctccggctgctggccggcctcctcctcctcctccggcgccggcagctttgcccaaagacaccttgcttcttctgcgctgctgctgaggcctttcccagctgctgctgccaccacccttataagtaggtttttcaaggcagctaatgctggggtaggaggcacagtagtagggacaccggtcgacatagtcatccctcccacaagattttggtcgatcggatggccacctttggctcctcttttgcagattccctgatcaccctcacaagaagcttgaaccttttccatctctctctctcactcactactagtctactactactctagctagcttctctctctctccaaccccttgtttgatcaaaatatgtgtctacgactacctctgatcgactatagtgaaccaatgggggttaaatatactggcctccctggctatgtatagatactatgtaatctagatcttatcttgggtttatgagctatcaatggctctatctctaagagttaaaagcacttctaccaatgtgctatgcttgcgcggtttttgcggatatatggaggttgtacgagatatctataaagtgtaacgcatatatcccatggatatcaaaatttagatatcatttatgatcaccattattttgtatcttgatatagatgtacatatagcttgaagattttataccgattaaatattagtgtcacattttttgtacgtatgttgtagaaactgtggatggtttgacgcttaaaataggacattggagtgtttcattgcccaatatacgaagcataacacatgcatatatgttgattttcaaatttggatatgatttatgctctagtattaactgaaacacatttattttttatatactagaaaaatgcccgtgcgttgcaacgggtgaaggctattttaatcttattgttgttcactgaaattcaccgtgagaatacacttagctatatatttttctagaagatcatatcaagttagcatgcgagtctttttaaagagatttcttatatgactccttttgtattttcaaaagcaaacaaacttaaaacccgactcaaatacggatatgtatttccaaaagcaaacgaacttaaaaaccgactcatatacagatgacgtaccaaagtatcggtaaaaacaccttcactatttataatagcagagatatacaactatgattgtgtgcagaaaatgtaaaaggtaagtagtgatgaatttgataaggattgagcaattcatttttttttcttttggagagttgaagatgaatcataccaattatcaataagaaaacttttagtgtcaataaaataaaattcttctgatctaagtttgactattaatttctatatggtagtattttttgaaaaaaaactgaaaatctaaacatatgatttttcatatatctggctagcttaaataatcaaaagttttaaatatgtctttttatgggaatgttgacttaatatgcaagtacaaagttagccaggatagttagttgataaagaagcgggggcttgcaaagaatatagtaagttggtaaaattatgtacgttcatcagggctgcttagcttggtgggctgctcgtgtgacatggtgtctggcccaggtggcccagttggatgtttgcatacacctgcatgactgcatctggagatggattgaaccaagagagcgccacaccaacgcaccctgcgagtcgagtccgttggagactaaccacatgagactaaccgcgtgacattgaaaagaaaatcggatagggagaagaaagcgacgtacgaaactattaggcaaaaacatcttaaacttttataataggtaaagatatagtgaaataaataaaccatatttttcaaaaaatatcaatctttgttaattttttgacaaaaaaaaatcttggttaattatgctacattgtttaactcattggtatttcacaatcaccaccaagcatgcatatatagtatcgtaatgataccagaaggttgcatagaagtatttgatattggactgctagcttcttccatgtttgctaagcgtttgtaaaatttatgcactgcatgacaaaaagcaaaagagaaactaaagaaagaaaggaaatagtaaagaacagtggggaaaaaaatatctttagatgtgtcttgagggagaagaggatacagaagagctttgctgtcatagtccttgctttggtgtgcgccatgcatatatgcatcagcttttccttttactccataagttttcttcacctttcaatcgaccgtgccatgtacaaatgccagtgatgatcgatcagagaaaggagattatgcccacagaaaacgaaaatgcacaggtttgatctatttagaaagaacgaatcaaccgtgtcttcaatcaacgaagcacatcctggacgagatggtgagctgtgtgaggtagatcgacttagcaactagtgtagttacaaatttcctgtgtacaaatctccagtggaacacccattacttgaggtcatattagacttgacaaaaaaaattcagctacaccgcgtactttttctacatattagtctttttcacaaaatattttacaaatagaaccttcataaaacttattttaaaaaatagaccataattcggcaccaagattattaacgcggaagttaaatgtctcggcactgaaactgaatggagcaagaggtgggtgcttgctgctgaccctcttccacttacgaacaactttcctctctctgacgcctccctacccaatcataatccaattgatttgctattaaaaaaaataacaaatcaacatataaggattcatttcctgcattttatttttattgttagtaggacgaggtgtggttcctcccttctctcccacactatacgttgatttggtgtcaaataaaagcgaaaaaactcgataaagtcacatcttctagtttatttatccctcccattttttttaaaaaaaaacttttaaaacttagaatctaggatgagggtgtgggaggtcgagtgttaaacgttagtgccatcgagactacaaggtgttgagatgtctaacgttggcaccaaagacatactctcatcatatcataaaaaacagatatagaataggatgtgacacatcctaatactatgaatctaggcactattcgttcagattcgtagtacaatggtatgccgcattatgttttaggttttcttataggatagagggagtacctaacaaattaaagtacaaacgcagacaagtgctaacac

SEQ ID NO: 18848 - DNA, 3312 bp, Oryza sativa
ggtgccaattttcctttgatatgaaaacgacgaactcctcgaagaggcgtgacacgaagatacacataatctccttcttcaaaactcaaatctctgcggcgattgtcggcataactcttatgacgagactgagccactcgcaatctttcttgaatgattttcaccttttcttctgcttctcttaggatatccgtcccgaaaacctgacgttctcccgtttgatcccacaaaagtggagtgcggcacttccgaccatacagtgcttcgtaaggagccatctgaagactagcttgataactgttgttgtacgaaaattctgcataaggtagactcttatcccaacttccaccgaagtctaaagcacaagctctcaacatgtcttccaaaatttgattcaccctttcggtttgtccgtctgtctgcggatgataagcagtactaaagttcagcttagaacccatctcttcctgaagtttcttccaaaaatttgaagtaaactgactgcctcgatcagacactattttcttagggacgccatgcaaacacacgatccttgccatgtacaattccgccaaccgacttccagaataggttgtctttaccggaatgaaatgagctactttggtaagtctgtcgactatcacccaaatagagtcatgacccgatgacgttctgggtaaaccagtgataaaatccataccgatttcttcccacttccattcaggaatctttaaaggctgcagcaaactggcaggtttctgatgttctgccttgactcgctgacaaacatcacatactgctacatattctgctatttcacgtttcatacttgcccaccaaaatctttccttgagatcctggtacatcttagtactaccagggtgaatagagtataaagtatcatgagcttctttcagaattacatcttttaaatctttgttgtcagggacacagattctctcgcccaaccaaacagttccttgctcatcctccaagaaaccgatagcttttcctcttctcatattcttcttgatctctgaatatcaggatcattaatttgggcttctctaacttgatcaattagagtgggcttcgcttctaaagctgcaacgaaacctctactgacaattcccaaatttaatctttcaaattcctggcataactccaatggcaactgtcgtccttcggtagcattgcaatagcctttcctgctaagagcgtcggctacaacatttgcctttcctgggtgataatgaattcccatgtcataatccttaattaattccaaccatctccgttgtctcatgttcagatccggctgagtaaagatatactttaaactcttgtgatcggtatatacctctgtacgagtaccgaaaagataatgacgccaaattttcaacgcatgaactactgcagctaactcaagatcatgagtagggtagttcttctcatgcggacgtaactgacgagatgcataggcaaccaccttcccatcttgcatcagaacacaacctaacccaagtttggatgcatcgcaatagacttggaaacccttctttggatcgggtaaaatcaaaataggagctgatatcaagcgattcttcaactcttgaaaactctgctcacattcttctgaccacttgtacttcacatctttctgtagcagtcgtgtcatgggcttagcaatcttggaaaaattctctataaacctccggtaatatcctgcgaggcctagaaaactgcgaatctctgaaactgtctttggttgtttccagttggttacggattccacattactgggatcgacggcaactcctcctgctgagatgacgtgaccaaggaacttcacttcagacaaccaaaattcacacttgctaaacttagcatacagttgatgttctcgtagcttctccaatgcaaggcgaagatgttcttcatgctcttctttggttcgggagtagataagaatgtcatcaataaagaccaccacaaacttgtctaggtattccataaacaccttattcatcaagttcatgaagaaagcaggggcattggtaagtccaaaagacataacagtacattcgaacaacccatacctagtggtaaaagctgtcttaggtatatcttcctctttgattctcaactggtgatatcctgatcgaagatctatcttggagaatacagtagcacctttaagctgatcaaacaaatcatcaattctgggcagcggatacttattcttgatagtcacatcgtttaatgcacgatagtccacacacatccgctgagtatggtctttcttttccacaaaaataaccggagcaccccatggagatgaactcggtctgatgtaccctttctgaagcaaatcgtctacttgccttttgacttctgccaactcattggctgccattctataaggtctcttatggatcggagttgttcctggtaccaaatctattctgaactctatatcccttttgggcggcataccaggtaaatcatctgggaacacatcgggatactcccggactataggaatctcttccaaagttatctggttcagtcttgaccttaaagactcagatgacaatgcatgaacagttacaactcgaccatcattgctgatgagagttacttttctgttagcacagtctatcacacctttatgtctggctaaccagtccatccctaggatgacatcaaggtctttggattctaacaagataagattggccagaaatggtactcctttaatttctattctgacagaggggctacgttgcaaagagagtgcttgattacttggggtactaaccatcaaaggatgtctaagatcttctacttccatcccatgatttcccgcaaaactcatagataagaatgaatgtgtagcaccagaatcgaaaagcactgtggcaggaactaagttaacaaggaacgtacccaaaatcacatctggagcatcttgagcttctgcagcagcgacatgattgacacgggcctttgatgctggtgcggtagagttgctctgagtagggacaaccttcacgcgtcggggcttcggacacttgtcagcgtaatgtcctgggtctccacagttgaaacacaccacgggtttgctgccttgctccctcttggcaggttgttgctgtgttggagctgcaacaggacgtggaacttgattacggatgttgttgccagcattgttgttgaagaactgacgctgcggacgaacaatagacgaagaacctccctgtggcacggactaaagtcctaaagtaagacacaacctctgattattcccct

SEQ ID NO: 18849 - DNA, 3510 bp, Oryza sativa
ttcctgcagcccgaatgaatgtgtagcaccagaatcgaaaagcactgttgcaggaactgagttaacagaaaacgtacccaaaatcacatctggagcatcttgggcttctgcagcagcaacatgattgacacgggcctttgatgctggtgcggtagagttgctctgggcagggacaaccttcaccgtcggggcttcggacacttgcagcataatgtcctgggtctccacagttgaaacacaccacgggcttgctgcctggctccctcttggcaggttgttgctgtgttggagctgcaacaggacgtggagcttgattgcggatgttgttgccagcattgttgttgaaaaactgacgttgcggacgaacaacagacgaagaacctccctgtggcatagactggggtcctaaagtaagacgcggcttctgattactcccctgttgtgctttgaagtgagcaatccggcgtttcttctgctccatgcggttgtacttgtcttcctgacgaatagccttatccattaatttctggaaatcagaataatctccagtcatgagtgggtaagaaagctcatcattaagtccttccaagaacttctcctggcgctcttcatcattgcgcacatcttccggagcataacgagcaagacgattgaactcgtgcagatactccgtaacagagcgagatccctgggtgagcgacctgaactccttcttcttgagagacaccactcccgatggtatatgcgtcttccggaaagcagcggtgaattcaagccaagtaataggttcagcagtagtcctattcaggcggaagtgatcccaccattcagaggcagggccatgcaactgatgtgatgcaaatgagaccttctcctgatcagtgcactgaagcaaatccaacttcttctctatggcatgcagccaatcaccagcttcaacaggattagtggtactagagaaaacaggcggcctcacacgaagaaattctgctaacttattctgaggaggtgcatggttatttccttggttctgctgattctggagttgctgcatcatcatgttcatgagttgtgtctgttgagcaagaacttgggcaagtgtgggattctctccactttattgttgttattggggttgttgttggggccattcccattgctgcgagtgttcaccatctggcatggacagggcacaagaagagaaaccgggcaaaactacttaggacagggaattactttaacttttattgatcttaactgagtttcattattacaaactgaagactctcacaccactaaactcaccaacttcctaacactcaaaagcaaacaaacgcatgcacttacatcccaccactgatgtaaatcacatgcgagacacacacaagcaaacttaaagcaagcaaactaacacaacgatctaagacaacgacttaacaagtcactctagttcttccgagcatcggaggtcgattgaaggctcattcggctcgtcttcatcatcttgagttactacccactcaatcttggaatgggtgtgcttggattcttcttcttcatcatcacttatgatgatgaccggaggatctgctagggttggggcaacttcattctccaccacacgaacctttggcgccaattgatagcgagggacaaatagagctctcttcattgcagtgagacgaatcctggccttctgcggcggtgcttctcccttcaatgcggctaattccttctccaaacgatccaccttgtcttctagcttgcaaatcttaccacgattccggtcttcacgatcttgagccgctaatacagtctccgcacgactttcatccatagcccacagcatctcaaccaaatgccttgtggtagcatcattctcaattccttcagtctcaaggtaattgccacggtcacttccctgtggttgacgaggatggtagcgatactccgtatcggccaactgatcactgtagcgatcgcgaagctctcctatggcgatccttgccacctcctgacacgcatggatgtagtttcttcctccagcttcgaacatcactgagggaatatcttcactattactgttcaaggtgactttgactcggcacttctcttcatgacgatcatgaggaatctgggcataaaaaggggcagtcccaaatccaatgacaaaggacatcgtacgcaactcctggacaaaaccctcaacaccaaacaagtactcaggcttgtagcgcggcatctaaagacaagtgaaaggagggagttaagacatctatccaattaacagcacaagtttttggattaatttgaataaagtttagaaatcaaaataaaccaaacctgcaggataagttgaaacagttggaaacaaggttacaagctttgtgcttttgagtaacaggttttaaaagaaataaaagaaagttataaaatcaacttgctaaatctattttattgcagcaagattaaataaaacaacattgtaaaacttttgctggtaaatgagccattggtacagtaataaatgtacggtactaataacactggaataaattttgaatgagaaccattaaaagagattatgaagtgcatgtgccattagtttggtttaattaaaagagaaagggaggagaacagttctacttttccaatatttttagaaggcttctatgggtaaccatttggcataacctagggtcaagggggctctgataccaacttgtcacgcccggaatttctatccaaaattccaaacgcttacatgtgtgtgaaccctcgtccaggaatcagccgaggcacacaataacaaattgataatagagtacaattattactctaattaataagcgtataaagtgtcattacagaggtagatagttcctctcaaacaataaatatctaagcagcggaaaaagaaataaacggcgcagacggctccactccacataccgaggtgcgagcttcccttttgtctgaaacctgtgcacacctcgcaatggcgtgacccgaaggtatacaaaatcacccactgcgaattccaggtcacggcgacggttatctgcataacttttctgccgagactgtgccacctttagattatcccgaatgattctgactttagcttcagcttctctcaggatatcagtcccgaacacttggctttctccaacttggtcccacaagagcggtgtccggcatttgcgcccgtacaacgcttcataaggtgccatttgtatgctggcttgataactgttattgtaggagaattcggcataggggagactcttatcccaggtcttcccgaaatctagtacacatgcgcggagcatatcttctaggatctgatttagatgctcggtctgtccatctgtctgcgggtgatacgcggtgctgaaatttaatcgggttcccaactcttcttggagtttcttccaaaaatgagaggtgaattggcttcccctatcagatacaattttcttgggaacgccatggagactcacgatccta

SEQ ID NO: 18850 - DNA, 4062 bp, Oryza sativa
ttgtacgcaactcctggacaaaaccctcacaccaaacaagtactcaggcttgtagcgcggcatctaaagacaagtgaaaggagggagttaagacatttatccaattaatagcacaagtttttggattaatgtgaataaagttggaaaatcaaagtaaaaaggtaagtaaataaagtaaaccaagcttgcaagataagttgaaatagttgaaaacgaggttacaaatttttgtacttttgatcatcaggttttaacagaaataaaagaaagttataaaatcgacatgctaaatttattttattgcagcaggattaaataaaacaatattgtaaaacttttgctggtaaatgagtcattagtacagtaatagatgtacagtactaataacactgaaataaattttgaatgagaaccattaaaagagattatgaagtgcatgtgccattagtttggtttaaaagagaaagggaggagaacagttctacttttccaatatttttagagggcttctatgggtaaccatttggcataacctaaggtcaaggaggctctgataccaacttgtcacgcccggaatttctatccaaaattccaaacgcttacatgtgtgggaaccctcgtctaggaatcagccgaggcacacaataacaaattgataatagagtacaaatattactctaactaataagcgaataaaatgtcattacagaggtagatagttcctctcaatcaataaagatctaagcagcggaaaataagataaacggcgcggacggctccactccacaagcagcttgaccaaggctacacctaatcctccacaccatcagcatcattgtagaactcttcctctgatgaatgattgcaaggtgagtatatgacatactcagcaagccacgcagcaaatatgcaagtgcacaggataacaaaggatggcataatagggtttcttttgcaaaagcagcatttagcaaacatttgagaatttaataaaacagttaagtaataattaaacaatattaatccaacgctatacaacataccctgttgtataggcccaaccattctgaacaaccatcccggctgcacagttctatctccaaaccaggaatataccattccaaaccaggagctaatcaaattattaccagttatagcatcatttactatggtgagaagggtgagactaatcacgaaagacattgttagacccgcccataaccgcgggcacggctattcgaatagttttactctgatcagaggtgtaccactgtacccacaagacacaaccccacatcatgtcaccatgtgcctcaataccaccacggtacctcggaaaggagttgtgacaataccccttgcataacacaatccactgcagcgcaccttcctggatcataatcacccccttataaacaaggcatggactccccagcgacccccgtgggcttatctccgccacttctcagtctggtgccccgcaatgaaccatgttatacaaaagataaagccgttgcccacgctggcttgtggttggcacggttaatgtttcacaaccgaaactcgtgaaccggtccttaattgtcatgagcacgaccatcaaaaccatgtgctcacaacccaccattaccaggttttagttggcacattaattaattaaccaatcacaattgaccatcgtgagctatcattaaataatagtgaatcataagttatcccaaaagtgtgctaatgtttctaagcatggctaagcaattatatctaatatctagttgaaccaatataaataaagctcaactagtcaaattataataacccaaggtatcaaggaataaagtaatcaagaacaaaagggctatagcaaacaataggttaattccacccaatgacattcgaaaataaatgcaatagttgaatagaaacaatagctttaaacgggatcaacatgctcaaagggttgtttgggatctgtgtgacttgccttgctggccttggaactcttcaaactcttctcctgcgaaaacggactctccggaaacgacggaatctaagcagaaaagagcaaaatcaccaaaacagcacataaacaagcatgaacagtacatgtggatatttttattgtgtagatctcaattttagaaaaatttagagacttgaaccaactaaatcggagctaagatgaattagttatgaatttttgaagattaaatcggattaaaacacttatattgattttaattgaattatgacgcaataatgaattatttttgaaaaggaaaagggatttattgcgtcagcgggctagggtttcggtggaccgggcgcacggcggcggttcacgcgaacggacggccgagatcgacttgatccaaaacggacggccgagatcgatcggtccacgaccggctcatggaagagggcgacgatgacgtcggcgatgacgtcaccaccggcggcggcggctcggcggctcggacggctcggacggcgcacgcttgccagcgaacggcggcacttcggcaagaacggaggacaccaacgggtagcggacggcacggcgaactcaccggcgacccaagcgacggcggaagaccaacggacggcgacggcgacgaggaagaagcgacggcggagatcgggtcgacaacggcgacgatgctccggcggtctccgacggtggcgaaggggcggacgaggacggcgacgacttggcgatcccgacggtggccttcctgagcgatgacgatgaccggaacggcggcggcgcagggctggagcgacggcggcgatggcggctcgaggtctcacgacgctagggcgctaccggtgacgagaggcgaaggcgagggtggcggcgggtagagaagagctcgggggtccttttaaaggggctcggaggcagcggcgaaggcccacgacggccggcgacgagaaggaaagttcgggaaaatcgaatccgaaacaaactcgaatccacgaatttccaaacgattttagccggtgtttccaaaggagaaaaggtagaggaaatcccgaagatcatttcccctcttttgattcggccggagaaggaaaggatcggccgatttggaaagcggcggcggcggcgcggcgctaaggtttcggccggaggaagacgacgactccgacaggcgggccccacctgtcagcgagcgaggacgcgcgcgcgggcggctgcggctgcggactgggccgacttgggccgaggagagagagaagggttttgggccgactttcggcccaaagccaaaagaagacttttcaaaacctttttcaatttaaattattttttaaatgcaattccatttattaaaaatacttccttagctcaaataaatcccagaaaaatctaggaattatagaattaagcaaagtatttaatgaaattttatctggccccattttatattggaatttattaattaaaattagatcttctcttctaggcttttaaaataaattctaaaaattccatttaaacaacaatttatatattttgaattttcagggtgtgacaaacctacccccttaaacagaatctcgtcctcgagattcggaagaactggcgaacagatgcggatgagttgacttcaattcatcttctcgttcccaagttgattcttcttccgagtgattactccattgaactttgcaaaaacggataactcgattcctggttcttctctcatctatttccaagatacggattggtttcttgtcgcgaccgggaaaattgccttttcccgaacgccagtgtattaatccccgtcccaggaaaagccggggtacaccatacaaacatgatataaaagacacatctttattatatcgataatatttacattattacaaaggcgcttcaggcctgacaaacaaaaataaacagcagcggactagcgggcctacggctccatcttcacaggcgctcaactggggtataagccaggactccacctaagacatcttctctgaagcttctcttactgaaggggggagaaagatagagcaagaatgagtacaaccacagtactcagcaagtca

SEQ ID NO: 18851 - DNA, 3618 bp, Oryza sativa
gggatctgtgtgacttgccttgctggccttggaactcttcaaactcttctcctgcgaaaacggactctccggaaacgacggaatctaagcagaaaagagcaaaatcaccaaaacagcacataaacaagcatgaacagtacatgtggatatttttattgtgtagatctcaattttagaaaaatttagagacttgaaccaactaaatcggagctaagatgaattagttatgaatttttgaagattaaatcggattaaaacacttatattgattttaattgaattatgacgcaataatgaattatttttgaaaaggaaaagggatttattgcgtcagcgggctagggtttcggtggaccgggcgcacggcggcagttcacgcgaacggacggccgagatcgacttgatccaaaacggacgaccgagatcgatcggtccacgaccggctcacggaagagggcgacgatgaccaaaacggacgaccgagatcgatcggtccacgaccggctcacggaagagggcgacgatgacgtcggcgatgacgtcaccaccggcggcggcggctcggcggctcggacggctcggacggcgcacgcttgccagtgaacggcggcacttcggcaagaacggtggacaccaacgggtagcggacggcacggcgaactcaccggcgacccaagcgacggcggaagaccaacggacggcgacggcgacgaggaagaagcgacggcggagatcgggtcgacgacggcgacgatgctccggcggtctccgacggtggcgaaggggcggacgaggacgacgacgacttggcgatcccgacggcggccttcccgagcgatgacgatgaccggaacggcggcggcgcacggctggagcgacggcggcgacggcggcactagggcacacggtgctagagctcttccggcgacgagaggcgaaggcgagggtggcgacgggtagaggaggcaccgggggtccttttaaatgggctcggaggcggcggcaaaggcccacggcgacggcaacggcgaaggaaagctcgggtagaacgaatccgagacgaactcgaatccaactctttccaagacgatttggccaaagattccaaaggagaaaaggtagaggagatcccgaggatcatttcccctctatcaattcggccggagaaggaaaggagcggccggattggaaagcggcggcggcggcgcgaaactagggtttcggcccgaggaagacgacgactccgacaggcgggacccacctgtcagcgacagcgagggcgcgcgcgcgagcggctgcggctgcggactgggccggctgggccgaggagagagagaggaggttttgggcgactttcggcccaaagccaaaagaagactttttaaaacctttttccatttaaattatttcttaaatgcaattccatttattaaaaatactttcttagctcaaataaatcccagaaaaatctaggaattatagaattaagcaaagtatttaatgaaattttatctggccccattttatattggaatttattaattaaaattagatcttctcttctaggcttttaaaataaattctaaaaatttcatttaaacaacaatttatatattttgaattttcagggtgtgacaacaatcttctcggagaggtcaccgggcaacttctccacaagccgtctaggaggcggcatcctccaagagtaacaagcaatgacccggcgtgagatgatcaagtgccacactagctctacaatggaagcaaatgcacttgactcttggctaatcaaccctataacactagatggatgaacacaaagctcaagtgagtgtgagagaggtgcaaggggtgtatgcaattgaattgggtgccaagagagtccccttgctgctggtgggagagtatttatactcccacccaccaaaactagccgttgggggcgaaatcccccaactttgtgctctgccggtctgaccggaggtatgtggccggtcatactgtgctactctgcaacggctagaaaactagcagttgtagcgctgtcagagggccccatcggcccggccggtcagaccggagttgattgggcggtcagaccggagtcggctcggtcagaccgccatcggctcggtctgaccgactacggctccgtcggctctgtatcggcagtcccgaggagcaccatttcggcctccagggggccggtctgaccgggcatgtgccgccggtcagaccgacattatgggccggtcagaccgccaacttgtggccggtcagacctgccctggtcaggccgaacccagtgaatgtgtgtgtgtgtgtgatgaaaaagtgagcacaagtgataatgcaatgacctaatgtggcaattaaaatcatctctttgctaggtcattacccctcttaatagtacggcgaaactagaaataaactagcaaatttgatcgccctacaccccgatcaattctaaattaaagcactagttttaccgtcttctttctctttgccttgcgccgtcaattttaatccatcgatcgtcatccatgtgcacacatgacgtggacctaacttaaaatattatttcaaagacaacggttagtccacaattagcgcttgtcattaattaccaaaattaacaccgggggcctagatgcttcaatctccccctttttggtaattgatgacaaactccacaaatagatatataatcaaacatagagcacatggacatttattgcattgaaaagcaaaggctccccctaaacatatgcataaaaatcacaaatagcaaatatggagccaatgcacattacaatatcacatttcaacatagcacaacacatatgcaaattatatgtgaacttcacatatgaatcaaccgaatgcataagatggtcacaagtatatcaatgtagcaccaaccatccatcatagcacaagttcacatcaagaccacataaagggttcacaaataaatgcataggctattacaagaccacgaagggtccaaatgacataaagagtttaacaaaacgacaaataacacacaagatagagtaatagcccatacccatacaaaatatagctcaatcctccttaacctattaaatacgagggcactatcctcactactactagtcccaacccaacaaaaaacacacttttctcccccttttggcatcaagcaccaaaaaggtcttcactcttgtggagaaaaaggaggacgcgccgaagtggaaggatgagaagcatcacgatgacgatgatacacgaatgcttgggagctctccaacatttggactcgagagtccaatgtacccactcgagtgtgcaatctccccacggaagcattcaagtctccaacgtccgtgcgcaagccacgaacatcctcatgcaaagcgtcatgcccggtagacaagcgttgaatgctttcacttagggtattaatagccccaagtaccgggttgaagtactcgttgggttgcatcccaaaataggcatactgaggatgaaagaaagcatttggatcatacccatgaagaggcggaggtgcagagcatgagctagctctaggatgagaggagggcgccgtcctatgagcacggggagctccaa

SEQ ID NO: 18852 - DNA, 3096 bp, Oryza sativa
attcagtttgagcctttgccttctcacttcttcctctccaccgatcttcaatctcagatttcgtgtgtgtgcgtgagtggttgatttgagtttgtttgagtgcttggtgttgacttcgtgaagatttgttgagcactcgattcatcgccaagaaatctctgtgcatttgttactcttggtggttgaggacacctagatggttaggagtaaacctcgagataccgatttgtttgtggtgtgccgagggagtatgtgaaggtcggatcttacctccgaaagggaagagcgaggatagagttggaaaagacccggcccattatgggctcctcaacaaagtgtagaatccccccaaggatttgatctttggtaacacatcaacttgcaagaatcctgatgatatctttttcttactcctctagctttgctatttggtgccgctagtagtttagtcgttgtttgtgcaaacccattaactacctgttacaccatccctttttgtttgcctttctagcttgctaaaaaatctgagatttttggaatatcccaaaatatttcagaatatcggaaatattccaaaatatccgaaaatattccaaatatccaaaaagtttatcttcttcattgacttacgagttttaaacgcctcttcaacctcccccccccccctccgcaggtgatatcaagatcctttcacttgtgataccacgttctgatacctatggttctcagatgattcctatggggcatcatgtaatacttgtgaggtattgcaacacttgtgatattaggttctaacacctacgttgaagcatcgaggcccccggtgttaattttggtaattaatgacaagcgctaattgtggactaaccgttgtctttgagataatattttaagttaggtccacgtcatgtgtgcacatggatgacgatcgatggattaaaattgacggcgcaaggcaaagagaaagaagacggtaaaactagtgctttaatttagaattgatcagggtgtagggcgatcaaatttgctagtttatttctagtttcgccgtactattaagaggggtaatgacctagcaaagagatgattttaattgccacattaggtcattgcattatcacttgtgctcactttttcatcacacacaaacacattcactgggttcggcctgaccaggggcggtcagaccggccacatagtggcggtctcaccggcgtgccctgcccggtgacctctccgagaagattgtggaggaggcccggtgccggtttgtgagtggtttggagttcaccaccttcggagtgaagaaagaactaacctagtgatcgaggcttgggtagtcctctccatgggccggctcccgccatgcccaccccttgacgaagggggcgtgcggaggctacgtggttgagcggtggagttgggctcgcctcagcggggagtaagaaaccgacgagtttccgaacctcggtgaaaaatctcttgtctccttgtctcatttgattgtcgcatttacttttgtgcaatttacttttctagagacaaacttgagatcatatcaccctaggattgctaaacattgacataggagtgtgagttactttcctagagatataattgagcctctatcaccctaggtttgcaaaacctaacttagttgcatagttagagttgaccctcaccaagcctagcaacttaggttagttttgattaggtgtcatttagttttaaatcgcctattcacccccctctagtcgacatctcgatcttacaagtggtatcagagcttggtctctcctgattgggcttcaccgcctagagagaagatgtcgaacgaggtgaaacacgaagggaaggctcccatgtttaatggcacaaactattccacttggaaaattaaaatgtctactcacctcaaagctatgagcttccatatttggagtattgtggatgtaggctttgcaatcaccggcacgcccttgatggagattgatcaccgcaacctccaactcaatgcccaagccatgaatgctttgttcaactctttgagccaagaggagtttgatagagtgagcaaccttgagaccgcatatgagatttggaacaagttggcggagatccatgagggcacaagtgagtacaaggatgccaagcttcacttcctcaagatccaatatgagacattctctatgttgcctcatgagagtgtgaatgacatgtatgggaggctcaatgtcattgtgaatgatctcaaggggcttggggcaaactacaccgatcttgaggttgcccaaaagatgcttagggctctaccagagaagtatgagacccttgtcaccatgctcatcaactccgacatgtcaaggatgacaccggcaagcctcttggggaagatcaacaccaatgacatgtataagttgaagaaaaaggaaatggaggaagcctcaccttccaagaagtgcattactctctaagccgaagttgaagacaagggcaagggcaaggtgaatgaagtcaatgagaacttggaagaagagaatgcccttcttgctagaaggttcaatgatttcttgggaaggagaaaggagagaggaaagggctccaactcaaataggagaagaaatagaagacccaacaagactctctccaacttgaggtgctttgagtgtggtgagaagggacactttgcttccaagtgcccttccaaggatgatgatggagacaagtcatccaagaagaagagtggaggctacaagctcatgaagaagctcaagaaggaaggcaagaagattgaggccttcatcgaggaatgggactcaaatgaggagagctcgcctcatccgggtccgaggaagaagatggtgatgatgcaagctccaggaagaagaagatggccgttgttgccatcaaggaggctccatcactcttcgctccactttgtctcatggcaaaaggctcctctaaggtaacatctcttagtgatagtgagagtgatgatgattgtgatgatgtttcctatgatgagcttgtgagtatgtttgaggagctccatgcttatagtgagaaggagattgtcaagttcaaggccctaaagaa

SEQ ID NO: 18853 - DNA, 21068 bp, Oryza sativa
  unsure (1)..(21068): unsure at all n locations
ctttcggttgctcaaatttgtgatcttagcttgtcatgtgctttcttcccgcaagaagttattgtttctagccttcttgacaagtcttgtgtgttcaaaggttttagatatggaaatctttatttggttgatttcaattctagtgaagcaaatttgaaaacttgtttagttgcaaaaacttctttgggttggctttggcatagaaggctagcccatgttggcatgaatcaattgagcaaattttcaaaacgtgatctagttatgggcttgaaagatgtgaagtttgagaaagataagctttgtagtgcttgtcaagccggcaagcaagttgcatgttctcatcctactaagagtatcatgtccacatctaaaccattggagctcttgcatatggatttgtttgacccaacaacctataagagcattggtggtaatagtcattgtcttgtgattgttgatgattattctcgctatacttgggtgttctttttgcatgataagtctattgtcgccgaccttttcaaaaagtttgcaaaaagggcccaaaatgaatttagttgcactcttgtgaaaattagaagtaacattggttccgagtttaagaataccaatatcgaggactattgtgatgatcttggtattaaacatgaacttttcgctacctactcacctcaacaaaatggtgtagtggagaggaaaattcgtacattgattgagatggcaaggactatgcttgatgaatatggtgtttccgattccttttgggcggaagccataaacaccgcttgccatgcaaccaataggctttatntgcatcgtgtcttganaaagacttcctatgaggtaattgttgggaggaagcctaatattgcctattttcgagtttttggttgtaaatgttatattcatcgaaagggtgttagactaaccaaatttgaaagtcggtgtgatgaagggtttcttctaggttatgcctcaaaaagcaaggcataccgggtctacaacaagaacaaaggtattgtggaagaaaccgccgatgttcaatttgatgagactaatggctcccaagaggggcacgagaatttggatgatgtaggtgatgaaggcttgatgagagttatgaagaacatgtcaattggagatgtcaagcctattgaagtggaagacaagccatccacctccactcaagatgagcatctacttccgctatgccaagtcaagctcaagttgaagtggaggaggagaaggcacaagaaccacctatgccaccaaggatacacaccgctctttccaaggatcacccaattgaccaagtgttgggtgacattagtaagggtgttcaaactcgatctcgtgtcacttcgatttgtgaacattactcgtttgtttcttgtcttgagcgaaaacatgtagatgaagctctttgtgatccggattggatgaatgctatgcatgaagagctcaaaaactttgcaagaaacaaggtgtggactttggttgaaagacctagagaccacaatgtcatagggacaaagtgggtctttaggaacaaacaagatgagaacgggttggtggtgagaaacaaggcaagattggtggcacaaggtttcacacaagttgaaggtttggactttggtgaaacttttgcccccgtggcaagacttgaggctatttgcatccttcttgcatttgcatcatgctttgatataaaactatttcaaatggatgtgaaaagtgcttttctaaatggtgaaattgccgaacttgtctttgttgaataacctcccggttttgaagatactaaatatcctaaccatgtttacaaactctcaaaagctctttatggtttaagacaagctcctagggcttggtatgaaagattgagagattttcttttgtcaaaggatttcaaaattggaaaagttgacatcactcttttcacaaaaatcattggtgatgatttctttgtgtatcaaatttatgttgatgacatcatattcggttctactaatgaggtattttgcaaggaatttggtgatatgatgtctagggaatttgaaatgtccatgattggagagttgagcttcttccttggacttcaaatcaagcaactcaagaatgggacgttcgtgagccaaaccaagtacatcaaggatctactcaagaggtttggcttggaggatgcgaagcccattaagacacctatggcaaccaacgggcatctcgaccttgatgagggaggtaaaccggtagatttaaagctttatcgttctatgattggtagcttgctttaccttaccgtatctaggccggatatcatgtttagtgtttgcatgtgtgcacggtttcaagccgctcctaaggagtgtcacttagtggccgtgaaaaggattctaagatatttaaagcattcctctactattggcttgtggtacccaaaaggtgctaaatttaagcttgttggctattccgatccggattatgccggttgcaaagtggatagaaagagcacatccagtagttgccaaatgcttggtagatcccttgtgtcatggtcatccaagaaacaaaactccgtagccctctctactgccgagacagaatatgtttcggcgggtagttgttgtgcccaattgctttggatgaaacaaacattgttggactatggcatatccttcaccaaaaccccactcctatgtgacaatgatggtgccataaagatagccaataacccggtccaacattctagaaccaagcatattgacatacgccatcacttcctaagagaccatgttgccaagtgtgacatagtcattagccacataagaaccgaggatcaactagccgacatctttaccaagcctcttgatgaaacccgcttttgcaagttgaggaatgagttaaatatcatagacttctctaatgtggcttgagatggtgcaccatggttgcttcttttccatattgtttatttgctccttttttgctcttatgctttagatttattgccatttggttcttcattgcgaaaatggagcatgtcacattaagggggaggtttgcactcttgcatgtgctccacttccttttatatgtgagcaaatcaactaaaagtgctagtagtgttttcaaaatgcccaagtcaacataagtcaaaatttttgcaaaattaatgtaatttgaaaactatctcttggaaaatgtttcaaaaggttccctatatgttttccaaccttcactttgcaagaaaaatgtttttttaatgaaaatgccattttggccctcttttgaagaaactagaatcttgtttttggccaaaatgaaattcaaccccaaaatgagattgagaaggaatttgagaaaagtttcaaaacaaagttggtagagaagaagatttgaaatgtttttggtattcaaatcatattcaaaatccaaatattttaaaagttgtttgaaaatcaaattcgcccaaaaacccctatagaccataaatggtcacctcctagcactcaagtgagttttgttgcaaatcttcataaatttcaaatattatgaatggttggcaatatttcaactcacacatttcaaaattgctccaaaattcaaatttttattgaattttattgtgtgggggtagccgaactatgcaagggcagtgcacagtcggctgggggccaggcggtctgaccagcgctatatgcgcggtctgaccggcctggtggcggcggtctgaccggcctctagggcccggtctgaccggctgcaccctggcggtctgactggccagggatggagggcccaggactttgtcctttcttcctcctcctccttctacccgacccgtcctcatcccatctcatctcttcacttctccaactcgaaatttcttctgctctctcctctcccaaaccctagccacctccctccaccaaatccgtccggttcaaccgtcaaaatcactccggttactccgtaagtgaatcccctcctcttcctctctctattccatggattgatttgagtttttattgagtttgtgatccatggcatggaaccctaggtgaaggaagaggtgttcatcgatttgcaccaatagagggtagtttcttggtgtgattcaactccttcaaccggtaaatccctctccctcttgtgcattgctctcaaatcggtctatttcaatctttagggttaagggtagtttccccattgcttcaatcttgatgaaatagacctacacaatgtcacgtcccaaaacgactctaaaatacatcctctaaattatgccgagaataattaaaattcgtgtgaaagcctccaacaattaaaatgtgcaaatataaaagtcaaataaggcttggaggatttttgtatatttcctaaaagcctaaaatgcgtaaataaattttagtggaattttcagagcacaaataataattgagaagaaataaacaaagttaaaaaggttttataaaaagaaaaaccctaaaagaagtccttttccccccccttcccctcttgggccggcccggcccaattccctccctctctctcctctcccccgcggcccatcggcctcctccccgcgcgcgcgccgctgacgggcgggcccgcccgccaccctcgctgacgggtggggcccacctgtcatcccctacctcgcgcctcgcccgccgccgcccgtgccctagcgccgccgccgccgcggattccgccgcatcccgccgtccccgcgtgcaataaagtgggggaaatcactccccgtgatcccctctccctttccccccatttttccctccctctctcccttggattcgtttggaaacccctccccaaatcccgccggcgccattgatggagcccgagaacgccacgccggtttccttccttctccggccgccctctctcgccccggccctatttaaactctccccgcgcctcccccgcccgtttccgccccttgccgcaccgtctctccgccggaatcgagctcgcgccgtcgccctctctctcctccgtcgccgacgaccaccggccggccttctcgctcgccgggaccgtctcccgccccggcgtcgcctcctccggcttcgccgcaccgccatcgaccccgtccaccccctcgccgggtccgccgaccgccggaacgccgtcgaccccgtcgacccgagccgcgccgccgccttcctccgctctggctgcctttttcgtcgttgccgtcgacctagggtgagccgtggaccgccgcctcttttcccccttcccttcccctctctcggccgccgctccgccgtgcctatggccgtcgccggcgaccataggggcgcgggcgccgcctcccgccggccgcgccgagtggccgccgtcgggcgcgccgagtggctgccgcgtggggtccagccgtcagccgcccgcgccctcgggtgtggctgacacgtggggcccacggcgccggccggtgcgagcccgggtgcgcccggtccaccgtggaccatgaggctgccgcgtgggccctactcccgtggacccggtccgcgcgcccctccccctcggctgacgcaataaaccctttttaaattaaaatttaaatgaagaaattcgcaaatattcatttaaagagcatataaacttcaaatggccataacttggccatttgaactcggaattggaccgttcaagtctctaatttttccttaagaagtcaagaacccatttttgtgctttgttcctgcttgttatatggagtttattagagtaaaagccttttcttttctgttggtcgtgtagacgctgcagcttcggaagatccgctcttggtggaggttgaagccgacgtttgggaaagcgagcaaggcaagttacatcatccttgaacatattgaaacccagtttataaaattattttcatttaaattattgcattatcgctttacttaaattcccgcgttatcactgttttatctagccatgcctatgtacctttgttatgaccttattattattgttattgatattattaccttgttcaccctagattaaacagaaccccaactagtggacactctactcatggtaccactagtatgattttaggtaaatgcttcgctggttaattaggcaacattaggtggttttacaactctagactttgggaatattctcatcacctggacattacggaatggatggattattttggaattggattcacacctccccctctattcaaaaccctcaaaatggtttttggctgggctcggggtgcatggttttgatagtagcacctcggccatataaggaccggtcttcgggcctctgttgcaaaacactaccgtacttccacatgtctagtgggtaaggcttagattgtggctcagtctggttataaacaaaagtacacggatggagatggacgaagtcgggggtcgatggacatctctagggcaaatgaatgctacacgagctgcggcccagtagtcgagatgtcatggcacaggaccggtgtcctgctgttaggggctcagtcctgcctacctgtcccgggggttccgggcgtaggtggggttgggtcggtactcttttctatggctaggatgggttggaaactatgtcacgtcttccgtccgtataccgtggtggtatgtggcacgtggttacacgtgaggaagatgtgtcttgtgggtaaagatgtacacctctgatcagagtataacctatcgaatagccgcgccctcggttatgggcaagccgagcaatgtacccaagttagtgtttttaattcttaaaacctgcttaacaactaaaatgtggaatggttggcctgggttggcttgggacgagctgggacccagggtcgggttgccagttcggtccgaatcatcgtaggccttgggttaaggcaggttcgtgagggttcacggccttgtttaataatactgtgtagctctaggatcgtctttataaaatggctttgggcaactaagtgacttttaaatgctgctttactgcaaaacttaacccctatgttatttaccccttgtacccccttgcattaatcgtgcatctaccggtgtgacttgctgagtactgtggttgtactcattcttgctctatctttctccccccttcagtaagagaagcttcagagaagatgtcttaggtggagtcctggcttataccccagttgagcgcctgtgaagatggagccgtaggcccgctagtccgctgctgtttatttttgtttgtcaggcctgaagcgcctttgtaataatgtaaatattatcgatataataaagatgtgtcttttatatcatgtttgtatggtgtaccccggcttttcctgggacggggattaatacactggcgttcgggaaaaggcaattttcccggtcgcgacaagatggtatcagagccatctcgactgtaggataagccaagtggataaaacctaaggacatattttataaataaaactatttgcgaaagttcctttttttctcctttcccctatgctatttgcaaaagggtttactcccttcttccttcttcggatttcaactagtactagatggtcaggtcagtgaagaagaagacatcgtcagttgtttgccgaagctccggaagactgcaggatccgctagcgaagtggaggaagcagtgaagccagctgtaaagcaggagtgaagatcttggagaacccgtcgcagaacctaagccaccctctagtgtttcgtttgtcgtgtgtttccttgcttgtgtgtgtagcgcgtggtttgcatcagtggattgtgatgtaaccatgctaggttgtttgcttaatcaacttgcagaataagtgaaacaaagaacacatcaacaagaagagttagttcctttaaggtcctatctctagttctggtctattctttcctggcttgtttcctctctcacctcaatccctgtaacagatgtttaacagagaaaaaggaaagaatgtcagcgggtatgactcaagtaactcaagttttcaactcaatctgccactggcctcaagagagttaaccagggcacacccttggtccattccaagcatgctgcttagttcacagctaccattggttggaagtcaagaccaaaatcagtatgtgtttgatcgagcctttgccacccaggtcaatgagcttccaatgccagaagagcaggttcccttttgtcatgattgtagagagcaaggacactatgccctgaattgtccatgggtatatgtcaaagaagccccttcccttggtttagcagggcggacatcgctaaaccagcctcctcacaccaagtcaagcttgcagcctagtgtgcaaagtagagagctcaacggagagaatccattgaatcccgggaaatgctttcctcctagcctctcgtaccacgtggggtcacatactaagcaagccaaaggcaagaagagtaagaatcagaagagaaaagcaccgatgcgaactgaagaagaagtacgtaagatgactattaccagcaccgaatggcctccagcagggataactattcctagacgtcaaagaggaaataccttccgaggtgcacgacagttgacccagcacctcctaagccgtggtggcagagtatctgatagtgaagggtcagatcaagtctcctcggatgaagaagatgagtctccccgacatctcggcgaggaagagatggaatccaaagcatgcccccgttgtggagaaattggacacgttgctagcatgtgtctcacactctgccctcattgtgaggaagaccatccaccaggtgaatgtcccacccgcaaggtcacatgttttctgtgcgaaggtacaaaccatgtgcccaaggattgccaactcagtgtgttgttgaccaagaccgcagaaatccaacgaacaaccctacgattgtctcatcagctagtcagctccaacagcaacatcgacgatatcatccacagcaccaatgctcctcccgctgcacctgactctgcaataaatcatagcgataataccttcagcaccaaccattctctgcaccgacagcctcaacaaagaattgtcatcgatggaagaagttgtgtctctccccgacctactccaggccgagccaagggcaatcaacctccggagggcgataccaagcagaagaccgttattcgcctcaaccagcaaccagaaggaaacttctcctgtgaatgatagcaatatgcagtcctatcacatcatcacagaaccaatcaaggatgcagtcactagaacaatgccagctatgtatccatgtttgtgattttcagttcgctacttatcactgtaatcgggagtttgcagcaatcatgtaataaataaacatattcatgattataaacaatgagtttgttatgtttatggatgattcatgttgaggatacaatgtaccgatgataagcaccttccctttttgtttaaggcagtgccttgtattcgtgtaataagggagaaatgtgtaatacagacaagttctgagaggattcttttggaagatgcggatatgtgatcatgtgtataattgtttactgacaaaggagacctagggtctcgtgtcagaggaactatattctaacctcgagttaataaccaacctgtggatggaaaagaaaaccaattaaactgtgttgggttaaaaagccaatgagacagtagttggggataggagtttggatacgcctcttacagatcaagataaggattgttggatgaaacccataagggacccgccatgcctctacattgataagttcggatattcctgcaaacagttaagaagatccaggagacatcaatatttgagaacataatagtcgatggttggtaattagtctatcaggtatcagaaaagggtcaaaggtgatatggcagaagaacaatatggatgctccccatctcgaggaagcactaaagatgatcatcggcaattaaaccctagtggcatagatacagatagcaagcaatgtatttccctgaaggtggtcagtgcagcttcttgacaaaccacatcaaggtttcactgaaaggcagcaagccaaaggacctcatcgtccccagaagcgtccgcaatccacattaaagaataccacatgttaaagataagccgaaagatgattgataaaagagattggcaaagatgttctccagcatgaaagaagtaggccggaaggtgattgataaacagaaacatgctctgcatcgctcaaggaagacccctgatagtaattgccccgcaacagtcaccttgtcattaagtaagcaagatgacctaggtaaaagtgtttctatgaaggcaaggagtgaaatcttcaactcggtatcagatgctacacggagtgaaaagtgcaagcaccggttaccaggtaatgccatgtcttgggagatgatccaatgggaaggaacacatcaaggttaaaaggtgtaaaggaatacgttgaatgctaaccgaggacaacctgaagataatagtggaaagtaaactgaacataaagaaagtgaatccgagttgcttgttcgtgagagctattcccagttatgaatcaagtgatatgttcaaagataatctacagaggtcagattaaaatcacatctaacaacgaagcctcagatttggcaggataatgattagacagtaacaaatccagcaataaagccatttgggaagacgtcaaagtatgtcaagtgggataagttggttctcttgggaagcataattcaaaggcaaagttagcgacccttgcatcaaatagcagaagtacctagcaccggagaccaggaaagctaatatgagacagttcatgttgtcaatcatggtatccttagtaagcgggatatcatagtctaaagcatatggtggtaagctggaaggaaacgccaagcatggtattctcatgatgacaagcatggtatcctagtaatgacaagcaggttacgagacatgacatgaagttgataacttgtgaggttgacgccgaagatatgaatcgtgagaagttctggatctgaagccccatcttcaagtgccgcaacctagtctgagtcagctaaaaggtgcaccctggttcaagtcaggtgaagagaagattccatccgcagcaggaggtcaagccaagcagttccgagtggtgaagttttgctgaaagtttgtgaggacggagcggaagaagtcaaacaagaagagaagaccgcccaacctatcttcttgctagcctcctcgaatctcggggacgagattcttgtaaggggggtggatttgtcacgtcctgataaattcatcccgaaataaaaatcattttctaaaaggaataatagaattaattaaaattcgaaaagaaattggcaaacactaaaatgcgtataagaaaaattcaaatgtggcccggagaatttttgttaaattctccttggtctaaaaggcgccctcaaattttagtggaattttcagagcacaaataataattgagaagaaataaacaaagttagaatggttttataaaaagaaaaatcctaaaaaaagtcttctttccccccccttcccttactgggccagctcggcccagctccctccctctctctcctcctccccgcggcccactcggcctctccccgcgcgtgcgccgctgacgggcgggcccgcccgccaccctcgctgacgggtggggcccacctgtcatccctatcctcgcgccgcgcccgccgcccgcccgtgccctagcgccgccgccgccgcggattccgccgcatcccgccgtccccgcgcgccataaagagggggaaatcactccccgtgattccctccctcttttccccctctttcccctctctctctccctcggattcgtccggattcactcccgcaaagttcgccggcgcatcaatggcggccgagatttccgcggccgattccttcccctccggccgctctctccctctcccggcgctatataatcgtcccccgtgcttcgctcttccgtttccgccactcgccgcctctcctccccgtcggaatcgagcccgcgccgtcgcaccttctctccgccgtcgccgccgaactccggttcaccgccgtcgtcgccccggacctcctcccgcttcggcatcgcccccttcggcttcgccgcgtcctcgccgaccccgtccgctcctccgtttcgcccgccgaccgccggaacgccgccgtcctcgtcgacccgagccgcgccgccgccttcctccgctccggtcgtcgtttccgccgtcctcgtcgtcccggggtgagccgtggaccgctcctttcgcttcccccttccctcctctctctcgggtgccgctccgccgcgtcggtggtcgccggcggtgaccatcggggcgcgggcgcgccgcctcccgtcggccgtgccggcgaggccgccttcgggcgcgccccgcggctgccaggtggggcccggccgtcagccgcccgcgcccgcaggtgcggctgacgcgtgggacccacggcgccggccggcgtctgccgcgtgcgcccggtccaccgtggaccgagaggctgacgcgtgggccccactcccatggacccggtccgcgcgcccctcccctcggctgacgcaataaatccgatttttaattaaaatttaaatgaagaaattcgcaaatatccatttaaagagcatataaacttcaaatggccataacttggccatttgaactcggaattggaccgttcaagtctctaatttttccttaagaagtcaagaacccatttttgtgctttgtttctgctgttatgtggagtttattagagtaaaagccttttcttttccgttggtcgtgtagacgctgcagcttcggaagatccgctcttcgtggaagttgaagccggtgtttgggaaagcgagcaaggcaagtcacatcatccttgagcatattgaatcccagtttataaaattattttgatttaaattaatgcattaccgctttatttcaattcccgcgttatcactgttttatttagccatgcctatttacctttgttaagacattattattgctattgttattattaccttgttcaccctagaataaacaaaaccccaactagtgggtactctattcctggttccactagtatgaatttaggtagatgcttcgctgattaattaggcaatattaggtggttttataactttagactttgggaattctcatatcatttggacactatggaattgttggtttatggtggaattggacatacacctctcttcctctttcaaaacccctaaaacctgttttcggtggggtctgggtgcatgccagttgtgggaagtagcaccccggccactataaggattaagctcgggcctctgttgcaaagcactaccgtacttccacatgtctagtgggtaaggcttagtttgtggctcagtctggtcataaacaaaagtacacggatggagatggatgaagtcgggggtcgatggacattctctaggacaaatgaaggctacacgagctgcggcccggtagtcgagatgtcatggcacagggttggtgccctgctgctaggggctcagtcctgcctgcctgtcccgggggttccggccgtaggtgggattgggtcggtactcttgtctatggctaggatgggttggaaactatgtcacagcttccgtctgtataccgtggtggtatgtggcacgtggttgcacgtgaggaagatgtgtcttgtgggtaaagatgtacacctctgatcagagtataatctattcgaatagccgcgccctcggttatgggcaagccgagcaatgtacccaagttagcgtttcaattcctaagacctgcttaacaactaaaatgtggaatggttggcctgggttggcttggaacgagctggtacccagggtcgggttgccagttcggtctgaatcatcataggccttgggttaaggcaggttctgtgtgggttcacggccttgataattaatattgtatagttctaggatcgcgtttacaaaatagctttgagcaactaaacgtctttaaatgctgtttactgcaaccctaacccctttatagtataattcctttgtactcccttgcatttattctgcatttgtgggtgtgtcttgttgagtacggtggttgtactcagtcttgctcaatttttcccaagcccagaagaggagctccttgaagatgaaggctttggtgtctagctcgtgcctgccgtcaagcgcctgtggtcgtcgccctagtcttccgctgtttctcgtttgtctctgtgtgtgctgggccttcgctgcccatgtaataagttaactatttacgcttccgcttgttaaactctgaattgtatcaacttttggtgtaccttgcctcctgggacaaggattaatgcacgcacgtcaggaacgcccgttgggttatttccggtcgtgacaagttggtatcagagccaccgttgaccctaggacgagccgtagatcccaagccttagcaatattttcaaaaataaaaatcttttgttatttgtgaaaactgtctagtctctctctgtcttgctgcttcatttatcgccaaaatctgacctttaaaatgttgtttttctttttgtttttgtttgtagatggccagcagcgtcacccgtcgtggtttggacatgactggcttcgtcttggagctgcggggcatgtgcgtggtcttggggtatccacatggagtggactaccaggccaggccgcttccggagcaggagggtgacgatgcagagccccacgctggttgggaggtcactgcagtgatcctgtctggctctcccgagcggacttcgctggcagtcaccgcgggtggagattccttccccgccgcttgccagaacgccgctctcctcgctatcggcactcttcaccagcgctacccggacgagttgcagcactcgccctaccgctaccaccctcgtcgcggaggagcccgcgactacgccaccttccgggatgctagctcggaggatgacgctaccatcgtgcacctggcgcgcatggtggaggcgtacgacgcggctcgtatcgacttccaccagatggtacgccgtgggatggtcgagaacaacatgaagatcctggagctgcgtcaggagaacctgcagctcaagaaggacctagacgcggtggaggcgcagctgcatcagctcaagatcgcccagggagaggtctgccgccccaagcgtcgccgcgtctggtggagccgttccaaccaactgatgagttgcgaagccaacccgctcctggtcggtgcactgaatcaaccctagcttcttctcgattgtgcgcaaccaatcactggcttccataggatcgacggcaatggcaaaggttggaggctcagttttgagaaattctgataacttgcactgttgccggactgtaggcacttgaacgttggttgtccctgctgggctgctccaattctgtaatagttgaaaggctgttgccaacatgttggtttggttaaccacaacttggattagctctggtgaggtttcgttggtgcttctctcattcccattggcttgggttcttgcgtcatcggatccatcattcccatagcctttgttaccagtattatccatctgtcacaaggtaggggttgagaggggaagcatacaaggaaagaatagaccagaactagggacaagaccttaaaggaactaactctttttgttgatgtgttgtttgtttcacttattctgcaagttgattaagcaaacaacctagcatggttacatcaccacccaccgatgcaaaccacgcgctacacacacaagcaaggaacacacgactaacaacactaccctatagggtggcttaggttctgcgacgggttcccaagatcttcactccttcacagctggcttcattgcttccttcgcttcgctagcggatcctgcagtcttccggagcttcggcaaacaactgacgacatcttcttcctcgcaaagctgaccatctagtactagttgaaaatccgaagaaggaagaacggagtaaaccttttgcaaatagcattaggggaaggagaaaaaggaactttcgcaaataatttttatttataaaatatgtccttgggttttatccacttggcttatcctacagtcgagatggctctgataccagcttgtcgcgaccgggaaaattgccttttcccgaacgccagtgtattaatccccgtcccaggaaaagccggggtacaccacacaaacatgatatagaagacacatctttattatatcgataatatttacattattacaaaggcacttcaggcctgacaagcaaaaataaacagcagcggactagcggcctacggctccatcttcacaggcgctcaactggggtataagccaggactccacctaagacatcttctccaaagcttctcttactgaagggggggaaagattgagcaagaatgagtacaaccacagtactcagcaagccacaccggcagatgcataattaatgcaagggaggtacaagggaataataatatagggattaaggtttgcagtaaacagcatttaaaagtcacttagttgcccaaagccattttgtaaagacgatcatagaactacacagtattattaaacaaggccgtgaaccctcacgaacctgccttaacccaaggcctacgatgattcagaccgaactggcaacccgaccctgggtcccagctcgtcccaagccaacccaggccaaccattccatattttagttgttgagcaaattttaagaattaaaacactgacttgggtacattgctaggcttgcccatatccgagggctcggctattcgaatagatttactctgatcagaggtgtacatctttacccacaagacacatctttactccgcattccatggccttggaacccgtcgtaaagatgtgacatagtttccaacccatcctagccttagacaagagtaccgacccaatcctacctacggccgggatacccgggacaggcaggcagaactgagcccctagcattgggcaccaaccctccgccgtatgacatctcgactaccgggccgcagctcgtgtagccttcatttgccctggagaatgtccatcgacgcccgacttcatccatctccaatccgtgtacttttgtttatgactagactgagccacaaactaagccttacccattagacatgtggaagtacggtagtgctttgcaacagaggcccgagctttagtccttatagtggccggggtgctacttcccacaactggcatgcacccaaaccccaccgaaaacaggttttaggggttttgaaagaggaagagaggtgtgtgtccaattccaccataattcaacaattccatagtgtccaaatgatatgagaactcccaaagtctaaagttataaaaccacctaatgttgcctaattattcagcgaagcatctacctaaatttatactagtggaaccatgaatagagtacccactagttgaggttttgtttaatctagggtgaacaaggtaataataataacaatagcaataataatgtcataacaaaggtaaataggcttggctaaataaaacagtgataacgcgggaatttaaataaagcgataatgcattaatttaaatcaaaataattttataaactgggattcaatatgctcaaggatgatgtgacttgccttgctcagagagaacggccttccgaaccttcggcgacgaccacgaaccacgcttcgggaacctccggaacgacgaaagctacgcgaagcacacaagcaaagctacaagcctataaagaagcaataacaatacataaaaagaaagcacagggttctttaggttataacaaacattaggagacttgaacgggtcgattcagagttcgtatgaccgagatatgatcatccgaagtttaatgctgttatatggagatttgcggattattataatcaagttttgcaactataaaacaggtgtaagcgctagcctggaaaagacaggaaggctgcgccgttgacatgcggaccccacatgtcaacctaaaggaccgcggcagaccgagtacacagagacggtccacgggtcgacggaagcggaccccgtgtgtcaaccgaagcgagtggccgacaaacggactccactagacaccacacggtcaccacccgcacacgcgaacgactgccgacgccgatacacgggtaccggggccgacaaccgcacaacgggcatgggcgacaccgaaaggacgaggacagggcagcgagggagagggaaccttaccaccacgcgacgaggcgcgggaacgacaacgacgaacgggcgcggcggagacagacgggcacaacggaggcgaacggcgaggggacggcttcggcggcgatccttggacgaaggcgagacgcggccggcgcgaggcttgacgacgcggaggcgaggacgaagacgatgacgggggctgcagcgaccttgacgaagcgaggacgacgaacgagaacggcttgacggagggacgaacgccccgacgatcgggaacgacgagaggacgaggacgacgacgaccggggccggcgaggaggctacgagggcagccagcagcggctgcacggcggtgaggatggcgtggaacacgccgctacgatgacgatgacggaggcggcgccgcgagacgacgagccgggcgaccgacgggacgtcgacggcgagaacgatcggagacgacgatgatggcaggcagcagcggctgagaggaggaggggacagcgtggaacacgccgctgcgacgttggtgaaggtggtggtgagcggggcgacgagccgacgaggaggaaggagaggccggcgcggagacgacggcgttccggcgaagttcgggcgaggaggaggtgatgccggggatgagagcggcgtcgtggagccgaggaaggtggtggcgacgtcggccggcgctccggggacgtggcagaggcggccagaggcggagaagtggtggcgacgccactggacgccggcgagggcgcgtctccggtgatttccccgcgaaacggagggctgaccgagggagagggggcagctgcgaggccgagggagaagacggcgcggccgggcggcgctcgggcgaggagaggaaggcggctggaggtggccggcgcgagggaaaggggagggcgacggcgggaacgcgcctccggcggtcaccgcgcgaaacggagggtaggccgtgggagaggaggcggctgcgatgctggaggaggcgacggcgcggccggaagacgctccggcgaggcgggagaggcggctggaggccggccggcaacgtgggagagagggggcgacggtggggaggtggctagagaccacgggagagctcgggaagaggctaaaacggtagaacggggatgaggatcccattttataggatgggggagagagccggccacgggaggagcgggaacggcgacgggaatggcggccggcggcaaaggaaggcggccggacttggcgcgtccgttcccggcgattgggggcgccgttcaagggggaattaagggggaattgaagaggattcaatggggtttaatttcccctattcaatttggaaagaagggcattgattcgcgtggatttgagggaggaagggattagggttccacgggaagagagagagaggtggccgggcggaggaggaagaaggcgacggcggcctgacgcgtgggccccacgcggtcgggcgcgcggccgacacgcggcaacggcgcgcacgcacgcgcacgtgcgcggcacgggtgggagcgcggctcggcttgggccgggcgaagccgaggcggcccaggaggaggggagggagagaagatgggccgggaaggagaggagggaggggcggcccagaaggaggaggagaggagggagtgggctgcccgggaggggaagagaggcccgggagagagagggagagaaggggagggagagaaagagagggaggagagaaggacttttgggctgggcttggcccaaaggaggaaggagggttatttttagattttctttttaataaactttgttaattgttgttgttgtttaataattatttccggcgctctgaaaattcaagtaaaatttgagggctcgttttagaccaaggagaatttaacaaaaattctccgggccacattcgaatttttcttgtacgtattttagtgtttgccaatttcttttcgaattttaattaattctattattccttttagcgaatgaattttatttcgggatgaatttatcaggacgtgacaaatccaccccccttacaagaatctcgtccccgagattcgaggaggctagcaagaagataggttgggcggtcttctcttcttgtctgacttcttccgctccgtcttctataacaaacttgcctaacaacacttcttcactctggactgcttggctcgatctcctgttgcagatggaatcttctcttcacctgacttgtccctggttgaacctttagctgacttcgactgggttgcggcacttgaagatggggcttcagttccagaactttgcatagttcatatctttggagtcaacctcatacaagttacccacttcatgtcatgcgtcgagatcagctcgtctttactaagataccatgcttgtcataacttgtcatcatttagcattcaacgtattcctttacacctttgcccttgatgtgttctttcccgatttctcttattaatcacctttcgacctacttctttgcctggtaataaacatctttttcgatatcttctatcagtcatcttttgaccttggtcactaagtactcttcactccgagagttgtggatgcttctggtggcgaggaggtcctttggtctgctacctttcagtgaaaccttgaagtgtttcgccaaaagctacactgactgtcattgcctttgatccggaaaagacacatctgaaactcttagtccaaacaaatgtctctttggataatcacctgattttcttttccatcctcaggctggttattag

SEQ ID NO: 18854 - DNA, 1829 bp, Oryza sativa
atttttgggtctaaaatggatggagtccatggatttcaattggattcatccccaaatagcagatgatgtcgtctcagacacagaggcactccatcaccaccgccctcggccgcctcgacctcgccgcgcagccgcgtttggatgtccggccgccgcactaggttcgccgtcggagagcttccgccgccgccgcccgccgccttctggaaggtggagaagacgcgggcgcgggggaggaagcggagggaactcctgctgcacggcgcgcatggcgccgacgagctcgccgtccacgccgtcgccgaaccacgtggccaagttgagcgcgaacagtgcggcgtacaggcagcacgacgagcagagcggcgccaagaaggcggcgtgggtggtgtcgcccaacggccaagtgaagcgagaaaaggcggtggaagcggcgcgcggcgagggagctgcagccggagccggagaagaagaagaaaagcggatcgacttggccgtgctccgttgccctatctgcctccttcctagctgttcatccaatccatctgacattcttcttcttgttgttgttctttcattcgattcgtgagggctcggctagtggcaatttcttggcgtgcagtccgcggcggggcacttggcgtgcagcagctgccatggcgacgtcccggcaagcagtgccacgcgtgcggcggcgccgccaagatcctgtgccccaacgacctgttcggctgctggagctacgtcgcctattacgacgtcgccggccaccagcgcgcctgcccgcacgcgccctgctcctgctcggagtcgcgctgcgacttcctcggctcgccgccgatgctcctcgcccacctcgtcgccgacatgtggttggtgtcgatttggaatggggtgaaatggactggaaaagtgaactgaatccatatagatgaaatgggttgggttgatttgggttgaaatatgatatgggttggattggtttggattctaagagaagacaaatgaattagagtggtttggacttgtgtagcttactgctttggtttgggctggttgtggattggatttcaaaccattggcaggcttccacgcatgcatgtctctcttgtttggtttccctccatgtactttgatcgcaggagtactaatttgtggttgataataactttgatagtgtgtccgctcttgccgcgttgaaaccaaagagttagagaaatcctatatatttatataaagttcatttctacagtggttattaatgctatttatatcttttcttattaagccacatcatctaaattgtttctttatccctatgtagttgagataggtatattgttcaaattatctctcacgttttcttttgttattaagccgtatcacctttgttttatatttaagatgatgtacttagccacatcactattgttgtgattttaaatggccaatctagtttaaattattataaataacatcctaattgtatatagttttttttctgcagtcgataaagatgaaattatataatgttatgcctactgattatatgttatttctattattactgtataaaacttacgcagcaacccgtgagtttcatgaagtctgatttcactattgcgtagctttcatccgcatgattactaatggtgagttaataaattaaccatgcagcggctgctctgaacacgatactagggagatggggcaagaaggcatcaccggagtggaacatcagcggtgagctctgcagcggtttcgcagctgataaaaccgattgggataactaccgcgacatcaacccgttcatcaagtgcgattgcaca

SEQ ID NO: 18855 - DNA, 2127 bp, Oryza sativa
aatagctctcacgaacaagcaactcggattcactttccactattctcttcatgtcgttattatttagcattcaaagtattcctttacacattcaaccctgacgtattctttttagatttctcttatcaatcacctttcgaacgttgtcaaccaagtactcttccgaaataatcctcatagaacttgtttttattacacatgtctcccttattacatgaatacaaggcactgtcttaaacaaaaagggaaggtgcttaacatcggtacattgtttccactatgggttagaattaacatgaggcctcacaggtacggcgtttgctccagtgaccacaaggcgagtgacctgtcttcttcttgcataatggccggagtgatggcgcaggttacgcttcggctgtggacaatctctagagaaatgacctggttctttgcagttgtaacaaatcaacgtcttctttgctgagttgtccgtctgggaacgatcgttctgactaggagttggaattggtggttggaaatccttgctaacattggcatcagtggtaccgtagttgctatcacaattggagtctttctcagtgtcaaaattgcacgcttgattcgagtggtcactaatggggcaagaaccatggttgttggtggtatcatcaccattagtattgctagggttgttgtctgtattgcgtccgtcttcttggggcaggaactcttgatgcacaacagaagatccggtgatctgaagtggctcagtgcgctgtctttggttaccacatggaattactgggatgttgacaatccttctcttgcagttcgtcatccgattatgctcactttcgagttgcatggctttgtccacaagtttctcaaaatcttcataatcctctaggagtagttgcactgcaagctcatcttttaacccctggagaaacttctcttgtttgtcttcatccgtttccacatcttctggtgcatagtgagccaaacgatagaactcgtgcaggtactctgtgacggtcaaatctccttgcttcaggtagcgaaactctcgttttcttagtgtgatcattcctgcgggaacatgtgatctcttgaatacagatgaaaactcgttccaggtgatggtatgtccttctggccgtgatgcttcgtagctatcccaccactctgaagccggtccaaccaactgatgagttgcgaagccaacccgctcctggtcggtgcactgaatcaaccctagcttcttctcgattgtgcgcaaccaatcactggcttccataggatcgacggcaatggcaaaggttggaagccccgttttgagaaattctgataacttgcactggtgcttgactgtaagggcttgaacgtttgtttcccctgctgggctgttcccattctgtgatttttgaaaggctgttgccaacatgtcggtttggttaaccacaactttggattagctctggtgaggtttcggtgatgcttttctcattcccattggcttgggttcttgagtcatcggatccatcattcccgtagcctttgttaccaatgttatccatctgtcacaaggtagaggttgagaggggaagcatacaaggaaagaatagaccagaactagggacaagaccttaaaggaactaactctttttgttgatgtgttgtttgtttcgcttattctgcaggttgattaagcaaacaacctagcatggttacatcacctcccaccgatgcaaaccacgcgctacacacacaagcaagaaacacacgactaacaacactaccctatagggcggcttaggttctgcgactggttctccaagatcttagcttcagcttcacggctggcttcactgcttcctacactttgctagcggatcctgcagtcttccggagcttcggcaaacaactgacgacatcttcttcttcgcaaaactgaccatctagtactagttgaaatccgaagaaggaagaagggagtaaaccttttgcaaatagcattagggggaggaaaaaaaggaactttcgcaaatagttttatttataacatatgtccttaagttttatccacttggcttatcctacagtcgagatggcttttataccaacttgtcgcgaccgggaaaattg

SEQ ID NO: 18856 - DNA, 675 bp, Oryza sativa
ttatttagttatgattttccgaagatttaatctattagaaaaaaaaagaaaaagggaaagatgatgatgtcatgatgacgtcatcaatggcggccttggctcgggcggcacgaccaccggcgctacggaccttggtcgggcgaaaagagggcacctacgcgtagagggcaacaagacgaacgcaacggtactcaccaatgcgcccaacgacgaccgatggtggccggcgacgagaggaggcggcgcggcggttcggtcgacggcggcgacgggtctctggcgaccggcgacaacggggagagggcggccgaggttcctcacctccgtgcgcacctaacggcggcgagaggaagcggcggcgacggcgaaatcgatggcgcggcgcggctggagatcgccggcggcgacggcgagacaaggcggcgtcggcggcgagctacggggcacgggagaggacgggaataggggcaaacgaaagaggggaatgtcgcgtcctaaaacgactctaaaatacatcctcgaaattgtgccgagaataattaaaattcgtgtgaaagcctccaacaattaaaatgtgcaaatataaaagtcaaataaggcttggaggatttttgtatatttcctaaaagcctaaaatgcgtaaataaattttaggggaattttcagagcacaaat

SEQ ID NO: 18857 - DNA, 1470 bp, Oryza sativa
ttcctcaatccatcttgaatttgggaaatctcaattctttgtaagaaattctttctttacatcaatttgttcatacgagcctgtattaagcagatgagtatattttataatcttgaactgtgcccaattcaggtttcttgggaacaatagccttacaggaaagttgccggatggtataagctcttcattaaaagtgatgtatgtcaaatacaattgacatggcagtatagcacaaactacattcataatagtacgcactaattttgtataacataattctggaatgttgacagagatttttcgtacaaccaactcactgggagcattccttcttgggctagacaaaacaatttacagttgtaagtgtaaaagtgtgatatttgtgtcgctgagaaaaaatataaatactaatattctgttttttgaaaggaatttggtggcaaacaacttcttactcgataccaccagtgaaaggtacttgtgacatttagttctaatttggcgagtgaactatatgaaaatcttgctggtaactttaaattttcaattcaaattgtgcacagtacgctaccttggggaataaactgcctccaacaagacaccccttgtttccgtggatctccagaatgtatatttctcattcttcataaaactaaacagtaacatgaacttacgaatttgaatgatggctacaatttttttaatcttaattgcagattattccttcgcagttgactgtggcagtaatgcatccataagaggctcagatgacactatttatgaagcagatcctacaaatcttggagctgcaacatattatgttaccggtcaaacaagatggggtgtcagtagtgtagggaacgccatagatgcaaagaatattatatatagctcccaaccttttcaaaatgtagttgattcagagttgtttgaaactgcaaggatgtcatcatcatctctgaggtactatggacttggacttgagaatggaaattacactgttttgctccaattcgcagaattagcttttccagactcacagacttggctaagcttagggagaagagtttttgacatatatatccaggtagaaattttgtgcattttatataatgtttttctactgaatcttaccaatatttatctaaaagtattactgatatttacatagggtgctctaaaacaaaaggatttcgatataaggaaaacagcaggtggaaaatcttttaccgtagttaataggagtttcatggtaactgtgtctaaaaacttccttgagatccatctattctgggctggcaagggcactgttgacatacctactaaagataattactatgggccaatgatctcagcattgagcgtcactccaagtaagcaccacactaaaacaacagcaggaagtgttatattcgctgccgataaataatatttttcctttgcagattttactcctaccgttcgaaacgg

SEQ ID NO: 18858 - DNA, 2234 bp, Oryza sativa
tgaatgggtatgctggtctatgttcttcccatactagaaaacttcaattcattgtaaattgccttttgcttactcaaactatgtttatcaaaaggcatggggcctgtatgaaatggatcaagcacttggaattgttgacccaagtctcaaggaatttgacaaggatgaagcttttagagtcatatatgttgcacttgtctgcactcagggctctccgcaccagcgaccgccaatgtcgaaggtcgtgacaatgttgactggagatgtcgatgtggctaaggtggtcaccaagccaagctacatcactgagtggcagcttaggggtggtgggtacagcagcaacaccactagcagctacgcatggtctagcaaccctgagttgagtaggcaaaaagagatcactgaagtttctctccaggtgaggtgaatttaatgtagaaaatctatgggccatctatattggtttgaaatgacgatattgtaactccttttttttacataattttgtaattttgtgtcgatgtgagttattgcaaacaatggaattacttatcctgaatctttcctggtaacaaaagtttgctcctaataatttgtaaatggtgaataactgtggtgtattcactactcaaaaaaaaaagttaatagataaccttttatctgtaatggtcagtgcaatgcagaggtaaaattttgtccaattgtttataaacactgacatggtatggttacagtgcggtaggtgtgttgtccactttccaacggattcgactttgtattaatatttagatcgaggtgtcagcaatttaacaaacaagatgccacgtgaccttaatggttgtttggtcttgcaacttcatctgtgaccatggccaaagtgagaccatgttctgatggaggatgttcctaggtagcagggacgtcttggatatcatcccacctcttccaatagctatgtattacttcagggtgtcttgggtttttaaatcattattattgctaatttaatgtatgaagctgtgaacagttagatagttgttttcccatctttggaacctaacttatcgtatgtgttttttcgtatttctaattcagattgtttttatgttgttcttatttacttatttactcatcgattgatcataggaacatttttttttttgcatcggcaagatcagtgacccttgaagtagtttttttttataatgaaattcattccggcttttgcttaaagaaaaactacaaccagttattacggaggttgcaggacaaatgagtgcaaattacaaaattacagctcgattaaaaataagaaaactacatagtataccactttaaagacaaatatttccatctatggttggcaagagtatgtatagtcattgttctaccaacggtttacaagttaaatgtagtccttatcttcctcaaataagaaaagaaaaaacctttgaaatcagcggctgatccttgtcgatcaaatttcgctccaggcactaccagtgctaacctcaaaccaaagcatgacataacatcagagagtaactaagctataatcaatcattcgtctagtccatgccaccaccattgcaatcgaacccaactggtaggaacaccgccacaaggacgccccactaatagggaacctccgatgtgacgccttcatgaaagtggcaactaggatattactgtaacaccctgaaaattttgattttaaaatatggaaactaaaatttattgaaagtaaggatccccggcctatccaaggatgtcgcgaggaggagcgagagctgagcagtggcaaggaggcggcccaccactgatgacctgtaatgcgggccatggaggacgacctgctcagcgaggaggacgtggctgccggcaacgaccttcagcgtggggcgtggatggtggaggacctgctcaatatggaggacgtggtcgccaccaccgacctctagcgtgggccgtggacggtcgaggacctgctcctcattaacgacattgccacccaaagggagggccgctataacgcactcacttgctgtgtcggtatgcttttgatttctctctttctatttctctttcttctccgatggatatattgatccatcaatcgcttattagatcaagttagtgcagggcttaagaggcccaggaagagctatagactattgtggctgaactactggtcctggagcatgacggagcaggagcagctactggtcctggag

SEQ ID NO: 18859 - DNA, 1257 bp, Oryza sativa
ttgccacgcatggactaagtcctgagaaggcaattgtatctattaattaggatattttatgtaatttccttagagatatgtttgggcaaaagtctgccgcaaagacttatggtatcttagtttgttagagataaaagtcgtgtccgacacgggcatattttgtaaatcttgggtataaatagaccccgagccccatgtaatatgataacacacgttcaatacaatctcagcgcaccgccacccttttactttcattttgtttcgacgagttcttgctttcgggttgagctgcatcggtttcgatcttcaactagaggtaaaacttgttatggtggcttgcgttctcggaattagggcttccatctttatgatactctaatcttgttcatgtaattcgttgagttatcatatatcctatataatctccggcaatatcgttatctaacccccaattggctaatgtctgttactaaaaggcagccgattaggttaaataccaacgttgactaggattatataggatatccaccactctatgaaacatccaatggcttgattgtctagatattttccttcttttcatacttatagctgcatcagttgagtttgaccttgtaagtcatgattagaatctcaatctctagcctgcttttggttgccgattagtgtagcatcggggtttcagtcgatcttacctaatttaactacatttatcttatatgcttgattgacatgttaaattgccctttttgttaagatcttgttgcatttaagtatattaggctttcgtttgatatattttacttgctttgatatctcaatatagagtggtattggagtattagccgatacatgctagatctatctgatcggctatgctatgaacgtatatagtcttgttgttaatatatatttcgatctaagtgatttatactgtctcggcatggcgaccgatctgtcccaatcacttgatttaagtatatatcgacacaaggattatatattgttaatatctatagccgatcgagtagatttaattttttcttacttgttcatgattgccgatcgatctatatatgacatcggctcaaagatgaatgatatgtcatcggcaattagccgatcggctatcgtttatggatttaaccgcggtttctttgtctttatttcttgttgattgcaggatcaaatcaactggcatgctcattaacctaaaggcaagatttttggacctacactgaagttaagcagatcttc

SEQ ID NO: 18860 - DNA, 2430 bp, Oryza sativa
aagccgaggcggcccaggaggaggggagggagagaagatgggccgggaaggagaggagggagggcgggcccagaaggaggaggagaggagggagtgggctgcccgggaggggaagagaggcccgggagagagagggagagaaggggagggagagaaagagagggaggagagaaggacttttgggctgggcttggcccaaaggaggaaggagggttatttttagattttctttttaataaactttgttaattgttgttgttgtttaataattatttccggcgctctgaaaattcaagtaaaatttgagggctcgttttagaccaaggagaatttaacaaaaattctccgggccacattcgaatttttcttgtacgtattttagtgtttgccaatttcttttcgaattttaattaattctattattccttttagcgaatgaattttatttcgggatgaatttatcaggacgtgacacaacccaggccaactattccacattttagttgataagcaggttttaagaattaaaacactaacttgggtacattgctcggcttgcccataaccgagggcgcggctattcgaatagattatactctgatcagaggtgtacatctttacccacaagacacatcttcctcacgtgcaaccacgtgccacataccaccacggtatacagacggaagacgtgacatagtttccaacccatcctagccatagacaagagtaccgacccaatcccacctacggccggaacccccgggacaggcaggcaggactgagcccctagcagcaggacaccggccctgtgccatgacatctcgactaccgggccgcagctcgtgtagccttcatttgccctggagaatgtccatcgacccccgacttcatccatctccaatccgtgtacttttgtttataaccagactgagccacaaactaagccttacccactagacatgtggaagtacggtagtgctttgcaacagaggcccgaagaccggtccttatatggccgaggtgctactatcaaaaccatgcaccccgagcccagcctaaaaccattttggggattttgaatagaaggagcggtgtgaagccaattccacaataaccaaaccattccatagtgtccaggtgataagaatatttcccaaagtctatagttgaaaaaccacctaatgttacctaattaaattgcgaagcatctacctaaaactaaactagtggtgccatgagtagagtgtccactagttgaggttttgtttattctagggtgaacaaggtaataataataataacaataataataaggtcataacaaaggtaaataggcatggctaaataaaacagtgataacgcgggaatttaaataaagcgataatgcaataatttaaatcaacataattttacaaacggggattcaatatgttcaaagatgatgtgacttgccttgctcgctttcccaaacgtcggcttcaacttccacgaagagcggatcttccgaagctgcagcgtctacacgaccaacggaaaagaaaaggcttttactctaataaactccatataacagcagaaacaaagcataaaaatgggttcttggcttcataaggaaaaattagagacttgaacggtccaattccgagttcaaatggccaagttatggccatttgaagtttatatgctctttaaatggatatttgcgaatttcttcatttaaattttaattaaaaatcggatttattgcgtcagccgagggagagggcgcgcggaccgggtccacgggagtggggcccacgcgtcagcctctcggtccatggtggaccgggcgcacgcggctgacgccggccggcgtcgtgggtcccacgcgtcagccgcacccgcgggcgcgggcggctgacggccgggccccacctggcagccgcgggacgcgcccgaaggcggccttgccggcacggccgacgggaggcggcgcgcccgcgccccgatggtcgccggcggcgacctccggcgcgacggagcggcggccgagagaggggagggaagggggaagtgaaacggcggtccttggctcaccccgggtcgacggcggtgacggaaacggcgaccgaagcggcgagaggcggcggcgcggctcgggttgacgaggacggcggtgctccgacggtcggcgggcgaaacggaggagtggacgaggtcgacgaggacgcggcgaagccgaaggaggtgacgccgagacgggaggaggtccggggcgacgacggcggcgaaccggagctcggcggcgacggcggagagagaggacgacagcgcgggcttgattccgacggggagagaaagcggcgagcggcggaaacggagcagagaggctcggggagcgattatataccgtcgggagggggagagagcggccggaggggaaggaatcgg

SEQ ID NO: 18861 - DNA, 1707 bp, Oryza sativa
ttcgaatgtggcccggagaatttttgttaaattctccttggtctaaaaggagccctcaaattttacttgaattttcagagcgccggaaatatttattaagcaacaaaaacaattatcaaagtttaataaaacgaaaacctaaaaataaccctctccttccctttgggccaagtctggcccaaggttcctctcttctcttggcccgcggccaaagtctccctctcctccctctctttccctcctctcccgggcctctcctcctcctcccggcccactcttcccctccccctctcggcccactccctcctccaccctctccctcccgggctgcctctccctcctatcctcctgggccgcctcggcttcgcccggcccaagccgagccgcgcctccctcccgtgccgcgcacgtgcgcgtgcgtgcgcgccgttgccgcgcgttgaccgcgcgcctcccgcgtgggtcccgcctgtcaggcgcgtccccggcctccagccgccggcctccttcctctctctcccgtgaaccctagcgccgttcctcctccaaatccgctccattcaagccggctctttccaaattgattggggggaattaatccccattgattcctctttgatttcccccgtttttccccttgaatggcgcccccaatcgcccggaacggccgcgccattcccggccgccttccatggctgccggccgtgtttcccgtcgccgttccgccctctcccatgcccggctcgcttccctccgctataaaacggaatcccctcgctccgttctatcgttttagcccactcccgcgatctcccgtggtccctagccctcaccgccgtcacgcgcgccgcctcttcctcggtctcgtcggcacccactccggcagcccctttcgccgtgccagtgcgccggccgacgtcgccgtctccacctccggcatcgcagcgtcaaggacgccctcggcctcgcctccccttcgaccgaaccccgccggtgttcgtcgtcgtcgtcaccgttcatcctcgccggctcgtcatctcgcggcgccgcctccgtcgtcgacatcgcagcggcgtgttccacgccatcctcgcctccgtgcagccgctgccggctgccctcgtcgtctcctcgccggccccggtcgtcgtcgtcgtcgtcctcccgtcgttcccggtcgtcgtggcgttcgtccctctgtcgagccgttctcgtccgtcctcggtgtttcgtcaaggtcgctgtagccgtcgtcgtctttgtcctcggctccgcgtcgtcaagcctcatgccggccgcgtctcgccttcgtccaaggatcgccgccgaagtcgttccctcgccgtccgccgcgcccgttcgtcgttgttgttcccacgcctcgtcgcgtggtggtaaggatccgtcctctcgctgccccgtcctcgtcctttcagtgtcaccccgtacccgttgtgcggttgtcgaccccggtacccgtgtaccggtgtcggtagtcgttcacgcgtgcgggtggtgaccgtgtagtgtctgtgttagtgtgcccgctcggtagccgcgtggtttccacgtgtgcaggccgtgtggtgtctagtggagtccgtttgtcggccactcgcctcggttgacacacgggatccgcttccgtcgacccgtggaccgtctctgtgtacgcggtctaccgcggtcctttttgttgacatgtga

SEQ ID NO: 18862 - DNA, 1493 bp, Oryza sativa
  unsure (1)..(1493): unsure at all n locations
acagcattaaactttggatgatcatatcttggtcatacgagctctgaatcgacccgttcaagtctcctaatgtttgttataacctaaagaaccgtatgctttctttttatgtattgttattgtttctttataggcttgtagctttgcttgtgtgcttcgcgtagcttctgtcgttccggaggttccagaagcgtggttcgcggtcgtcgccaaaggttcggaaggccgttctctctgagcaaggcaagtcacatcatccttgagcatattgaatcccagtttataaaattattttgatttaaattaatgcattatcgctttatataaattcccgcgttatcactgttttatttagccatgcctatttacctttgttaagacattattattgctattgttattattaccttgttcaccctagaataaacaaaaccccaactagtggacactctattcatggttccactagtatgaatttaggtagatgcttcgctgtttaattaggcaacattaggtggttttataactttagactttgggaaatctcatatcatttggacattatggaattgttggattatggtggaattggacatacccctctcttcctctttcaaaacccctaaaacctgttttccggtggggtttgggtgcatgccagttgtgggaagtagcaccccggccaatataaggattaagctcgggcctctgttgcaaagcactaccgtacttccacatgtctagtgggtaaggcttagtttgtggctcagtctggttataaacaaaagtacacggatggagatggatgaagtcgggggtcgatggacatctctaggacaaatgaaggctacacgagctgcggcccggtagtcgagatgtcatggcacagggctagtgtcctgctgctaggggctcaatcctgcctacctgtcccggaggttccggccgtaggttgggattgggtcggtactcttgtctatggctaggatgggttggaaactatgtcacgtcttccgtctgtataccgtggtggtatgtggcacgtggttgcacgtgaggaagatgtgtcttgtgggtaaagatgtacacctctgatcagagtataacctattcgaatagccgcgccctcggttatgggcaagcctagcaatgtacccaagttagtgttttaaattcttaaaacctgcttaacaactaaaatgtggaatggttggcctgggttggcttgggacgagctgggaccctgtcgcgtcctaaaacgactctaaaatacatcctcgaaattgtgccgagaataattaaaattcgtgtgaaagcctccaacaattaaaatgtgcaaatataaaagtcaaataaggcttggaggatttttgtgtatttcctaaaagcctaaaatgcgtaaataaattntagtgaaattttcagagcacaaataataattgagaagaaataaacaaagttaaaaggggtttataaaaagaaaaatccctaaa

SEQ ID NO: 18863 - DNA, 1911 bp, Oryza sativa
agcggggaggcgcttgaccttgctgacgccttggcttcgggcatttatccgcaaagtgcccgggctggaagcagttgaagcacagacgctgctgaccttgagcgtccctgcggccttgaccgggctgcacagtcggcgtaggaggacggggcgcacgagtcccttgctgattctgctgctgctgcggctgtgggacgcgcaccacgaattgaggtcgaggcgcggagcgaggttgctgctgctgttgttgctgctgcgaggaggatccccctggatagggattggtgtagcggaccctttggttagcaccctgctgattgcggaaattcgccaagcggcgcttgtgcgactccagttccttgtgcttggcctccaagcggatgctcttgtccaccaatcgttgaaaatccggatagtccccagagactagacggacggacagctcggggtccattcctgccaagaacttctcttgcttctcctcatcttcccgcacatcctccggggcgtaacgggccagattgttgaactcatgcaaatactccatcacggagcggttgccttgcttcaactctcggaattcccttttcttaagagccacgactccagcgggcacatgggtcctccggaaagcggcggtgaagcgggcccaagtaataggttgcccctctggctgcgtagcttggaaatggtcccaccatagagatgcgggcccctgcagctagtgggcggcgaagatgactttctcctcatcgctgcactgcaccgtgtctagctttttccccacggcatgcaaccaatccaacgcatccacggggttgttggagctagagaaggtgggtggacggatgcggaggaactcggcgagtttagagtgttgtgggggtggtggtggagcattctgttgtggtggattttggaggtggtggaggaaagcagtcatcatgttggcctgctgggcgaggatttgggtgagaatggcattggtatctggtggtggtggtggaggcggaggaggaggtggaggtgggttgcccgggtggttgtggttgctgccttcaggttggttgccatcaccggtggcagcatttctcctggtcgtcaccatctgaaaaccccacacagaaccagcaaacagagaaagagctaacaattaaaactaaccacccacgactaccataattcttgaatttattactgctattaaatgggttcattaaagttcaagttgcttaggcaaataaaataagacaggctccgacacagttatgccacacaccggcatgaccatgccccacacgactcaaacaaaagacaaacaagaaagaacacacgcgcaagcctactaactgctcgtctaccgctgcgacgggccaggacggaaggtgagcaacagcgcatcctccgtgctaccaacgccggaggcttccccctcctggggaaccacgggcgcgggctcggcacgaggggtctcgacgaagcaagtccacgccagggactgacgaacaagctcgggcctggaggtgctcttgcgggcggtgatcttctggctgcggcagacacggcgacgcttggggcggcagacctctccctgggcgatcttgagctgatgcagctgcacctccaccgcgtctaggtccttcttgagctgcaggttctcctgacgcagctccaggatcttcaagttgttctcgaccatcccacggtgtaccatctggtggaagtcgatacgagccgcgtcgtacgcctccaccatgcgcgccaggtgcacgatggtagcgtcatcctccgagctagcatcccggaaggtggcgtagtcgcgggctcctccgcgacgagggtggtagcggtagggcgagtgctgcaactcgtccgggtagcgctggtgaagagtgccgatgacgaggagag

SEQ ID NO: 18864 - DNA, 9638 bp, Oryza sativa
ttgtgtcttgtgggtacagtggtacacctctgatcagagtaaaactattcgaatagctgtgcccgcggttatgggcgagtctaacaatgtctttcgtgattagtcccacacttctcatcttagtaaatgatgctttaactggtaataatttgattagctcctggtttggaatggtatattcctggtttggagatagaactgtgcagccgaggtggttgtttagaatggttgggcctatacaacagggtatgttgtatagcgttggattaatattgtttaattattacttaacggtttgattaaattctcaaatgtttgctaaatgctgcttttgcaaatgaaaccctattatgccatcctttgttatcctgtgcacttgcatatttgctgcgtggcttgctgagtatgtcatatactcaccttgcaatcattcatcagaggaagagttctacagtgaagctgatggagtggaggattaggtgtagccttggtcaagctgcctgtggagtggagccgtctgcgccgtttatttctttttccgctgcttagatatttattgtttgagaggaactatctacctctgtaatgacactttatacgcttattaattagagtaataattgtactctattatcaatttgttattgtgtgcctcggctgattcctggacgagggttcacacacatgtaagcgtttggaattttggatagaaattccgggcgtgacaaaagatcatactcagagaatgtgcgtggattatcgagcgttgaatgaggtgattatcaagaataagtatcctctacccagaattgatgacctgtttgatcaactggaaggtgctacagttttctctaagatagatctccgttctggatatcatcaacttcgaatccgtgaggaagatataccaaagaccgctttcacaactcggtatggtatgttcgaatgtaccgttatgtcatttggactcactaatgccccagcctttttcatgaatctgatgaacaaggtgtttatggaatatctggataagtttgtcgtggtgtttattgatgacattcttatttactccaagacgaaggaagaacatgaagagcatcttcgtctagctttagagaaactacgtgagcatcagctttatgccaagttcagtaaatgtgaattttggttgtccgaagtgaagtttcttggtcatgtcatctcgtccggaggagtggcagtagatccaagcaatgtggagtcagtgttaagttggaagcaacccaagacggtttcagaaattcgtagtttccttggacttgctgggtattaccgcaggtttattgagaacttttcaaagatcgccagaccaatgactcgtctgcttcagaaggaagtaaagtacaagtggacagaggattgtgaacaaagtttccaagaattgaagaaaaggctagtgactgcgcctgtgttaattttgcctgattcgaggaaaggtttccaagtgtattgtgatgcatcccgactcggtttgggttgtgtgatgatgcaagaaggaaaggtggttgcctatgcatctaggcaattacgtcctcatgagaataactacccaacgcatgacctagagttggcagctgtggtgcatgcattgaagatttggcgtcattatcttttcggtaaccgtacagagatgtatacggatcataaaagtttgaagtacattttcactcaacctgatttgaacatgcgtcagcgaagatggttagagttgattaaagattatgatatggaaatccactatcacccggggaaagcaaatgttgtagccgatgctcttagccggaaaagctactgtaatatgtcagaaggtcgacatttaccttgggagttatgccaagaatttgaaaagttaaacttggatatagtcagcaaaggttttgtggctactttggaagctcaacctactctgtttgatcaagttagagaagctcaagtgaatgatcctgatatcccagaaataaaaaagaacatgagaagaggaaaagccatcggttatgtagaagatgagcaaggaactgtgtggttaggagaaagaatttgcgtcccagataataaggagttgaaggatactatcatgaaagaagctcatgaaactttgtattccattcaccctggaagcactaagatgtaccaagacctaaagcaacaattctggtgggccagtatgcgacgtgagatagcagaatatgtggctctatgtgatgtatgtcagcgggtcaaggcagaacatcagaagccagccggtctgttacaaccgttgaagattccagagtggaagtgggaagaaataggaatggattttataaccggtctacccagaacgtcggcaggacatgattctatttgggtagtggttgataggttgataaaagtcgctcacttcataccggtcaaaacaacctacacggggaataagcttgcagaattatacatggccagagtggtatgtttgcatggcgttcctaagaagatagtgtcagatagaggtagccagtttacttggaagttttggcagaaattacaagtagagatgggtacccgtttgaatttcagtaccgcttatcaccctcaaacagatggtcagacggaaagagtaaaccaaattttagaagatatgttgagagcctgtgttctagattttggtggaagttgggataagaatttgtcgtacgcggaattctcatataacaatagttatcaagctagtttgcaaatggctccgtatgaagcattatatggccgaaagtgccgtacgccgctcctttgggatcaaaccggtgaacgtcaagtttttgggacagacatattgcgagaggcagaagaaaaagtgaagattatccaagaaaggttgcgcgttgctcagtcacgtcagaagagctatgccgacaatcgtcgcagagatttggctttcgaagaaggagattatgtataccttcgggttacgccgttacgaggtgttcatcgtttccagaccaaagggaaattggcaccgtgtttcgtgggaccttttaagattgtgagtcgaagaggtgaggtagcttatcagttggaattgcctccgtcaatggcgggaatacatgacgtgttccatgtgtcgcagttgaagaaatgtttacgtgtacctacggaggaagcagatcctgatcgtatagagcttcaagaagatttaacttatgttgagaagccagtcagaatcttggaagtaagcgagaggaataccaggaatcgcattatacggttctgcaaggttcagtggagcaatcattcagaagaagaagccacttgggagcgagaagatgaattgaagtcagctcatcctcatctcttcgccagttcttctgaatcacgaggacgagattccgtttaaggagggtaggtttgtcacgccctaaaaatcgtctaatgtaaaaatacattgtttaaatcatttttagaaattattttaaaagcctacaagttaaaccctaattatctaggaaaattttcagcataaaaatgagctagataaaattttattaaatactttacttgttcctctattttctagatttttctaggaattgtttgagcaagggaagtatttttaataattgaaacaacaattcacaaattatttttattcaaaaaagttcaaaaacccctccctaagccgttgggccgaattcggcccaacattcctctctcttccgcgcggccgaaccggcccaagccggcccagccgacgccgcccgcccctcctcctcgggtcaccgacatgtagggcccacatgtcggacccatcttcctcctccagccggccgattgccaggccgagccgtccgagccgccgtttgcaccatcgataccgccgccctcggtcgcaatcgagtccgattgttaggggggtttttatccccacatcttcctctatctttcccctcaagaatcggagcaaatggttgtgtatcttgtccgaatcaaactcgttttgattttatctctgcaaactaacccgaagattttccggtttcgattcctctcgtttggagtctgatctcttcaatccaaggctataaataggaccccccagttccctgtcacgaccggaaataacccaacgggcgttcctgacgtgcgtgcattaatccttgtcccaggaggcaaggtacaccaaaagttgatacaattcagagtttaacaagcggaagcgtaaatagataacttattacatgggcagcgaaggcccagcacacacagagacaaacgagaaacagcggaagactagggcgacgaccacaggcgcttgacggcaggcacgagctagacaccaaagccttcatctttaaggagctcctcttctgggcttgggaaaaaattgagcaagactgagtacaaccaccgtactcaacaagacacacccacaaatgcagaataaatgcaagggagtacaaaggaattatactataaaggggttagggttgcagaaaacagcatttaaagacatttagttgctcaaagctattttgtaaacgcgatcctagaactatacaatgttattaatcaaggccgtgaacccacacgaacctgccttaacccaaggcctatgatgattcagaccgaactggcaacccgaccctgggtcccagctcgtcccaagccaacccaggccaaccattccacattttagttgttaagcaggttttaagaattgaaacactaacttgggtacattgctcggcttgcccataaccgagggcgcggctattcgaatagattatactctgatcagaggtgtacatctttacccacaagacacatcttcctcacgtgcaaccacgtgccacataccaccacggtatacagacggaagctgtgacatagtttccaacccatcctagccatagacaagagtaccgacccaatcccacctacggccggaacccccgggacaggcaggcaggactgagcccctagcagcaggacaccggccctgtgccatgacatctcgactaccgggccgcagctcgtgtagccttcatttgccctggagaatgtccatcgacccccgacttcatccatctccaatccgtgtacttttgtttataaccagactgagccacaaactaagccttacccactagacatgtggaagtacggtagtgctttgcaacagaggcccgaagaccggtccttatatggccgaggtgctactatcaaaaccatgcaccccgaacccagcctaaaaccattttggggattttgaatagaaggagcggtgtgaagccaattccacaataaccaaaccattccatagtatccagatgatatgaatatttcccaaagtctatagttgaaaaaccacctaatgttacctaattaaattgcgaagcatctacctaaaactaaactagtggtgccatgagtagagtgtccactagttgaggttttgtttattctagggtgaacaaggtaataataacaataacaataataataaggtcataacaaaggtaaataggcatggctaaataaaacagtgataacgcgggaatttaaataaagcgataatgcaataatttaaatcaacataattttataaactgggattcaatatgctcaaagatgatgtgacttgccttgctcgctttcccaaacgtcggcttcaacttccacgaagagcggatcttccgaagctgcagcgtctacacgaccaacggaaaagaaaaggcttttactctaataaactccatataacagcagaaacaaagcacaaaaatgggttcttgacttcttaaggaaaaattagagacttgaacggtccaattccgagttcaaatggccaagttatggccatttgaagtttatatgctctttaaatggatatttgcgaatttcttcatttaaattttaattaaaaatcggatttattgcgtcagccgagggagagggcgcgcggaccgggtccacgggagtggggcccacgcgtcagcctctcggtccacggtggaccgggcgcacgcggctgacgccggccggcgccgtgggtcccacgcgtcagccgcacccgcgggcgcgggcggctgacggccgggccccacctggcagctgcggggcgcgcccgaaggcggccttgccggcacggccgacgggaggcggcgcgcccgcgccccgatggtcgccgccggcgaccaacggcgcggcggagcggcggccgagagaggggagggaagagggaaagcgaacggcggtcctcggctcaccccgggacgacgagggcggcggagacgacgaccggagcggaggaaggcggcggcgcggttcggatcgacgaggacggcggcgctccgacggtcggcgggcgaaacgaaggggtggacgaggttgacggggacgcggcgaagccgaaggaggtgacgccgagacgggaggaggtccggagcgacgacggcggcgaaccggagctcggcggcgacggcggagagagagtacaacggcgcgagcacgaatccgacggaaagagcgagcggcgagtggcggaaacggaggagtgaggcacggggaacaattatatagggacgggagcgagagagggcggccggggaggaaggaaaccggcgcggcgatctcgggctccattgatgcgccggcgaactttgcgggattgaatccgagcgaatccgagggagagagagaggggaaagtggggggaaagagggagggaatcacggggagtgatttccccctctttatggcgcgcggggacggcgggatgcggcggaatcggtggcggcggcggcgctagggcacgggcggcggcgggcgcggcgcgaggtaggcgatgacaggtgggccccacccgtcagcgagggtggcgggcgggcccgcccgtcagcggcgcgcgcgcggggaggaggccgatgggccgcgggggagaggagagagagggagggagttgggccgagccggcccaagagaggaaggggggggggggaaaaggacttttagggatttttctttttataaaacccttttaactttgtttatttcttctcaattattatttgtgctctgaaaatttcactaaaatttatttacgcattttaggcttttaggaaatatacaaaaatcctccaagccttatttgacttttatatttgcacattttaattgttggaggctttcacacgaattttaattattctcggcacaatttcgaggatgtattttagagtcgttttaggacgcggcaaacctaccccccttaaacggaatctcgaccccgagattcggaagaactggcgaagagatcgggatgggctgccttcagctcgtcttcacgctcccaagtagcttcttcttcggcatggttgctccactggaccttgcaaaaacggattacccggttcctggtcctgcgctccatggtgtccaggattttcactggcctctccacataggtcaagtcttcgcgaacttcaatctgctctgagtcggcctgctcggatggcactcgaaggcatttcttgagttgcgacacatggaacacatcatgcacgttgcccaaggaggcgggcagctccagctggtaagcgacttctccgcgtcgagcaatgatacggaaaggacccacataccgaggtgcgagcttcccttttgtctgaaacctgtgtacacctcgcaatggcgtgacccgaagatacacaaagtcatccactgcgaattccagatcacggcgtcggttatccgcataacttttctgccgggactgtgccacctttagattatcccgaatgattctgactttagcttcagcttctctcaggatatcagtcccgaacacttggctttctccaacttggtcccacaagagcggtgtccggcatttgcgcccgtacaacgcttcataaggtgccatttgtatgctggcttgataactgttattgtaggagaactcagcataggggagactcttatcccaggtcttcccgaaatctagtacacatgcgtggagcatatcttctaggatctgatttagacgctcggtctgtccatctgtctgcggatgatacgcggtgctgaaatttaatcgggttcccaattcttcttggagtttcttccagaaatgagaggtgaattggcttcccctatcagatacgattttcttgggaacgccatggagactcacgatcctagcgaagtagagctctgctagtttgttccctccataggtggtcttcacaggaataaatcgagctaccttggttaatcgatccacaactacccatatagaatcatatccaccttgggtttttggaagtccggtgatgaaatccatcccaatttcatcccatttccattctggtacttggagaggttggagaagtccggccggtcgttggtgctctgccttgacacgctggcacacatcacaaagggccacgaactctgcaatttcccgcttcatactaacccaccagtatttttccttcaagtctaagtacatctttgtactgcccgggtgaatggaataaggactctcgtgagcttcctgaagtatcagctgtttaagttctctgttatctggaacgcatacccgatttccgttccatagggttctgtgttcatcctctgtgaaaccagcggctttaccctgtttcatattcttgaggagtccatgcatgtccggatcattcttctgagcctcgcggatttgatcgagcaaggtgggcttggcttctagcgcggccaagaatccgcgaccaactatgcttaggttcagggcttccatctgttgattaagttcgggtggaatgccacggacgttaagagtgttgcaatggccctttcgacttagagcgtcggcaaccacgttggccttaccaggataatagtgaattcccacatcatagtccttgatgagttctaaccatctcctttgccgaagattcagatccgactgggtgaagatgtattttaaactcttatgatcagtatatatttcacagcgattcccaataagatagtgccgccagatttttagagcatgaaccaccgcggctaactccaaatcatgtgtagggtagttgccttcatgaggtcgtagctgacgtgaggcataggctaccacgtgaccgtcctgcatgagcacgcaccccaatccttggcgcgaagcgtcacaatacaccaggaagtccttgcgagtatccggtaagattaacaccggcgaggaaaccagcttttccttgagagtttggaacgccttctcgcattgcaggctccacacaaatttctcttctttcttcaacaactgtgtcatgggtcgagcgattttggagaagttctcgatgaatctccggtagtatcctgccaaacctaagaaacagcggacttgagtaactgtcttgggttgcttccaatcggtgacggcggtcactgtttcggggtccacagcaactcctttagcagatatcacgtgccctaagaatttgacttcggacaaccagaactcacacttgctaagcttggcatacaattgatgttcccgcaactttcccaacaccagacggagatggtgctgatggtcttcttctgattgtgagtatatcagaatgtcatcaatg

SEQ ID NO: 18865 - DNA, 2374 bp, Oryza sativa
ggattcggcgccgcggcgggcgttagggcacggcggcggcgggcgcggcgcgaggtagacgataacaggtgggccccacccgtcagcgagggtggcgggcgggcccgcccgtcagcggcgcgcgcgcggggaggaggccgatgggccgcgggggagaggagagagagggagggagttgggccgggccggcccaagagaggaaggggggggaaagagacttcttttagggtttttctttttataaaacctttttaactttgtttatttcttctcaattattatttgtgctctgaaaattccactaaaatttatttacgcattttaggcttttaggaaatatacaaaaatcctccaagccttatttgacttttatatttgcacattttaattgttggaggctttcacatgaattttaattattctcggcacaatttcgaggatgtattttagagtcgttttgggacgcgacaaagcacaaggaactggagtcgcacaagcgccgcttggcgaatttccgcaatcaacagggtgctaaccaaagggtccgctacaccaacccctatccagggggatcctcctcgcaacagcaacaacagcagcagcaacctcgctccgcgccgcgacctcaattcgtggtgcgcgtcccacagccgcagcagcagcagaatcagcaagggactcgtgcgccccgtcctcctacgccaaccgtgcagtctggtcaaggccgcagggacgctcaaggtcagcagcgtctgtgcttcaactgcttcgagcccgggcactttgcggataaatgcccgaagccaaggcgtcagcaaggccaagcgcctccccactccaacaacggtgggaaggatgtcattcggggtcgtgtgaatcacgtgacggccgaggacgtgctgacaactccagacgtcatcgttggtacgttcctcgttcattccatccctgctaccattttgttcgactctggagcttcccactggtttatatctgtgccattcgtggggagaaatcagttgggggtagaaaggcttaggaaccctctgctcatcaccacccctggaggggttatgacagcaaagtattatagccctgccgtccctatagaaattcaggggattccttttccctcggatctgattctgctagacaccaagaacttggatgtgatccttgggatgaattggttggctcaattccaaggagtagtggattgcgcgaggcgcactgtcactctgtaccgagggccggaacaaccggttgttttctttgcacccccaacctctgtcagtagttcagaactgcatcagataggactgtcagaaatccccatcgtcagggagttcggagatgtgtttccggaagaactacccggtatgccgcccaagcgagagattgagttccggatagatcttgctccaggaaccactcctctgcacaagcgaccctaccgtatggcagcaaatgaactggccgaagtaaagaaacagttggaagagttgaaagaaaaggggtatatacgtccgagtacttccccctggggtgctcctgtgatttttgtggagaagaaagacaagactaagaggatgtgcgttgactacagagctctcaatgaagtcaccatcaaaaacaagtaccctcttccccggatcgatgatctgttcgatcagcttaaaggtgccactgtattctccaagattgatcttcgttccggatatcaccaattacgtattcgtgaagaagatattccgaagaccgcattcaccacgcgatacgggctgtatgaattcacggtgatgtcattcggcctaaccaatgcacctgccttcttcatgaacttaatgaacaaagtgttcatggaatacttggataagtttgttgtggttttcattgatgacattctggtatactcacaatcagaggaagaccatcagcaccatctccgtctggtgttgggaaagctgcgggaacatcaattgtatgccaaacttagcaagtgtgagttctggctgtccgaagtcaaattcttaggacacgtgatatctgctaaaggagtttctgtggaccccgaaacagtgaccaccgtcaccgattggaagcaacccaagacagttactcaagtccgcagtttcttaggtttggcaggatactaccggagattcatcgagaacttctccaaaatcgctcgacccatgacacagttgttgaagaaagaagagaaatttgtgtggagcccgcaatgcgagaaggcgttccaaactctcaagaaaagctggtttcctcgccggtgttaatcttgccggatactcgcaaggacttcctggtgtattgtgacgcttcgcgccaaggattggggtgcgtgctcatgcag

SEQ ID NO: 18866 - DNA, 13884 bp, Oryza sativa
ggttatacttgtcttcctgacgaatcgccttgtccaccaactgctagaaatcccggaaatccgtagacatcaaagcataagacaactcatcattcagtccctccaagaacctctcctgacgctcttcatcggtgcgaacatcttccggagcataacgagctaaacggttgaaatcatggaggtactcggtgaccgaacgagatcctggttgagtgctctaaattctctcttctttagagttacaacacccgttggtatgtgtgtcttcttgaaagcggccgtgaattcctgccacgtaataggctctccttcagccctgccttggcgaaaatgatcccaccattcagcagcaggaccatgcaattgatgcgaagcaaaagaaactttctcctgctcagtacactggatcaaatccaacttcttctccaccgcatgcagccaatctcctgcttctactggattggtggtgcttgaaaaggtagggggtctcacacgtaagaaatctgccagcttgttttggggaggtgggggtggattctggttctgattgtttgcctgctgattctgtgcctgctgcactaacagattgatcagttgtgtttgttgggccagaatttgagctagcgtgggatctcctccattgttagcagctccacttccacttccacttccacttccggtgcgcgtgttcaccatctgacgataagcagagacaacaggaaagaacgacagagagacacccttagaacagagttatttaattaatttaaattctatattgctcttaactgtgtatgttttcatttaaattgcattaacactatctcaccaactatcttacactctgacaagcaaaagaactagactcatgctgttacatcccaccaatgatgtaagcaacaactaaaacccacacactcacaagcaaacttaaacaagcaatctaacacagcgaactacggcaacgatctaactaagcgactaatcccgccttgcgtcggaacgaagcgatggatcttcttcctctggagtagctggctctctttcttcagggtcttcctcttcttcctcatcacttatgatgtcgatgacaggttcagcacgatcgggcacagcttcacccatcacgcgaatcttcgaagctaactggagacgaggtggcggacaggttctttttcttgcgatgaggcgaagcttgggtgttggcggcggcgtttctcctttaagttcagctaattccttctgtagacggtacaccttgctctccaacttgcaaatcttgcctcgattccagttttccctgtcatgagctgctttgtctcgctccacacttactgcatccatagcactaagcatatgcaccgcatgcatcagagtggcactctcttcaccatcaggacaggtataggttccatagtcttgaccatgaggcttgtgaggatgatactggaaagctgatgaatccaactcttcttcaaagtgttgacgcaactctccaatggccaccaaagctgcttcttgacaagcatggctatacgatcttcctccagcttcgaacttaatggacggaaggtcttcacgatcactagccaatgtcacacgaacacgacacttctcctcgttggggtcatgggaaatccggcgatcctcaggagcaacttcatagcctacctcaaaagccatcaacctcagctccctgacgaatcctaacaccttgatcaaatttctcggtgaatggggcggcatctaaagaaacatagaagagaggaattaatgcatatttttttttaagttagctgcaccatctagacttaactgatttgaccaaagaggaagaaaaaataaaagaaaagacacatactaagctattatatatatatatatttagaatttaactttttggacagagacaaataatttttttttttgacaaataactaaaataaaactaaaatacttatgatctattataagcacggtacagtgtcaccataagaaggatgagtagtactagtgctatcatgattgtatcgataccataatagatgtacagtgctgactaatcaatgaagtttactaaggcggaataagaaacattttgagaagaaaatttttttttcttttaaaagaaaagaaaatgaattaaattaattttgtgcataaccttgcatgtgcggccaacttaattaatttgtaagagaatagagaagagcagttctaatttttttcaaaatattttgaaggctacttaaggtttaccatttggcttatcctaaggtcaaggtggctctgataccaacttgtcacgcccggaatttctatccaaaattccaaacgcttacatgtgtgttaaaccctcgtccaggaatcaaccgaggcacacaataacaaattgataatagagtacaagtaaataactatttaatactcgcaaacaataaaatattacagaggtagatagttcctctcaaagaataaccttctacgcagcggaaaaataagactataacaaactacggaagagctatggcgactccactccacaggcaacttaaccagaacaagcctaatcctccagatcatcaccttcactgagatactcctcttctgatgattgaatattgcaagaatgagcatatgacatactcaacaagtcacacagcaaatatgcaagtgcacaagataacaaaggatggcataatatagctcatttgtagaaacagcatttaataaatatttaagagaatggtaaaaacagttgaataattaatcagtattaaataacaccatacaacacacccatgttgcatagggccaacctcatatgaacaaccaaccccggttgtacaaatctaacctccataccaggaatataccattccaaaccaggagtcaaattgattatcacaattaccattaatgaataacatgggactaatcacgaaaaacattgctcaactcacccataaccgcgggtacgcctattcgaatagattaaactctgatcagaggtgtaccactgtacccacaagacacattcccacaacatgttaccatgcgccttagtaccaccacgatacctcggaaaggaactgtgacaataccccttgcataacacaactcaccacagtgcaccgtacctggatcataatcaccctctacaaccagaggcatggactccccagcgacccccacggacttctcgccgcttctcagtctggcactccataatgaatcatgctatacaaaaggtaaagccgttgcccacgctggcttgtggttggcacggtaaaagtttcacaacagtagctcgcgaaccggtccttaattgtcatgagcacaaccatcaaaaccatatgctcacaacccaccttaaccaggttttaattatcaattaattaacatcacacgatcacccatcgtgagctaccatttaatgtaaccataattaaaataataatgtaacatagtctataattaatccctttagttagctaatgtttctaagcacggctaagcaaacttacatatagcatttagctgaaccaatccaacatataaggttcatgttaatcaaattataacccataggaaaataagatcatcttcggccgttaattaattgggaaggttcaccacccgatgacattcgaaaacaatgcatagttgaaataaaataatagctttaaacgggtttaacatgctcaaagagttgtttgggatctgtgtgacttgccttgggcttccgcaaacgcttcggaaccttcctcaacggaaatgctctcctccggaacgtcgaaaactaaagcaattaaacaaaaatcaacaaaacagtacaaaaacaagcataaacagtacatgtggatatttttaacatgtagatcttgattttagaaaaatttagcaacttgaaccacctgaaacggatctacgattatttagttatgattttccgaagatttaatctattagaaaaaaaaagaaaaagggaaagatgatgatgtcatgatgacgtcatcaatggcggccttggctcgggcggcacgaccaccggcgctacggaccttggtcgggcgaaaagagggcacctacgcgtagagggcaacaagacgaacgcaacggtactcaccaatgcgcccaacgacgaccgatggtggccggcgacgagaggaggcggcgcggcggttcggtcgacggcggcgacgggtctccggcgaccggcgacagcggggagagggcggccgaggttcctcacctccgtgcgcacctaacggcggcgagaggaagcggcggcgacggcgaaatcgatggcgcggcgcggctggagatcgccggcggcgacggcgagacaaggcggcgtcggcggcgagctacggggcacgggagaggacgggaataggggcaaacgaaagaggagaactagggggtcctatttatagccttggattgaagagatcagactccaaacgagaggaatcgaaaccggaaaatcttcgggttagtttgcagagataaaatcaaaacgagtttgattcggacaagatacacaaccatttgctccgattcttgaggggaaagatagaggaagatgtggggataaaaacccccctaacaatcggactcgattgcgacagagggcggcggtatcgatggtgcaaacggcggctcggacggctcggcctggcaatcggccggctggaggaggaagatgggtccgacatgtgggccccacatgtcggtgacccgaggaggaggggcgggcggcgtcggctgggccggcttgggccggttcggccgcgcggaagagagaggaatgttgggccgaattcggcccaacggcttagggaggggtttttgaacttttttgaataaaaataatttgtgaattgttgtttcaattattaaaaatacttcccttgctcaaacaattcccagaaaaatctagaaaatagaggaacaagtaaagtatttaataaaattttatctagctcatttttatgttgaaaattttcctagataattagggtttaacttgtaggcttttaaaataatttctaaaaatgatttaaacaatgtatttttacattagacgatttttagggcgtgaacaagctcaaggctagatatgtgccatcctctaatagctaatcattcactcgaacctatgatagattatataatttgtgatagactccttgtcacgcccggaatttctatccaaaattccaaacgcttacatgtgtattaaaccctcgtccaggaatcaaccgaggcacacaatgacaatttgataatagagtacaaataaataactatttaatactcgcaaaaataaaagattacagaggtagatagttcctctcaaagaataacattctacgcagcggaaaaataaaacgataacaaactacggaacagctatggcgactccactccacaggcatcttaaccaagaacaagctcaatcctccagatcatcaccttcactgaaaaactcctcttctgatgaatgaatattgcaagaatgagcatatgacatactcaacaagccacacagcaaatatgcaagtgcacaggataacaaaggatggcataatatagctcatttgcagaaacagcatttaataaatatttaagagaatagtaaaaacagttgaatatttaatcaatattaaataaacaccatacaacacacccatgttgcacaggcccaaccacatttgaacaaccaaccccagttgaacaaattaaacctccaaaccaggaattatccattccaaaccaggagtcaaattaattatcacattattaacattgatgagtagtgtgagactaatcacgaaaaacattgctcaactcacccataaccgcgggtacggctattcgaatagtttaagctctgatcagaggtgtaccactgtacccacaagacacaaccccacatgatgtcaccatgtgcctcaataccaccacggtacctcggaaaggagttgtgacaataccccttgcacaacataacccattacagcgcacctttcctggatcataatcacccccttataaacaaggcctggactccccagcgacccccgtggacttctcgccacttctcagtctggcgcactataatgaatcacgctatacaaaagataaagccgttgcccacgctggcttgtggctggcacgataaatgtttcacaacagtagctcgcgaaccggtccttaattgtcatgagcacaaccatcaaaaccatatgctcacaacccaccttaaccaggttttaattatcaattaattaacctcacacgattaaccatcgtgagctaccatttaatataaccatcattaataaaaatataacatagtttataattaatccctttagttagctaatgtttctaagcatggctaagcaaacatatatatagcatttagctggaccaatctaatatataaggttcatgctaatcaaattataacccataggaaaataaagtcatcttcggccaacaattaactgggaaaggttcaccacccaatgacattcgaaaataatgcataagttgaaataaaataatagctttaaatgggttcaacatgctcaaagggttgtttgggatctgtgtgacttgccttgggcttccgcaaatgcttcggaaccttcctcaatggaaacgctctcctccggaacgacggaaactaaagcaattaaacaaaaatcaacaaaacagtacaaaaacaagcataaacagtacatgtggatatttttaacatgtagattttgattttagaaaaatttagcaacttgaaccacctaaaacggatctacggttatttagttatgattttccgaagttttaatctattagaaaattggaaaaaagaaaagaaaaggagatgatgacgtcatgctgacgtcaccccacggcagccggctagggtttgcgacctcgccggagctagggcgatcggccgggcaattggagggcacctacgcgtagaggacgacgaggcgaacccaacggtactcaccacaacgacaaacgacgaacgatgacggccggcgacgagaggaaggcggcggcggctcgggttggacggcgacggcgagctacggcggtcggcggcgaaggggaaggggcggccaaggttcctctcaccacggcgcacctaacggcggcggcggcagacggcggcgacggcggaggcggcagcgcgacgcgaccgaagacggccggcggcggcggcgaacttaatgcgcgcggcggcggctctacgatgcacgagagaggacggaagagggggcaaacgaaagggggcgatgagatggtcctatatataaccttggattgaagagatcgaacttgtcacgcccggaaattcactagtaatttccgaactaatttgtgtataaaatcctcgtccaggaatcagccgaggtacacaaactgacaatttaatatacaaatccatcataataacgttacatacttacaaagaaaagaaaacagcagcggaattaacggtctagcgatggcttcagctccactcccacaggcagctcaactggggtataagccaaacgtcttctccttccggatcctttatcttcaactgaggtttgatgattattgcaagaatgagcatatgacatactcaacaagccacacagcaaatatgcaagtgcacaaggattccaaaggatggcataatataggctcatttgcaaaagcagcatttagcaaagatttaagataagtaaaacagtagagtaattaatcaccaattttaatcaacactgaacagcacacccatgctgctcaggcccaaccaaacctgaacaaccaaccccggtcatacagatcaaacctccaaaccaggaattatccattccaaaccaggagtcaaattaattatcacattattaatattgatgagtagtgtgagactaatcacgaaaaacattgctcaactcgcccataaccgcgggcacggctattcgaatagttttactctggccagaggtgtaccactgtacccacaagacacgattccacacatgttgccatgccccgaaataccaccacggcattgcaaagggggaaatcgtgacaataccctttgcacaacacaactcaaaacagtgcaccgtacctggatcataatcacccccttataaacaaggcatggactccccagcgatccccatggatgtcacgtcctgataaattcatcccgaaaataaaaatcattctctaaaaggaataatagaattaattaaaattcgaaaagaaattggcaaacactaaaatacgtgcaagaaaaattcaaatgtggcccggagaatttttgttaaattctccttggtctaaaaataagccctcaaattttacttgaattttcagagcaccggaaatatttattaaacaacaacatttatcaaagttcaataaaaagaaaacctaaaaatccctcctcttcctcctttgggccaagcccagcccgaagtccttccctcctccctctctttctctccctctccttctctccctcctcttgggcctcctcccctctcggcccagctccctttcccccctctctctcccgggctgcctctttccccccccctccttcccggcctgcctcggcccagccgcccggcccaagccgcctcccccttccccccccctcctgggccggccgcccggcccaacccgagcggcgccctcccgcccgagcgcgcacgtgcgcgcgctgaccgcgcgccccgcgtggggcccacgcgtcaggccgccgtcgccttcttcctccagccgccgcccggcttccctctccccgtgcgaaccctagctcactccctcctccaaatccgcttgattcgcttggttaattccaaaattaaataggggaaattaatccccattgactcctcttcatttccccctaatttcccctttgaatgccgcccccaatcgccgggaacggccgcgccaagtccggccgccttccattgccgccggccggcttttccgccgccgttccgacctcccccgtggccggctccctcttctctcatataaaatagaaccccctctttacgttctaccgttttagcctcttcccgagctctcccgtggtctctagccacctccccaccgtcgccctctctctcccacgttgccggccggcctccagccgcctctcccgcctcgccggagcgtcgtccggccgcgccgtcgcctcctccagcgtcgccgccacctcctccaccccggcttgccctccgtttcgcgaggtgacccccggagctgcctccccgccgtcgcccttctcgtttctccgcgccggccgcctccagtcgcctctcccgcctcgcccgtgcgccgtccggtcacgccgtcttctccctcggcctcgcagccacctcctctccctcggtcagccctctgtttcgcggggaaaacaccggagacgcgtcctcgccggcgtccagtggcgtcgccaccacttctccgcctccggccgcctctgccgcgtccccggtgcgccggccgacgtcgccaccacctctcccggcaccggagtgccgtcctctctcccggccaggccacggcgtcgcccgaatttcgccggaacgccgtcatctccgcgccggcctctccttcctcctcgtcggctcgtcgccccgctgcaccaccaccttcaccaacatcgcagcggcgtgttccacgccatcccctcctccgctcagccgctgctgcctgccatcatcgtcatcgtcgtctccgttcgtcctcgccgatcgacgtcccatcggttgcccggctcgtcgtctcgcggcgccgcctccgtcatcgtcatcgtagcggcgtgttccacgtcgtcctcgtccccgtgcagctgctgctggctgcccctcgtcgccccctcgccggtcccggtcgtcgtcgtcgtcgtcgtcctctcgtcgttcccggtcgtcgtggcgttcgtccctccgtctagccgttctcgtccgtcgtccgcgttcgtcaagcgagccgctgcagccccgtcctcgtctccgtgctcggctccgcgtcgtcaagcctcgtgccggccgcgtctcgcctttgtccaaggatcgccgccgaagtcgttccctcgccgttcgcctccgtcgtccccgagctgtcctcgccggtcccgttcgtcgttgtcgttcccacgcctcgtcgcgtggtggtaaggatccgtcctctcgcttccccgccctcgtccttccggtgtcgccccgtacccgttgtgcggtcgtcgaccccggtacccgtgtaccggtgtcggtagtcgttcacgtgtgcgggtggcgaccgtgtagtgtccgtgttagtgtgcccgctcggtagccgcgtggtttccacgtgtgcaacccgtgtggtgtctagtggagtccgtttgtcggccactcgcctcggttgacacacggggtccgcttccgtcgacccgtggaccgtctctgtgtacccggtctaccgtggtcctttaggttgacatgtggggtccgcatgtcaacggcgcagccttcctgtcttttccaggctagcgcttacacatgttttataattgcaaagcttaattataataattcgcaaatctccatataacagcattaaacttcggatgatcatatcctggtcatacgagctccgaatcgacccgttcaagtctcttaatgtttgttataacctaaagaaccctgtgctttgtttttatgtattgttattgcttctttataggcttgtagctttgtttgtgtgcttcgcgtagcttctgtcgttccggaggttcccgaagcgtggttcgtggtcgtcgccgaaggttcggaaggccgttctctctgagcaaggcaagtcacatcatccttgaacatattgaatcccagtttgtaaaattatgttgatttaaattattgcattaccgctttatttaaattcccgcgttatcactgttttatctagccatgcctatttacctttgttatgaccttattattgctattgttattattaccttgttcaccctagagtaaacaaaacctcaactagtggacactctactcgtggtatccctagtttaaatttaggtagatgcttcgcaatttaataggacaacattagttagattttataactttagactttgggaatttctcatatcatttggacactatggaattgttggattatggtggaattggacatacacctctcttcctctttcaaaacccctaaagcctgttttcggtggggtttgggtgcatgccagttatgggaagtagcaccccggccactataaggattaagctcgggcctctgttgcaaagcactaccgtactaaccacatgtctaatgggtaaggcttaactcggtgctcagtctagtcctgaacaaaaggacacggattggagatggatgaagtcgggtgtcgatggacattctccagggcaaatgaaggctacacgagctgcggcccggtagtcgagatgtcgtatggcagagggttggtgccctgctgctaggggctcagttctgcctgcctgtcccgggtatcccggccgtaggtgggattgggtcggtacttttgttcacggctaggatgggtgaagggttatgtcacatctttacgacgggttccaaggccatggaatgcggagtaaagatgtgtcttgtgggtaaagatgtacacctctgatcagagtaaatctattcgaatagccgagccctcggatatgggcaagcctagcaatgtacccaagtcagtgttttaattcttaaaatttgctcaacaactaaaatatggaatggttggcctgggttggcttgggacgagctgggacccagggtcgggttgccagttcggtccgaatcatcgtaggccttgggttaaggcaggttcgtgagggttcacggccttgattaataatactgtgtagctctaggatcgtctttacaaaatggctttgggcaactaagtggcttttaaatgctgtttactgcaaaacttaacctctatattattatccccttgtactcctttgcattaattgtgcatccccggtgtggcttgctgagtactgtggttgtactcattcttgctcaatctttcccctcttcagtaagagaagctttggagaagaagtcttaggtggagtcctggcttataccccagttgagcgcctgtgaagatggagccgtaggcccgctagtccgctgctgtttatttttgattgtcaggccttaagtgcctttgtaataatgtaaatattatcgatataataaagatgtgtcttttatatcatgtttgtgtggtgtaccccggcttttcctgggacggggattaatacactagcgttcgggaaaaggcaattttcccggtcgcgacaatggacttctcgccacttctcagtctggcgcactataatgaatcatgctatacaaaggataaagccgttgcccacgctggcttgtggttggcacgataaatgtttcacaacagtagctcgcgaaccggtccttaattgccatgagcacgaccttcaaaaccatgtgctcacaacccaccattaatcatattttaattaccaattaattatcataacacgattaaccatcgtgagctaccattaaatataaccataataataatgtagtatatatgattcatcccattagtgagctaatgtttctaaacatggctaagcaattatatatatataacatttagctgaaccaaaccaatacataaggttcaagctaatcaatttattacccaaggtatcaaggaatagagcattcaatgcaaattggccataacaaaggaaaaggttcacaccacccggtgacattcaaaaataaatgcacagttgaaataaatagagaatttaaatataggatcaacatgctcaaaggattgtgtttaggatctgtgtgacttgccttgcaataatcgatcttcaattaatcttcttgatcacttccgacgcactcacgaaccttcgcaacgacggaaacgacaagctaacacgcaaaacgaagaaaaagactaataaaaaaccaaataaacagtacataaaaagtaaacaaacatgtagatcataattttagatgaattatgagacttgaacggcctcattctgacttcaaatgaatttattatgaattttacaagattaaatctaattaaagcccatttaaaaagaattaataaatttaattcaatttatggacaattttaatatgtagatctttattttagaaaaatttagcaacttgaactacattaaactgagttacgatgatttagttatgattttccgaagatttaatctattaaaagaaaaggaaaaagatgagatgatgacgtcagcatgacgtcatccatggccggcggctcggattggcgacctcgccggagctagatggtcggccggggatttggagggcacctacgcatagaggacgacgagatgaacccaacggtactcaccacgacgacaaacgacgaacgacgacggccggcgacgagaagggcgacggcggcggctcggttgaacggcgacggcgagctccggtggccggcggcaaagaaggacgggcggccgagcttctccaccccttggcgcacctcttggcgatggcggcaagcggcggcgacgacggaggcggcggcgcgacgacgccgaagatggccggcggcggcggcgagctagacgcgcgtggcgcggcggctaggaggcacgggagaccacgggagagagagcaaatgaaagaggggacgaggggatgctatatatagccttggattgaagagatcgaactccaaacgagaggaatcgactcgggaaa

SEQ ID NO: 18867 - DNA, 1496 bp, Oryza sativa
  unsure (1)..(1496): unsure at all n locations
ggagaagagaagagttgggtcgaattcggcccaacggcttaaaggaggggtttttgaactttttcaataaaaacaatttgtgaaatgttgtttcatttattaaaaatacttcccttgctcaaataattcccagaaaaatctagaaaatagaggagcaagcatagtatttaataaaattttatctagctcatttttatattgaaaattttcctagaaaattagggtttagcttgtaggtttttaaaataatttctaaaaaattccaattaaacaacaatttatatatttaggattttaaacaagaaaaactcttaacaattatagttagatcatttaatgatcaaataattactaaactgttctttgtatcatttaggaattgagctccgaaaaatccgagaaaattccagagagtataattaaccatggagaatttaataaaaattaaatccatccatgctttatatttaggaaattttatttcccacatttaacttcacttgtaaattaatgaacatttaatataaattctattaataatttactaaattctttataaatcttgaaacgaaaatcaggctgtgacagaactccaaacgagaggaatcgactcgggaaaaatccaaactcggttttagggataaaatcgaaacgaactcgattcggaaaaaatcctcaacgatttgcttcgaaacttgggaaaagatagaggagaacgtgaggaacaaaacccctcaaaaacccgaaagaatcggggtcggattggagcagaaacggaggcggaaaagggcggctcgggcttgctagggcggccggccggaggtaggggatggatccgacaggtgggccccacctgtcggtctcctgagaggagggcacgggcggctcggctgggccggcttgggccgcgcgggagagagagaatgttgggccgaattcggcccaacggctaaggaaggggatttttgaacttttttgaataaaaacaatttgtgaaatgttgtttcatttattaaaaatacttcccttgctcaaataattcccagaaaaatctagaaaatagaggagcaagcatagtatttaataaaattttatctagctcatttttatgttgaaaattttcctagaaaattagagtttagcttgtaggcttttaaaataatttctaaaaattccaattaaacaacagtttatacatttaggatttttagggcgtgacaaacctaccccccttaaacggaatctcgtcctcgagattcagaagaactggcgaacagatgaggatgagctgacttcaattcatcttctcgctcccaagtggcttcttctttgaatgattgctccatnnncccnngcagaacgtataacgcgattcctggtattcctctcgcttacttccaaaattctgacgggcttctcaacataagttaaatcttcttgaagctctatacgatcaggatctgcttctccgtaggtacacgtaaacatttcttcaa

SEQ ID NO: 18868 - DNA, 504 bp, Oryza sativa
ccgctactatagaaatagaagaagttcctttcccatcctcgcttatcttgctagaatccaaagatctagatgttatcttagggatggactggttatctcgtcacagagagttatagattgtgccaaccgtaaggtgactttaaccagtagcaatggggaaaccgtttctttctttgtgtcctctcctaaatatcatggtgtgatcttaaaccaagttgctctacaagagatccccatagtacaagactacccagacgtgtttcccgaggatttgccaggtatgccacctaagagagacatagagtttcggatagacttggtacctggaactaaccctatccataagagaccatacagaatggcagctaatgagttagctgaggtgaagagacaggtggatgatttgcttcagaaaggatacatcagacccagtacttcgccatggggagcaccagtcatctttgtggagaagaaagatcatactcagagaatgtgcgtggatta

SEQ ID NO: 18869 - DNA, 2192 bp, Oryza sativa
catctttcgaaagatttttatgatcgtatcacacagatttttaatctttggattaaaatccgatagatataataaaaagcaaaaagcaattaagaaacaccataatggacactaaattaccatatcctcaagaaaaagaccaaatccaatacaaaatttaaaatttacatgcaaaaattcaaaaattacagtgtaacttacaaaagttacagtgtaagttttataaattacactgtaacttacaagaaaatgcactgtaaatttgagtgagaaaatcgagtgagagataagaaaaaatctttcgagtgagatatagcaaaatcgggcctgtctctttaattctgatggaaagtaaacaaaaaaaaatcgttgaccatttatccatgttgaatttttctgcagacctcacgagaagcaaggaccacagaatttgatcccgctgcattttttttttttctaattggagtgtcacgtatacgtaaaattaaagtcacattggattaaaaccggttgaaccgtgaacataccatgtagaccgaaactgctatcaatattatcgagggattagatattattggttttagaagtcgggggaagctatacacggtacctggtattctgggatcgagcagatgtgcaatataaactctgtacctgtcatggcaggtaactctcaaagtcaaacttttcttgactggcttaacactggttatctgataatatcggtgccatcatgttctaactgcctatcaatcttgggaccactatgtagatgaacagtataaccaggctcatcgagctccactgatgatggctctcactgtctggtatctgggctcgtagctgtcttgtctgggcctgtactctcacgctgggctttgggactcttcgtgagccactcggtaccgctgtctagaatccgacatcgaaatctgcaaacacccactcgcctaacgttttacccaccacaatcatgatatttttacctttggagacgaattgcagttatgaaagctacattttagccttgtatttgtgcttaaaattttgaaacgccaacttgtcgaataacatatatgttttaaaagcaacaccgaataacaaattttcgtgagtgggtacacatatatatatgaatatataattttgggacatattcatcacagtacctcctgtcttgcatagttccatgcatgatctgaatggttgacacatgcacgccaggttgatttgcaaatatatagtaattttcaacagaaccagtacgtgtaaaatcaaaattctagcaaagaccgtagatatataatactccctcgtttcatattataagttcgtttgattattttcttagttaaacatctttaaatttaatcaaatttatagaaaatataacaatgttttcaacacaaaacaaacatattatgaaaacatattcaataatagatttaatgatattaatttcatattttagatgttaaatttttctataaacttaataaagtttgactaggaaaagagtcaaacgttttataatatgaaacggatgaagacacaacatgaagatcaacgacaatgcatcaatccatggtcctcacatatatatcggcagtggtagagtttgatctgctgatcagttacacgaatcagagcacaaacgtgctgtttatatatatatatatatatatatatatatatatatatatatatatatcatacaacacacacaatatggcacaatggtggcaaggtctgtttaatttgtgcacgtacgcaattacgcatgcagctgatgagcagccacaaacgctagcttgcaatgcatgctgacacatttttttttcacaacgcctaatgacaatactggttatgatgatctgacgaacacatagaattactgcatcgatttcttcaggttgatcacgctgttacgtagccgcgggtatcgacgccttcagatttcatctgcaacagatacaacacactttcagatttcaactacaagagatgtaagaaacagttactgagttaattattaagatgaatgccagtaatacatatactcccttcgtttctaaataactgacaacatttactttccatttgaatattgaacattgttttctctcaaatgttagaccaaagtgaacaaaagtccgatgcttgtatttaagatatagcacactttaataaca

SEQ ID NO: 18870 - DNA, 1196 bp, Oryza sativa
gccatgaaattacgatattggtctaatgaacaattgcatgtgatccactggatcatacagaggatcctgactcctcagagcattggttggctgcaataaccgctgtgtaatgcccataactttctgctcaggatttcttgtctgaagattttgctcagagaggtcatgcatgtttgcgtttgcacaacagtaactagtaagaatgttgaaagttctatagcatttaaagattgctcttactgttattctgatatctatatatgtccacatctcggagtcaattcggaaaatttagtactagttgaagaatgtagactgaaagaaatgacatgatgttacctgggcattgacttctgcaactgtgccagagttggaggtgtcactgtttgccttcttgtacctctcaacggtggatttcacactgcaatatgaccatgattagtcaagggttatgtttaatcactcctacacaagaaattaccagtttcagaacagtatagccaagacgactgcgaaaaaaaaaacttactcgctaggcaattccaaaaaagtttttttttctagaacatataattttcggcaagctagctatgagggagaaaagtatgataattaattgaatttactatcccgaaattatcgtataagtattggttttaaaagtttacacaagaggcaactgagcatagcttgtcagcatcttcatgtactactaaaaggacgaaaataaccaacatcaattagtaatacagagaatacagtataaataagtgcagtagaaagttgaaactgacattaatatctagtattccctccatttcatattataagtcatttgattttcttttctagtcaaactttgttagtttgatcaagtttataaaaaaatttaacatctaaaatatcaaattagtttcattaaattaaacattaattattttgataatatttttgttctatgttgaacatactaatatatttttctataatttaataaacttaaagaagtttgattagaaaaaaaaatcaaacgatttatcatatgaacaggagggaatacttcacatttagaatgtggcgttcaagggcaaatgaccatagttaaaacacaacatagcacattggtccgaatcgtgcgctatcacaagtcatcctcgctcattcatgaactactgcagagtagcacagtggagtac

SEQ ID NO: 18871 - DNA, 9397 bp, Oryza sativa
cacgattgaatttgatcggtggttgtaaacggctgcagtatatatgaacatgctctattttgattgatctatggttacatgtctctaatttatatataaccatagtatcaatcaaaattagagacatgtatgagttgtacgatcgtacgtgtattagtataagaaaagcgtagagaatgtaagacgaagactagtagaagacgacgttgaatttacttctcttggattgagatggaggtgagagtggtagtagagcagtggtgtggtagtagtagcatttacaactgtagcgtgtctcgctccgtccccatgacaactttaactactgttgctcctcagaggcagtgaactaaatgcgcattcatggccgctggatctaacactcgtactactactaccgcgctcaaatagtcaattctacctcagctcatggtcatcggtgacatcaaaaggaaaccaaccgaacgatggatgaccaggtggcgtttgaatctagggactttaactttagtccctttatttagacactaatttagagtgttaaatatagactacttacaaaattaattatataaatgaaagctaattcgtgagacaaattttttaagcctaattaatccataattagaaaatgtttactggaacatcacataggctaatcatggattaattatgctcaatagattcgtctcgcgaattagtccaagattatagatgggttttattaatagtctacgtttaatatttattattagtgtccaaacatccgatgtgatagggacttaaatttgtaagcagagagaaatttgtaatcccattatgttcagataccacctcaaatttgtttcttcagatagttcagattatgttgggtgagagaagagggagagacaagcagagcaagccggccagccactggtggtggtcgtcttcaacgtcgtagtacgtacgtgcgtactctaatggcgccggccggccagccggacggccggacgggcaggcgagctggcatacggcgagatttgtcaggtcggccagtgcaagcaaaggctgctgctactgctgcagctgcagctgcaacgacgatggagagattgctactgccatttgcgagcaatttgcaactgcaaattaaaatatggccaaccgcgtggcccctccatctatctatagggtgtgtttaggccgtgtttagtttctcccctatttctaactttacatcacatcatatcacattataaaaatttttatacacataaacttttaattttttttctaaactcctaactttcttcaaactttcaattttttcaggaattaaacacaccctatagatagatgggagttggaagtttgaaaaaaaaaagtttggaactaaactcggcctatctaccgatgcccttgtttagttcccaactttttcatcacatcaaaatttttctacacatacaaatttttaacttttccgtcacatcgttctaattttaaccaaacttctaatttttgtgtgaactaaacacagccgatattcatcgatcgatcgatcgtcttctgactcacttgttactgctcatcaccgagttaccaacgcctattgccgatgcaaaaatgcaatgcagtaattcaatcgcgtgtactgcgtactgtcgcatgtgtatgtacgcgcgtactgatcgaaccgttcgatcggaagagagatcgagaagaacagatcaccatgcatgttcttctgatgtgtatctgcacggccggaaaatcgatcggggatctgtcctaccaagtgccccgggccctctgttttttaagaaattatagagacttttaaaacgattaagaatgagaacaaaaagaaaactattataaaagaaggggttgaaggtagaatggaaagaaaattaaactacgggtgattaatgtactagtactactaatcttttatatttgtgtacaaatgatgagctaccatgtcccttttattgtgaacggatagagtattttggatgtctctcatcgtctgtttgtagtcatgatcaaattttatactttaaaactttaattttgaacttaattttgatgttttctcattgtagttagtttttgtgtcattcactttttaaaccgctaagaagtaagaatacatatataaaattttatctataaattatttttagttatttagttcatttttctacctccgtagatcaaactatcatagcctagatactaaagccatgcatgcgtcggtgcattctaaggtgctgatagataatatattaatgataaaaactgagtttatgacaattattcgagagtaaaaacaaatgaattgaattttatgaaggttagtaaagttgatttttaaaagttttctaagaaacgttgacgaagaaagttttgggatgaatgagcttaattagaaagtgtgcatataataatccataatccaattaacacacacagattgctgattaacttgagaaagaaaaaaaatgcattgagagagaaggaataatcgaaaggactcatcttttggcttatgtgcttatcaactaaaatttgaacacctttaatttgaaggtgattttggagtttttcactgaagtttattttccagcctttacttttagatcgctaagaacacatatataaaagttttattcacaaattatttttcgtttgtaaatatgccgtttgacttatttcacagataaatcaaacgatggaggccctgttcttttatccaacaaaacttagattaaattctggatactcatggcacgcttttcaaactgctaaacggtgcgtttcgtgcgaaaactttctacatgaaagttgttctaaatatcagattaatccatttttcaagtttgtaataattaaaactcaattaatcacacgttattacaatctcgttttgcgtgaaatacttaattttcatcttcatcttcagagcattcaaacaccagtgtactacactattacatgcagtgtgaggtaattgcttggcaaattcgatcgatcgatgggggtgtgtggttaattgcactttcagtcttgcactactacacaccaaggactcttctgattttgtagagatagacgcatgtgaaggccacatggagaggctcgtgccactgtaaatgtaaaatgcccccacaaaccaattcaatactctactcctctcttcacacacgcatatgtgcgcattcaatgggatagatggacttttgtgagatgctgctacgtttgattttgattagcagggacttgtccttgggtagatggagttcatcaacagagatttttcagtgtttgtcaccagagaaaatgccatcaagagcaaggctttctttcttgattcttgttgaaatataacaccagagctaattaggactcatgctaaaatatgtttcgttgttggattattgctatgattgttaattaatttggagaatgaccagtggtaggtcactttatgaacgagcaacacacgagatataaccaaagcaagaaaaaggtaattaattatcaggacataccctactaataaatgtcatgtacctgcatatgccgttggcgaatggtgatggatctagacatttttggagtgtccgaaatatccgagaatgttgtgctctagagagtgacaaattgacaatccctttgcactgtttctttctcttttttttcttttgcaattatatgacagacagacgcatacgcaatgactgtatcctttaacatatgctcatagagatgtaaaccatcggcacatttctgatccaattgaattcctttaaggtccatttgcacgtgcgtaatattcataagcatcaggatttgaaccccgataagtttagtcatacacatccataactccaccaccacactactggtgctcccctcccccaggtccactaaatctttcctattcttgctatatatgcttgattcactgttgttattttgatttgtcacggaatttatcacctttgttcttgataatttgtctttctttctttcctttttgtattcaagctataatgggatgcagaaatttaaaacaaccacgcatgatatttacggtaaaaaaatataatgtttgctgtgaaccgtattactgcatatctcacaacatgcatgttactgtactgctacaaattaaaatagccataattgttccaaacacaggcccagagctttgcaaatgaaaacaaaagccccaaaacaacacacatatatatgtggagcccagaaccagacgaccacgtacgcagtaagcaacaagcaagcgaacagcactacagctaaccttcattaacttgatctgcatcaatggctcatggtggctcttctagtacagaccgatggcgacgccaagtcatcaagatctcacgaccagcacacaggaacgtcaacttgctgtcgatctgcaggatcaatgaaactcctacttaatttgctaacttaggacagccatttcagtagtgtaatgcagttaatactcccccaataacaaaatataagcatttctacacggtctatttatagagcttctgacagctacaatttctcttataattaaatgtctctaggttatttagcaaacactaggggttgagaaatggaaaaaaatttccatttcaatcacttgagtgatccaaatttgaatgtttaaatttcttagatttccctaccaagcacctaattggcgaaaaatgtattgatttccgtgcattagaatcaatgcctctgaagtatttatagtgccatacaaatttgaaatctaaaaatattatattttgaaatggagggacgtattttgtgtaagcatcagtcaacatatgtataggtggattgatatttcagtccgaagaattggatgtaatttgacagattctgtagtgaaatacatatataactgaaaactaaagcaactctgttttttatttagaaaaatggactaaaatccgatctccacgtctaaactggtttattatcacccgtcacggataactattagtatcgactgatagggacatgacacaggtgagtttttcacataagcgatcattctcctatgatcaaatacccaccacccgtcacatatacaagggttacgaacggttgcagctctaattgagggctttgtttagttcatgaaaagaaaaattttttgtgtcacatcggatgtttgaccggatgtcggaaggggttttcggacatgaacgaaaaaactaatttcataactcgcctggaaaccgcgagacgaatcttttgagcctaattaatccatcattagcacatgtgggttactgtaacacttatagctaatcataaactaattagactcaaaagattcttctcacgatttcccctctaaatgtgcaattagtttttttaatctatatttagtgctccttgaatgtgtccaaaaattaatgtgatgttttttaggaaaaaatttaaggaactaaaccaggccttagttgtgcgcggttgtgccttactagatcaagactccatgggaccgagctagcatggtgttcaagcgtgcttaatttggtcaatgtgaccagtagaagaccagtcttgctcaaaattgacaactcatggaaatggacgcatacacgaagaggagaaaaggctgaacaaaatgagagcttggcctcaagaagcaaagaagttaaagccataggagaagatgagcacagacgagtccagctaggtattgctagctagcttgaccatggctagcttctcttggatgcaaagagagaagagagaggcagcaatgaatgccctccccaaccacccgctgtgtcatctgcgacctcaatttaagctcaccatcaattcccatggcgccagctagctagccactctgttgtttccccctcccccgctatttatagccgcgctgtccttcccacgcttcactccaccaccaccaccccccatggcggcagcaaggatgaagaacaccaccatgggttgcgccttcctgctcgccgcgttcgccatggccgccgccttcgtccccgtggccgagtccaggaccacccccgtggagaagacgaccaccacccaagcaggtacgcacgttcatggcgtagagagcttgcattcttccatggttggtttgagtggtaatgtgtgttgttcgattacagaggatggtgtcaagaagccggactgcgtgccggcgttcgacccgcgctcgttccccggccacggcggcaccacgactccgacgccgatcccgggccaccacggcggcggcggctcatccgggaccacgccgtcgcacggcggcggcccctccgggggcgcgttgccttccccgtcccacggcggcgcggcgccgtcccacggaggagggtacggggcttccccgccggtgacgccctcccctggcggcggctacggcggcggctccccggcgccgtcccacggtggcggcgcctacgggagctccccttccacgccttctggcggcggctcctccccgacgccgtcccacggtggcggcgcgtacggcggcggcggagctccggcgacaccggcgtcgcacgacggccacggcctcatccccaccacccccgggacatgcgagtaagccacgtggcacctcacaaaaaaaatactccattaaatttcgttgctaatttagtcgctgacgagtggggcccctccatgcgtgcagctactggaggtcgcatccgatggagatgtggtcggcgctggggcggtggccgagctcggtgggccacttcttcggctccggctccggcggcgctggaacggggatgagcatccaggacgcgctggccaacacccgcggcgacggcgccggcgagctgatgcgggagggcgccgccgcgctgctcaactcgatgacccgctccggcttcccctacacggccgagcaggtgagggacgcgttcgcggcggcggcggggggaggctccgacggcgccgccgcggcgcaggcggcggcgttcaagaaggccaacgagggcggccgcgcgtagacgacgacgacgacgtacgcaacgtacgcatccgtgcatgcatgcatggcttaattgtttaattaggcgggaaaattaaaaagtacgtgtgttaaattagttgtgtggttgatttgatggtgatggtctggttgtgtacgtgtggttggtgtgtttatgcgtgtaaaatcatgtgtaatcactctcgtgtttaagtttttttttttttgctgtttcaaattcgatcggtggcaaatgaaggaagtgagcttatccttacatggttactgctggtgaatatttcttctggatttattttttcgtgttatactattcaactgcagtcataaattaaattgtcttggactggttcggtggaggtgaattgaaattgaccgtacgtgaaccattatagggccggataagtatcgctcgaagtgtcgtacgatacgagtgaattctgggccatttttccccgtgcaaagatgccctccggttagaggaaaaagtccatattacacaacgttttcttagttattaccaatattgattcatatttatgtcccaaacagtttcgatggtgattttatcataagtggttgactattgaaacccatatgtcaaatgtgagaagttaagaaatgtctatttaggagagtaagattacgagaaacagcttgttagtagccatctttggtaatatgaaaagactattttttcagcttatgccttctagttcattttctgaatagtacatctatatcttttgaaactgtagacgaaacactgattattttagtgagcttctaattttgatagaagctacagctgccaaaaactaaatgacattgagacctttgcacttaacccacatagcgttggcccccaccttcaacacatacattatttgtactatccttgtcatattcattgaactaagtcgcatcatacgtaatatatcattttaagctccgctctccttatattggagagacttgtttgggggttggcattggtttttccaacgagactgatttcgagaatctgaacatgagcggtagattgaacacccacacaatctcgatttgacataataacacttctcatgtggacaagaggaacagagcaactagaacacatagttatcgatatgttaggctacgacttaaacatagattcttttacccaagtgatcgggactcgtagaagtatctaatatgattaagaggggacagagctcggacctgcagtctccagttctcatgagcttgatgggaaactttaatttctcctgaaattttccaattttaccaaaagaaattcaaatctggggaaaaaggggtccaaaatgcaaacttattgaggccgaaatattctgaaaatttcgaaattctttgcctttcggcgacacatatagaaccctacacatataaccttcagagatcattatcattatgcgcttctacgcaaggggccggaatcaccaaattaacacaacaattaatcaggcaggcaggcaatcacgtagtgaaaggaaaataatgacgccagagccactacgatcaacgacgcctgcagcaacgtcgacaccgacgccacccgcgactccaccttcgtcctcgcctactccggtgccttcttcgaccggcgagcgcctcatctgtcaccaattagccaagtcagctgccatacttgttactttctccgtttcataatgtaagtcattctagcattttctacattaatattgatgtaaacggaggaagtacgtacgtactccgtagtaattagctagggtgatgggcccggctactaccaattctctgaactcaatatataggttctttgtcaaacatatgggccatgtaaatagggttaatttaccatacatctcagtttggattggcctggcccaaactagtagggaaagaaacagccttggttcttgggagaaggtcaggcctgctagctcaggcttgagctcggtgccactaagctcataaaccaaacgagccgagcccaaactttgtgtgctgggctcgttaagcttggtgcgagggccttgcgatggagctcctcccctaggctcctttagtttatccctatctcctctagctcattccttggataccgtaggtttcttttttcgcgagcgcgtaaaaggattgcacgccaatatattagaagaaaagagttatagttacacgacgcaattagccagaccggcttacgccaagggaaggggaaaaaacaaaggaaaaagtacgaattaccccctgaagtattgggtgagtacgaattacccccctaaacctgaagaccagtaatttttcaccctcaactatcgatatcggatgaaacccccccccccccccgaacagctt

SEQ ID NO: 18872 - DNA, 11860 bp, Oryza sativa
cagtggagggtgcggaggagcttgaagcggcgggaggaggggtagtgaaggggacggcggagctcgaagcggcgggaggaggaggcagtggaggggacggcggaggatggagctcgaggtggtggtgggggtgcctgtagccgacagcgcgcggctcgtcaaggcaatgttggggacgcctgcagccagtgacgctcgaggaggtggagaaggcggcggaacgagccaagggcggcggccggcggagcttgggcgacggaggaggcgctcgctgccgccggcacgcgagccgtaggcaccagcatctgatgagagagaggggggtgagagggaaagagatagagagaagaaatatctgacaggtgggccctattgtttttttaataaaaaaaattgctgactggactgccacgtagaccaaaaccgcttgcaaagttgctcgggggagtttttcatctggtatcgatagttgagggtgaaaaatgtctggtttttgggttttagggggtaattcatactcacccaatacttcaggggggtaatttgtactttttccaagaagctgaagcttaaaaaactatgacggctaaacacaaactccaagcagcggaaaggggccgagccatgttgtactcccaacaagtccccaaaagtggcaatgccagctaaagaccacaaatggccctctgagtggatggactccagaaccactgagaccgaagagagcgcagagtcgaaaaccctagagttccgttccttccacagctgccaagagactaggaacaccagggagtcgaagccggccagcgcggagatgctcaggtaagcaggccctggaggatggccaccagtcctagaactagctgccacggggggagagagggcagcccagctaggcggcgacagcacatggagtcagacctgatgagcaaacacacagtcgaggaggatgtggtaccgcatgttcctttagctcctcctcctcccggttattggctgctctagttcattcccttgccttcttttggcagaggctttcgaaccctcgcgagccaattgaagccaataaactatagccgagccaagcttctgccctagcttgttttggtaatcgagccaatctttgacaccagggagcttttacaagttttcaagccctagcatatggtgtacttactaggttgtttgatatgttgcatgaatcaatggtaatatcaaaatttcgtaaggtaaaagatatcgatgatacgatttggttctaagtcctagtaaattttggtggagttaattagagtgtgaatttctaaagttaccaaaatttgatggagtaactatagcaaaaacatgtttggtctattacttaccaagattccatatgttagaatttgtaatttattcgaacaaagggacccctgttgtaacataaaccaatagtagttctcaagtgtaaacaaagaagaaaaatgtccgtattgattctcaaagcccttataatgtccccatagaggtctattgatagccataagattaggttttacatatgcttttatatgtttactctttgatggggacagttataagaatgtcatagtactctcatgtctcattggttttattggacttatgttaagtcttaacaggccttggtctactctatatagggccttgctctgaagatcgcctggtaggccggctacaagatggtctcggccattttaatgggcttagccatcaccatcttcatgggtattcgccaaatgggtgctcatggctctggcttcgtcctttccaccagcctttgtaccgaacgaaggggagtgaggccgccagcctgcctcgaacaaaccctagataacacgtgacaaaaagcccaccccacatcttatatttacttaaaccattggatcagctttgagattcgtgatactctcgcaaccctaattcccacccccaccttcgatccctcccccacgccgccactcctccgccgccaccaccgccgccacaattttttgtcaaatgaagttaaaacaattccattgaacaaatcgaatatactcctaggatgctactggtacatttacagccttccataggcaaaacccccctcaccaaggaatggtgtgtgtaactcctccatgacagctttacccagtagcttgaaacggctgtcacagctaattgctccaccacgaattcattgatccaacggtaacctacaaacattcttgtgtatatatacacgacaacacgatcacgcactccttagttcgatcgtgtctctctcctcacctcactcgcggacgcttcgtcttctctacacggatcaagcagctaatccaccatagatctctctctctctctctagtccggcgtgtgtagtggtgtactagctagctagctactagtagaagcgtacgcgtagtggaaaggcaatgacgcggcgtgtcgccggcgtggctgcggcggcggcggccgtcgccgccgccgtcgtggttcttgcggcggcgagctgctgcgaggcgcgcgacttctacgtgggagggcgcgacgggtggacgaccaaccccgccgagccgtacaaccggtgggcggagcgcaaccgcttccaggtcaacgaccgcctcggtacgtacgcggattcgcccgaatattccggcgatcgatctcgccggcggcgtgcgtgttcgtttgtgtgttcgtgtcgatcgaccctgtcggaattttttgttaaatttggcgcgtttacggttattgcagtgtttaggtataacaaggaggactcggtggtggtggtgagccagggccactacgacggctgcaacgccaccgacccgctcctccgcgacgccggcggcgactccaccttcgtcttcgacagctccggccccttcttcttcatcagcggcgaccccgcccgctgccaggccggcgagcgcctcatcgtcgtcgtcctcgccgtccgcggcaacgcaaccgccacgcctaccaccccctcgccgccgccgccgccaaccgttccggcggcccccaccccacgcccgtctccgccgccgccggccgcgggaacgaacggcacggcgagggcgccgtcgccacccgttccagcaccggcccctgcaggctcgccgccgccgccgccacctcctccggctgggggaaacttcacggcgccgtctccggctggagggatgaacttcacggcgccggcgccggggacgaacgggacggcggcgccgccgccgcggccgtcgtcggcgccatcagtgaggggtggtgccttgctgatgctgctcgtcgtcgcgacagccggagcaatggctctcgtttgatttgttggtcgaacggtctagcctagctagttgcaaattatgtttccttttttgcatgcattgtgtttttgtttttgttggtaattcgtgtcagtttgcgtttgaattcggtaggatttgatcatcgggccaaaataattcagattgttgctttgcttagtcgtcaaaattaatctctcatctgtagcaagtggagatatatgtgtaatgttttgattcataggtaattgcattaaagaaatgttgtttatgcgtttttgctcgatcaatctttacgtctgcctgatctgtaaatccgtcaagtagggcaagtagctggtagtaaatcttaattaattcatatacattcaatccgatttaacatctctttaattttcttccattttaacgtaaagttgccgtttatcctccaaaatagtactgtaggagtttcctcgataattaattgacatgaacactaaaaacccatattcccttaaattccataatatccataatccatagcactcacttaatttgtgactgcatgtttcaccgtagtactactaaatatttgcttattaatgtattggatcataaaaaatgattatgttatatatttgtggacaaattttctgtcagatgtaaatacagtatgattataatgtaattatattataacttgtatctaactacaatgtaacttgtatataacttaagtataattttaaaccgttagatttacttcaagatttgtacaagttgggaagaaaaaaaagtatagcacacatagagatgaggagaatctgtccgacctgcgctttgcaaaaataatatattacatacaaattgtaatgtagttatgtaagttacaatataactacaatgcgctatatttatatttcataaatatttaggagaaaatttgtcaccgattgtatagctagacccaacaaaaaatgaggtccaatatgaatatgtaactggtcgaatacacacaagattgaggcccattaaggcccaaaatggtgaagcccatttcctccagtgataaataaagcccatcgtgtaatgggcccgtcccaaaattagccttcgaacactaattcacaggaggtattccgtgatgtttcagctaatgtttcactaggtcattttaaagtgttgcacatggtattattttgatgttataccaggtactttgtgatgttttagtaggcattttgtggtgtttcaacagttactataatataaaattgtttcatatataatataaaaatgtttcatatatattattatgttgcactatttcatttgtaaatgttgcacatggtattcttttgggtgtttcagcaaatactatatttttttatcaacaatgacaactgatttaaaaatatttcaataaaattaagtatatgccaaatatatatgttgtatgctttgtatgattttgtttatgtttcattgatagttaatgtcttgtgtactgtttataattgttgcagtcaataatttttttatatattgtatttcactgaaacgtttcatgaagtgcgctgaaacatttttacataggtgatgaaacatttttataagtagtgaaacaatgaattttttttgacacacgtggtatgtgtatatgtgtttgtcgaaatataactatgtgagatcttgtcacaaagatttaattataacgaatgtaaatatgtaatggaatcatatcttgcatatgtattttaggagaaaaagtagtttaaaacacataaaaagcaaggacgtgtagtatgaaaaggaattggagacatagtagtgagatagcacgtcactgacctgcatgtaacaaataaagacaaagcaacgcagcaagcatccaaatgcacatgcgcgaagcaacagggcaaccatccgatatttggtgcaatatcggacgtccgcgccgtagctctctcccaggtcgaggcatgcatggcagagaccgccgccgcgcgtcgcggcggcaccggccaccccagcgtgcggccgccctggttcgtctcccctcccctccatcccgccgcctctcctccttatcccctccatcttctccgccgcctcctcgtctccctcctccttcaaagccaaccaagatttcatcagggtaggctcgcgtacatcgcgcgcggagggagatcgatcgttcgttcgtcctactcgtatccatcgatcggaagaatcccagtcgccggcgcccaagaaacacaccgaacgctcaggtgatcacaggcatggcgccgcctctcctccgcggcgtgcccgtgctgatcgcgctcgtcgtcatggcggcggtggccttgctcccggccgcggccgccgacgacatgggcggcgtggtggcgtcggcgtcggggcggaggaagatggcggcggcggcggcgacgtgcgacggcgccgtgggggagtgcgacgtggacgacgaggaggaggtggaggagatggcgctgatgggggcggcgggcgccgcctccggggagacgctgatgcggcggtcgctggcggcgcggcggccgacgaacaggtacgtgagctacgcggcgctggacgccaacaaggtgccgtgcaacaagcgcggccagtcctactaccagaactgcgcctcgcagaaggccgccaacccctaccgccgcggctgctctgccatcacccgatgcgctcgcaataccaactgatcatctcctcttcctccgccgtcgccgccgtcgtcgccatcgccgccggcggcggcggcggtggcggcgaatacgctgctgtcataagtgtatgtacatatcgactcaatccaaagcgtatgtgatgagcaactgctgctgctgctgctaaaaaatcttcagtgctaaaatatctatacaagtggtagcatgcattctattatttgtcatcatcgaattaattgcgttttcaaatgttggggaaatattttttttgaagagaatgtactgaggatcagttcatgcatgtttctcggttgcactattgaaaaaagagagaatttaagcgggccaattttacaggagtttttttgaaggcccggataatgggctttgttgatgggccgggccacacgggaacatttacaggcctttagttgctgacctgaaagcaccatttttcttgttctttttactgcctctaatacttgttgctttgagttttttttaatttttgatcttttgtcttatttaaaaaattatggaattattatttattttgtttgtgatttgttttattatcgaaagtactttaagtatgacttctctatttttatatttgcactaattttttaaataaaacgaatggtcaaacgctataagaaaaaaagtcaaagcgactactaatttgggacgaaagtagtatatcaaccttgcttaatctgatcgaaactgttacttccatcccagaatcgtcccagaatatccaataagttaatccgtactccctccgtccaaaaaaaattctaattttaaagatgaatcgggatacatttgtatccacattcatctctaaaattgagttttttctgggatagagagaatacgaaatatgatacagtatatcctaacactatgtccatatttatagtactaaattaacttattctaggacaggtgtacaccggatcccattgcatgctttttttatatgaaaatttttacatataaattatcgtataaaacttcttaaaataggctgaaaacacacgtgcactaaataccaatcccctaatcagagttgtttatcgaattctgtcacctcgcacaagtgacaaccgtgtactgaacatgctcctcctgatcattgcaatggcaacatcaaagtcactttttttaatctcccttaccaaaaaaaaaaaaggccacaccttttttctatggaaaaagccatgctgtcactttgtcagcgtctagtatgaattcagattcagacattgcatgcagatgcaggacgctttctctgctcccatgtccatccaatcgcccatgacagacgcccgtgtacattcctgcgtgcactcaagaacaagcgcatgcatgcatgaacaaaaaagactcctcattaattaatcactaaaaaactactccctccgtcctctaatataagggattttaagtttttatttgcactgtttgaccacttgtcttattaaaaaaatttggaattattatttattttttatgacttactttattatccaaagtactttaaatacaacttttcgttttttatatttgcacaaattttttaaataaaacgagtggtcaaacaattgaaacaaaaacttaaaatcccttatattataggatagagggagtagctaagtaggcccaagaaaaaggtgtttaatcacaaaaaaaaactaagctaagtaggtccatatgatgtctgtttgtatagtgttaattaagtgtagcttgtgttttgttgttttctgcatctgttctgctctcagcctctccttctagccttgttgagattatcatattgatagtatatcatagcttggttatgtttaattagtctcgatggccacttgattattcagctcgatcggcagcagtagaagctactccagtagttgacagaacgacagtaactcaccttgttgattttctacggtgcttgtagctgcaaaactctgcaatcagtgaccactgtgttaatgtatatctaaaggtgattataggtgaaaattggatgatggttttgcgactctaattgtttcagttttaaaagctgcattgcctgcatgcctccgtccatcacgctgacagagttgagacgagagagtgtgcagatagattctctcctcctttttctcgagcctaaagtctgaacgctactgacttttttttccagaatataagcatttatagcacgaaaaaaatcttgagataaaaataatttaagaaagtttatgattgattagaaaataaagtagataaaaaaattaaataaagaatgattttaattgggtaagagaagtgagataggtggaaaaataactttattttaaaataaattattatattaaaattagcgagtacatattttaagtatattttgaaatagaggtagcctcgtcctttgttttctccgagctagctcctcctacattgcacaggagtacagtagaaaacgctgagctggatttcttttctcgcctcggatatcgtgcctgcctgatttcagagagtgttcatgcaataatgtctgaattctctgaatttctgacgaagagaaagaaagcaaacgaaagaaagagaaaagaaaagaaaagtctggatgcgtgtgggcagcagcgggggagcccacgatacaaatagagagagagggggagagaaacacaacacttcaaaagtcaaatcacacactggcgcacgttgaaaagtacgtgcttttattgtcccatctccacgctgatagcattgcctacggatcctctgctatgcgtaccgcagcttgtgtacacgcagggtgtgtttagttcacgctaaaattagaaattttgttaaaattgaaatgatgtgacaaaaaagttagaagtttgtatgtgtaggaaaattttgatgtgatggaaaagttgaaagtttgaagaaaaattttagaattaaactcggccgaaactgaaaagagtaccggatgctgttgttggagcgtatctgtcgatgctcgatcattttcagtggaaggactagatgagtacttcttctacctagctagtatccgtctttttttcttttctcatgcaaggagaaaaaagatatgccgatgtagcctcaaatatctttgtattttgttatgagatactcttgcatttttacgactgtctgataggcatgctacatgtgatgctcatttgagagcatataggctagtatcatatggatcaattgtaatgctcgttttccattgagaatagttcattgtgttgtctatggccaagcctcgaaccttgaaaattgagctagatctaatagagcatctccatatatagcctcaattgataaagcataaaatcagtctagatttgttcggtgaaaaatatatagccatttttctacacttatcatattgaatttataccataaatcagccatattatactctctattcacactatttatattgtaagatgttttggtttgttacaagtcaggcttctctaattttgattaagttcgttaaaaaatacactgccatttgcaacatgcaacatcaaaatagttttattaaacccaccaaaaatgtgttttaatagcatatttcactggtttcatatatgttaatatatttttctattaactaagtggaagttaaaatttttgagttagtacataccaaacaacttagagcaagcactataagagtaattactttaagcattaggtgttacctataaaaaataccacttgcaattatgtgatgaggtaaaagagagaagtaaagccaacccctcatgtaaaggataaacctttatttcaagagagatgaaagaaaatgatcaacagattaagatcaaacgatcaaaataaaattattatatatgttgtattggggcaagcgtggtagagataaattttgtactatatattatatatcttaattaatgagtagatgatatctaggaaactatacttagggcttgtacgaaacaaattatagaaaaggaaccggaatagaaaaaaaacgtaagaatatgatatggttgcacgtggaaatggaggataagaaaaacagaggaatatataggatcgaattttcagaacacaggaatagaaaatagagcattagaacacatgattttatcctataatagccaatgataaaaaagaaagagagaggttggagtggatgtttagaattcctgtgtgtgtttacgggaatgctacaatattcctctaaaattcctttgtgtgattcttacaatccgaacacatcaacggtagaaaaatcaaaggaatcattaatctaaaaaaaatcccgtgtaataaaccctttaatccgaatacgctcttatcgttacaatacggaaaagtgaagtcgtagtactcccacgaaagaaggtactccactggtgtactccaatatgtgcgcacgcagcaaatcatgctcgtaggcgggagcacccccgagaagaaagcatgacgattcctttccttgggatctgattagggcacgcacacacagacaaggaggagcagaggaggtcttctccaagtcaagggcccatccagttttaagccgcccccaaatccaatccaatccccccatgccttcacaccatgcatgcaaaacatatgctgcccactactccgaggtaacctaaaccgactgaaaatgtggcaactcatcccacattttgctattccttttccttttcacctcttcctgctcttcgattcattccagattaatttacaatatcatttctctactatttaaaaagcgcaatcatccatcctccaaaaattcagaaaaaaacaccaaacaaccgccctttagggggggaaatgggaccagtagaaaaaaaaaagaacattacggacaaccattagccctcctgtaaaaaccattgacacatcccgttttaatgtaccggtataccctagtttatttaagatgtgagcctccaacgtgatgaagagtttcacgaagtttaattaatttttttcaaaattcaacacaaaccaagcggtttagggtagctccgaatttcgtgcggagagactcaacggaatttgtgaataatgtacgatggactttcactgaaaaaaaaaaagcacctcatgtgtatatagtactagtagtatgttttaggccccgttcgtttactttgaccagaggatattttcagcacacataaaacgagaaaacttatttaacacacgatcaattaagtattaactattataaaattgaaaaatagatttatttgatttaaaaaaacagcttctacatagaacttttttttttttgccaaaaacgcatatttaacctttaaaaagcacactaacaataaacgagaaagttgaagtttaaagttgagaaaaataaatgggccttattaggagttgatgggatccttttggattgtagtttgttgagatctctataataattatggttagtaggaaactgggtaaagccgtaaaggtgcagcctttgaaactacgagacaaatatggtggaactaattagaaaccatcatgcatgggtgctaatacatctagcaggactttgaggtcaatccaactgactgactgactggccactcgatctttctaaatctgcttgacatgctccctaattattttttggtcgacttagtgcactgctgtgacagtgacatgtgtgtggagatgatcagcaattcattctgaaattgtagcgatgttattgtgagtaattaacctgtaatggcaaaatctacaagtaactgaaccatggcagtcgatatcaaagatggtagtatgttttactgctagctgcacacaatgctgatcttgattaat

SEQ ID NO: 18873 - DNA, 5708 bp, Oryza sativa
gtgctacaataacccacatatgctaatgacggattaattaggctcaaaagattcgtctcgcggtttccaggcaagttatgaaattagtttttccattcatgtccgaaaaccccttccaacatccggtcaaacatccgatgtgatacccaaaaattttgttttcgcaaactaaacatgcctatgtcactactagaattcacaagtatccctagagccaaaaactctagggaacagccaaaatactctagggatcgggtttctctagagtgaaccctagggaatggccccctagagaagcattctacgggaacaaattggttcccttgggttttcttggtagaatctagggaaagaagctttccacgtgttccaaaaggtagggattgaatgccacctgaacagaaaaaatccaacgtggaaagtggtacagcaccctagggaacatttttattggagtagttcatttagaaattaatgcagattaatttagctcttgattaatcgttgattagttttatttgtttattttatttcttttgcaaacaaccagtaagcattccaatcatattttcgtcaactgtcttgaacaaaaaatatatatactgcattacaaagttaatctcaacagtaaaaattgggagtacatgcagagttgcccatcgaaaaacaaaagaaaaaaacacacacacgcagagggagagtacatccagagttgaaaattgacgaacacttaatagattgtggctttgctctctcaaaagtcaaaataaaacacaaatatagccttctgcagtagttgtatccaattgaaatggtacgtaatagcacttccagaagtcatcaagctgcaaaatgagtaggaaggttgaagaaaataagtacttatggaaatctgtagctacatacgtgggattctctatttgttcaatataataagcacatgatttctagctttgattactaaccgcagtaatatgattcatttatcaagttttgcaagcatagctcaagttcttgacttctcggccttaccgatctgcatcaagcacataattcatcaaaaatcaaaacttcaaaatatgcacagaaaaatatctgctcgagtacctttgctaaatgctaactagagagcagctcggcaacaccacgctgcacaggtcgccgtggccttgattcacccctgtcccggcgtcgcctctcacccgcaaacagatgcaatcagcccacgcccaccacggccttcaggagtgctgctgcaaccaccctcgaaggtcgaagctcctatcgatctctactacttgagggtagatttggtggtggagactggagagggagttgatttggggaggaagagatgaaagaacatgttgaaggaagaacaaaggggaaagtttagcagcttggggtactttattactttccaatggaaagagaatatggtgcacagtccaaattttggattcacaaggcgggagaaactattacaacctttccacgtggttggtttctgaaaaagtcaatggaccctgccaccgtggttctcctatcagtgccaactgtactagtttccctaggagcaagcaaaaactctagggatcatctcagttcccttgagttttagtttcggctctagggaacttattatccccttgggttctaattagggctctagggaacatttgaaaaccctagggaccccgtggaattccagtagtgtgtatacctcctccacctttccattctttttaataaagcttgatcattttttctcatgaggatcaacatgctataccgtgttacgaaaatagaataaaaattagtgttaacaacatataattcttgaaattattgcacacatatcatggagtaaaaatgagcatgtttcacatgaatccattcaaatgacaactcttgtggacccaatgacgacagaatttggcgggttttcttttaggtactatcaagctgtaaaaaggagtgtgcaaaccatccatgcaaccttgtatttttcaaaaagcttgatattttcctatggagatcaaactaatgctaagcattgttcaaaatagagccaaaaaaatattaaataattacataaattgttcaacgcgtattgtgagcaaaaagaagcatgcttcacctaaacccatacaaacggacgctcttcttgtggacccaattgaaaatataatttgatgtgttctattatcatggtgttacaatgagtttgaaaattgtccatacattgtgtcctttataaaacaacatgatgttttgagaaccattaataaggcttagcaggtaaatctatctttatttttttacacataccgtgaagaaaaagaagtacactttatgtgaacccgtacaattactctcttcttatggacccaatgatagcaaaatttggtgtgtttcatactatcaagcggttacgaggtgtttgcaaactcttcatgcattgcatattttctaaaacaacacaacactttgaaaaccgccatagacttagcatgcatctctggaatgttgtaaaagtccattcaaaagatagaacataacatctaaccaaaaacttgcatgaatttgatgaattcaatttctaattcttgtgcccatgcctttccgtaggcattgatcttttcatccgaagatcaaactcatattaggcaatgttaaccatctatgcacctttgtctttccaaaaagcttgatattttcctccggagaccaacccatgctatgcaatattcaaagtagagtcaaaagaacaatattaataattctagaaattatcatatgcatatcatgaataaaaagaaacacgcttcacataaagccatacgattgaacactcttcttgtggacccaatgccagcagaattttgacgtgttctaccatcgagccgttacgaggaatttgcaaaccatctacacaccgtaccttttctaaaacaacacaatgctttgaaaatcgccccagcttggctgacaactgtatcttttgggattttgcgaaaaaacttttcaaaagaaaaaaaacggaaccttcaattaaaaacttgcacgaaaagaatgagagaaatccactggcgaagtatgtatattcacccttacttaaacaaccatagccttttgattgcaattacaaacgtaaccctcccttacaaacacaataaaaattctccttgcattaagaaaccacagcaaattcacccagccaaagaacaacaagatccaaaccaaacccaagaattcaaacacacatccagctgacctgtttggtcatccagcacaacaagaactgatcttctgagttcctgaagttatgccaccatcactactactagtagtagtactggtatgaccacatttcttcaagaggtcaggtcagaattcagatctagcccccacactcagccagccaagtcactcacaagcattttgccaacatattccggagaggagaaaatccagatcccaaagctcccaatttttttttatttcaccttccaaaaagcccaataaaaccccccctcactcttctctcctctatcctcccctcactctctctctcccttgccaaaggcgacatttttatcatggccaccacctccacccacgcgccgccgccgcactcgccgctgccgctgccggcggcggccgccggcgacccttccaacccgttcccgaccacgttcgtgcaggcggacaccacgtcgttcaagcaggtggtccagatcctcaccggcaccccggagaccgcggccgccgccgcggcgggcggcgcagccgccgccgcgccgcccccggcggcggcgaagcccgcgcccgcgccgccggggccgaagaagccggcgttcaagctgtacgagcggcggagcagcatgaagagcctcaagatgctctgcccgctgctccccgccgccgccgccttcgccgcgggcggaggaggggggttctcgccctcgccgcgggggttctcgccgcgcggcggcgggatggaggtgctgtccccgagcatgctggacttcccgtcgctggcgctgggcagccccgtgacgccgctcccgccgctgcccgggtccgacgaggccgccgcggccgaggaccgcgccatcgccgagaaggggttctacctccacccttcccctcgcggcaatgccggcgccgccggcgagctccagccgcctcccaggctcctccccctcttccccctccagtctcctggtcggcagtgaccatctcgccatcttcttcttcttcttcttcctccttggtatgctctgcttgtctggttaatgatgctctaattacatggctcatggagggcgatttcatcgctggattgtccaaatcttcatcttcatcttcatcttcagtctctcctgtgagctctgggaggatcgaatcgaatccgtgtatgtcagtcatgttgtaatcctagtgtttgtaacagtaaatttgggcgcttaagagagattaattgatcgccgagcttaaagtaactgttctttcctcttttgtttttcttttcttcctcatcttgatggaatttgcataggttttagcttgttttttttcctttcacttctcttgcttcagaagcttgctttggcaatttgacttggtagagtaatttggtagtccaaatcttgtacattaaagttttctaaattgagttatatgcgagaggcaagtggatgctcaagttgacattttttttatggcagctaatatacgcgtattaaaaacacacgacacttcactcttgcagtactttccttagaactggtctcatttcaaacaaatcaaatgcttaggttcagggcgaattcgtcatgccacatgctataaagattacaccctcttttttttttctgtttgtttctaaagccagccagcattattgattactctcatcaagatcaggtaagagttttgatctgaacagaggagctcactgacacttgacatttgagctaggtttgctgagttgtttcaaggaagtggcagctcaagaccataatcagagctctttttctgaggaagaccatcaataattgctctccatcttcaaatcttggcagaatctggttgaaatcgggcatctggaggaggagatgcaaacacaaagtgaaaacaaatgctgcattttcgcctcccctttttcataataaaatcagccatctttgctgctgctagtggagatggtggtggtgggagtgggaatatgagactgatcaaaaaggagaagaggagaggaagaaaaaaaacaataataaatccggtggtggtggcgagtgagctccaccattttgcatcggggaggaggcattagtgaaaaaaaagaagctgaatttagggagaaaggtgacagcttttggattggggaaaagaaattctgcatgattttttcaatttttttttttagaggaggaggaggaggcccacatctgtcagtgtctcgaggtgagctcagttcttgcgcccacaaactgaatctgtgtgagtccatcatcatctctctctctctcaaatgcgttgcgatgcaaatgcaatgcatacatgctgtagcaggaacagtgggctgtcagaaatcgagccgagagagagtatctcagatctgtctgctcgcgtcgcagccggactgaagagttcatcagctctgcaccatcgccagcggcgggaagaagaaagatttgggg

SEQ ID NO: 18874 - DNA, 830 bp, Oryza sativa
tccaggttcttatctgggtccatgctcctgaattggtttaggcatctttttctctctctctgcgattatgaaattttaggagttggatgttgatttttcaatatatgaacaggagattttttttgtttggtcgtgttaagagaagtcgtaatctaggtaggtctctagtgctaattatagcaaaaggaagagatgtctttctctccagagtttaggtttcgttcaaaaattttgcgccgtattttgattgacaaggagagatgagatctgtgcagtatgtcaatcagtcaagactaatccagatgctgttcatgtcttgttcttgatctggtcataaccttgcactttcagtttctgtgatgcttcaattgtcaaaaccagcgtgttttagcactgttccaccatggcagttgttctccaacgcagctaaaaaaaagtcaattctttagtattatattgcagatatgtttgtctaccatttcagtctaataataataaatactactcgatttgtctctgtccattgaaccaaaacatattctatgaccaataattgacaatacaatactgcctgttgctaacccagttcagtttatctttcaggaatcttgagaagcctatgcaattgctggttcttcatcaaccttcgcaagttttttggttccgtttgtagatattagctaaccatagatcaattatagtttagccatcttataaacaagctgttgtgagaatttgacttcagatgggccaaggagttgcggctattcctggccttgggtctctcggaggcgtctcctgcgacaaattccttttctcctttgcgaaat

SEQ ID NO: 18875 - DNA, 8032 bp, Oryza sativa
acaactgtctgatatgagccaaagccctgatttgtgttcaaccccagtgtcctctgataagcacaagtctctaaaggatagctcatggactaggagatattttgataatggtggaaggaggagggttagtgcagtggacgctactgaagttcggaggaaccgcggggttagtatggctcaggcagttcaaactacagttgattggacacttgatccatctaagctgctcgtggggcataagtttgcatctggggcatatagccggctctacaaaggactctatgatgataaaccagttgccattaaatttattcggcaacctgatgatgacgacaatgggaagatggctgcaaaacttgaaaaacagtataacagtgaggtcaatgctctatctcacctctatcacaagaatgtgatcaaggtaacaaataaccgcttttcatcttgcatcttgcattattctgccataatcaccatataaatctatggaagtgtgttcttagattttacttgagttacttctaatgaccatgaagtctggtattgtgatcagattaaattaatactgtagcctttatttcataaaaaagaacacttaggataatccacaaactctgtcagacatttcagcttatgttctcttctcttaaggtatttgatcttatttgattaacactgttctataaaattcccaggatattcattcactttatatggttggcttgattgattgacattagctgatcactgaataatctctgaaatactcaatttttatgattttgctaatggcaaaccttctctgatcttatttatgtaatgcagctagtagcagcctataaatgcccaccagttttttacataattactgagttcctccctggaggttccctgaggtcatatctaaatagcacagagcatcaccccatccctctggagaagatcatatccattgctctcgatgttgcctgtgggttggagtacattcactctcaaggggtcgtgcaccgtgacattaagccagagaacattctctttgatgagaacttctgtgtaaagattgctgattttgggattgcctgtgaggagtcaatgtgtgatgtgctggtggaagacgaaggcacttaccggtggatggcccccgagatgatcaagcgtaaggcatacaaccggaaggtcgacgtctatagctttggactactcctatgggaaatgatctctggaagaattcctttcgatgacttaacccctctccaggcggcttatgctgttgcaactagggtaatggtttctttctcaatttgagtatacctcctaagagtaattttgttgctccgcagatgtccaaaaacttatgcctcctttttctctccgtgtttaatttttcagcatgcgcgaccagtaattcctccagaatgtccaatggctctgagaccgttgatcgaacagtgttgctcattgcagcccgaaaagaggcctgatttctggcagattgttaaaatcctggaggaatttcattctgttctctcccaaggtggctgcctcgactcactgaagagcagcaacagccaggatcagaaaaagcgacttctgcattggattcaaaagctgaaaccctcacatagcacctgagttcctgtagtctctagcatcctttctgccagatgtttttatccggttctgtatgctcagtagcttagcataagattttcatttttgttcagaaaaggtgaacctgtgttctaggatgcttggacatgtttatcaggtgaattgcaagtaggtttacagtacctgtatattgtgctacccttctgctctcttctctgtttttgtgaaatttagtagcagatcattcacatgcaggtgtctctaattataaaaaaggtagcattattggcctagatatatcgtaatcactcatttatattaagattttaaggcaaacctatgcagggttgactccaggccgtcagaacaggaaaatggcattcgttaatacaattattgtatcttatattatggagtcatcgtaattatgatgcgactttgagaaagcaacatctctgcttgcttgaagtctgctttatccttgtgctgtttttttcttgaaagatggatgtcagtttctgggagtttttttgttccgtagcagcatctttagctgaaaacttggttaaagtatgggctctccaaaattcgccatatgtgggagaagttggttttttttttcttttgaaaagttgggttgaattttgagtgtatatgaagccttttctcttcagatctccatcagtagtttgctgaatgtatgcgtatcttgtaagctctaccctgaaagtctgaagttctgaaacattcagatcactgtaaagctttactccgaatttttcttcttgacgaatctttctattgttcttggcaaagcagcacgactgcaatgaaatgagtgaacaaaatgccgcgtagtttagcacactaattacaggttcaaaaactctgaaattgagtatagagcattttcggcggagcaaaaactgcgcactgtcaccatcgaaaaactgtagcagttcagcactaatttcagcagttcttcaggcagcagcatcaccatcagaaaaagagcagacaactgagatagcagcacataggggggccacattgaaccgtttcgatctcgcgtagctgtaagcatgtaactgatgcaacaacatgtttaattagcagacaaagcaacatttttcccccatcttgtcgacgtcagaatgacagaatggacggtgcttagtactacgaaatgcaacatttttccagcttgcgaacgtcaagagtttgtgtgttggtgtgaactgtaagcaagaaccacagaaaacaccttgtcctttcgagatgggataatgaaaatggattacagttaattagtactagcaagtactatatacttatctctctctttctctctctatctctatacatatatatgcttttaagttttaacttgatgaatttgtacaaacctgcaagtaaatcagtagggtaaaaaaaaagaagaaaaaagaagcgaattacacgatgcagattaagattaaccagtgagtgatttatctcactcgatcactctcgcagctaagctaagctagcttagctacttgcactggctgttgacgaaggcctccgacctgacgatcctgtccatgagcttgtccagccgcgcggcgccggggcccggccggagcacccagtcgtcgccgacctcgtcgcacccgccgccggcgccgacgcaccacccgccccggacgaacatgtcgccttcggcgcccgccgtgccattgccattggcgcggccgcggccgccgagcaggtcggcgtcgatggcgtcgagcacggggtcgtcgcgggggaacttgcgggcgaagggggcgccgctgcgctccatggcggggcggtcggcgagggcgagcgggtgcgggtgctggcgcggcggcgtgtcccactggatgtggtggaggtcgtggttcgccgccgtgggcacgaaccgcggcgcgttgcagagcacggtctggaagtagccctccggcgaggagacgaagttggcgtagtacatgagcagcgtccgcggcaggttgtcccacccccacaccacgtattcggcgaaatccctgctcagcgccacccacgccgaccccgtgaacagcttgaacgccgtcggcagctcccgccgctgctccacgtagaagatgtcctgcttccgcgccatgtacagccccgggtccacgatcaccggcctcgccctctgccccctacattgccatccagcctcgttcgtcagaacgaagctgtaatataataaactaactagtttaccaaacctcaaaaggtgtagtaagtacttactccttccatcctagatagccggtgtgctcgatgaagttggtgttcctcgggatcgaggacaacacgtggaggatatctgatggatgaatggttttagcacacgaagtcgtgaagctcacatgtcagtgactcaaagttagggggacggtcgtcgtaccgtcttgggtcatgagagggtagtcggaggcggagaggttgatgaaccagtcccagtcgcggctgcgtcggaggaggacggcgcaggcgtggagggtgttggcgaccatggtggggccgcggtaggtcaccatgttggagcggcggatcacctccacgttgccgactcgccggaacatggagctgttcgccacgcgcgccgccagctcgagccgctccgacacggcggcctcccggtcgaggtggacgacgtagaggtttcgcgggtggtagagcgcgtggagcgtccgccatagccggtcgaggtcgcccttggagccggacaccaggtaggccagcctcgccacgccggcgcctggcggcggcgacggcggcggcagcggcagcggctgcttggcggcggggaagaaggcggggagcgacgccgcgacggagagcgacgaggtggcgaccgccagcgtgacggcgaggaagaggaacacgccgaacgccgccggcagcgcccaccggctctccagcagcgccgccgcgccgctcggcaggacggacgacgccgccgccgacggcgacggccagcgcggcgactgcttcgtcggcgtcgacgtcgccagcgcggagtagtccccccgcggcgtcttccccgacgtcggcgagtgatgatcacctcctcctcgacctcctccgccgccgccgcccatggtgctcgccggcatgacacccaccgccgccgcaccacgctacagaattttcatggttcgctctcaccaaaactcttgtaatttatatggaattataagcagccaagaaccaatctctctcaaagaacttgcgaggaatagggagacccgatgtgaccgatttcaaagacgaaaaatcaaaaatcaaaaacaaaataaaaatcagaatatgatcaaaatatcgatcacgaccttaaccaagaaaccgagtggaattaaacgcgatgctgatgcaacggcgaagaccttatcgccaaagagatctgaacacgcactgctcctccttgacccagtagcccgggagatcaatcaatcaaaacaaaaaacaagaagaaaaaaaaaatcaaaaagaacacgacgacctcttcaaaacacgaaatcgaccaaccaaacaaccggaatctgacagggacagatgataatcagatcagatatagaggcagctgcaactccatgcatgtgtcgcaattaataatgctcgatcgatcgagaagaagagagccgagatcgatgagaagaatataagtggggtgtgtaattaatcgatcgatcaagagagagaggtgaggagatcgatcgagcagataacgcgggaaacggttgcgagtttgtggagggatatatatagaacacggcatgtacatcaccaacacgacaggtggcaagatttgcgagacacttcccccggctaacacgggccataacctatccctaataatgtgtatacttaattaattagtatagtaagcagatgagtgcttcttcttcttcttctctcgtcgccgtacgcaaatggcgatgtgcgtgtgtgcatgcaagcgtcgtcacggattggtacactcgagaaagttaattatcatgtgacagcgacggagattgaggagaagtttagagtccatggcccagatgatctgcttgatttctgcagtttccggtattttaatcatcatctctgtgtattatcttagtttatttttacgatatggaagtataaattcgtatttgcaccaacttaaaatatgtactggagttgtataatggaaaacggaacaatgaattaatgtgtgattaattattattagcttaaaaaattaaaaaaaaaataaattaatatgattttttaaagcaacttttttatagaaatttttacaaaacacataccgattagcagtttaaaaaatgtgcgcagtaaacgaccgagtaaagttgggaagttgggaacatggacttgtgaagttgtgagttgtgaacacagcctaacaatcacagcaactgtgttttatccaagctaattaattaattaaatctgatttttgatccggtttgacttgattaagaattgatagagagagataattaagctggcagggggacatctctggtaagcatgtcccttgtcaccaaaccctggcacaaatatgtcattttttaagcgataaattaagttgactagggttaatttaaggctttaagcacctgtactgaagggcaaacaacaagaaaacactgaacaaaagcaatcacactactacgtgtttaagaaacggaaattaaagctactcctatcaaacattgatagagcattaatatattaaaggaaaaacgagagtaagaaatcgtcttagagcatgatcaataattcaatatgtagtatgaccaccaccgaagctaggaaattaatgtcacattagactgacacaagaagtctacattttttttgtctagagatttagctaaagaaaaagataggatccggcttcacatacaaaagttgatttattattttataatgaaagaagtactccattcggtcacgaaattagtgatttagtgacgtgttggacagtggcatggtaaccaaaaaattgattattaattactaccaccaataaataaagcacagtcataatattttgaaaccttttttttgaaaaatttaaccatattattttcaaattttgaatcaaaatatttgaagaaaaattgatagtcaaagtttaaacgtgctgactacacgtcctctaaaatatcacttattttttatcgaagggagtaacaaaatcccagaccatgcaatgtgccaatgttcatctcccttctcaagatgacaaatggccggggtctgatcttagattttttcactcacaacggtactcattgagtcattggagggagtaattctagtgtttaggtacaggtacaaaggttaactctctgcgatcccctcttagtagtactgatgaaatgagcacactcgagttgttaacaccaacatttgccaatgaagtcgcataggtataccacctgaagatatatgataatcaagcaaatctaaacgaggacatatctgatatgatacacattggtttaagaaaaagtgcatgacacaaccttcttcatatatactccagtttttaatagataacatcgttaactttcgactatttatcttatcaaaaaattatataaatatattttattttgctatgacttattttatcattaaagaaactttaagaatggtttatatttttttatatttatactaattcttttaataagatagatagtcaaatattatgttaaaaagttaacaacatcatctattaagaaacaaagtttcaaaattttcttttgatgggggctgtttaaaagaatttccctactcgaatttcctcccctgcgcatgtgtttaggcagactttttcatgccccaactagcatatcttgacacttgtgggacccaattttgaattttgttcggtcacacagtactacaactaaacacatgggttcagattcacctaggcattattgtttattgtagctgatgatttgatttcaagttacatgcatatacgtatcctttccatcatgtcttcatcaatcttgtatcatattctaacagtgtttcgatgtaataatcgttaaaaaacaattgttgattctctactccgtagaggctctgtgtggtctgtacgggtcttggctcctaattaacgttgttgcaaatatttcctacatgtaattaagatggctagctgcgttgataacacgatatgtatcgtttaaaacctaatttggtcctaaccctgtgtgggcccatcctgaatccaatgtgtagcggtgcacgtatatgcatatgtttacaatgagtttggcgagtactttctttctattgattataaatatatttttttgatgtttatagaacaatagtttcttaagtccttaatttaaaaaca

SEQ ID NO: 18876 - DNA, 4897 bp, Oryza sativa
tatatatatatatatatatatatatatataaaaataagatttttggactataaattatttgtttcgttaaccagtattacggagtacacagcttatacttagataaaatgcttgcatcacttcttgcattttaaaatatactccctccattccataatataagacataactaattattttaaaaaaaatgtttcataatataatatataggcatgtatgaatgcatgcaattaactaccacttctttctcactaaattattattttttgagtcctatatccttaatatttttaattctattaagtgaatgcattatatatatatatatacacgaattatgaggtgataataattactttttggtctttagattaagggtggttgagccttatattttggaatggagagagtagcagcttcttgcattcataatttgttgtaaaatataatttttttcacctatgtataggtttttaacccaccacgttactagctccgtcccagaacgtagcaacctaggatatgctaatgggtctaatctgaaatatgctcgtgtctagattcgtagtcttaagatagatctaatctcatcctaactggctacgttatgggacggagggagtacgttcttccatcgttcaatttccacacctacaggctccatcgccgtcgcaggcccggccacctcatgtaggtcgtgagatcatccagtacgtacgtgccaacgtactctagcttcgtcagcatctggtatgtacaaattttagatggggatgtttttattccgaaaatggaaagtctacggatcgttgggggttgagttaggccgcgtgaggaccgtccgatctgggatctgcggatcaggttacgctgctgcagtcaaacgttgccgtgtgatcatccgtgtcgaatttgtacgagcaaagcactgttgcagctacggtgaatcgtgttgtggtacttttcgaccaatgtttaatcattcattttatttaaaatgtttgtgcaaatataaaaatatttatgtcatgcttaaaggacatttgataatgaatcaagtcacattaaaataaatgataattacatagatttttttgaatacgacgaatggtcaaacgttggacaaaaagtcaacggcgtcatacattaaaatatggaagtagtccgttttaatttctttcaagctccaactgctcctccacttgcatttactctatggagtttgagatgagagcagtaggaagattcatagatattgtttccgtgaaatcttttccaaaattcaaatcctctccaaagatattattatgccttcgtttcgttccaactttgacagagtattaacaatcgactcattacgagtttgacatggtctctaagtagcttgccattagacctggatcatctgcctactataccaagtaactagtgtgttctctctctctctccaacctctgattcgcaaatcatcggtttataatttggaagatgctataacatttttcttatttttttcaatataggcaaccattgttactacaccgtttttatagtatcaagttattgttatgtatgtattgaaactttctagcttctctgccacgcgtattactgtagaagaccaagtccctcatggcatggttgtattcgatatgaggttgggaacccatctcctccgtaaaaaaaacggagcagtctattagcgcatgattaattaaatattagcttttttaaaaaaaaggattaatttgattatttggtttttaagtaacttttgtatagatttttttaaaaaaaacacaccgtttagcagtttgaaaagcatgagcgaaaaaagaagagagagagagagaggggggttggaaaaaggctcaaacgaacagagcataagctatagacacatcggttttccatagcttttctgtacgacctcttgtaggaagaatcgatgcaagctcacccaaaatagggatttcataagtcaatcctatcacaaatgtacaatccctgatgatgtctagcagagaagctagaattaatgaaatggaggaagggctacccgcttaatttattcttctttaaatcaaatttaggttgatgtggttgtcaagattaagctgagaggattcaaatatggtgaaaataaacaaactacagttagaaaaatttagatcaggtttctaggcacccgacctcttctcttgtagctccacccctaatgtctgtgtgattttgttccgggcgcacgtacttttgatgggggagtatgtgcgtcatcaaccttcgatgatgtcttgaaagaaaataaaaactgaagattattaaaagttgtatatataacagttatctacttatcttcgttgaatcacttgctatccaagaaaaatggtggatgaatttgtttaattatatgtcctgcttatcttcaatgtcttaactcttaagagaacgatttcagtcatctttgaccacgtgagctatgatttagtattctcgcctgaattttgtcatttatcaaggcaattatccatatgcaagcttgacacataagccgccttctgaaaggaatcagactctacttttaactttagtctagtacaagttaaacggctgcttaaaaccaagacttggtaaatgttgactttagtcaatcgaagaaaaaccttgcgcaaacagcaactactgaatttagcaatttcgattggtaatatcagaccaaattccattcactctattataatttgaagtatggtgaagcttatacttcttagaagaagactaccaaaaatggtagattttagcacatattttatatatataacattggtaatttcataccaaatttcattcactctattataatttgaagtatggtgaagcttatacctcagaaaaaaaggctaccaaaaatggtaaattttaacagatatttaatatacataatatacatttatgaagtacacataagactacgatttagtctgactcaacatttacattactcgggcacacaatttcagaatcataggactcacaataaccactgaattttgcaaatttgaccgaaaatgaataccctgagtgcaattggaacttgacaagttctgatcatgtttggttccattccacagcctttcctagcaagtactaggcaagatttctcatcaacttggccacatgcaggacgtacattcactgcaaccactgaagttttgcaaatttcactaaaatgaaaccccacgtgcaactcggaacctagttaacaggttttggtcatgtttggtcccattgtacagcatgtcttagcatggagtaagcaagatttctcaataacttggccacatgtagggcgtacgacccactagcgtggggtacactatacaaaaacaaggaaccaagcatgcccaaaacttcgtagatctaattcacacagcatacctagcaatctgaaatatacaattgagctagcatttcagcaaactgaaaccagaacatggagaattgccagcctcatgataatgacatctgtagaacacccaaattgccgctaaattaacaaatggccttcttccctctccttcaaagttttttttcccaattaaaaggcatttcacagctagactttcctgtacataacgtgatatatatcccccggaaatatgggggaaaggaagccaataaaacttctcttgcaaaatcacgtcgatacgaaattacttgctaagcattggccttactgctgcatagctcgatagctggagcggcttgaagggaagaccggggcagcgccaaagtcactgggtcttaggccaaactgatgatgcccatccccggagtgcccatggcctctccttgctcttgacttctcaacccgggttcggcggaagacttcttgaatttggcggtcattttccttcagcatctgatcgacattgcctgaagggcaaattagaggcccagaatggtggatcttgttaccctttgatccatagccctgttcagacaagaaatagtcaattagaaatctagacaggggaacaaagtaaagttatctgacatcaaagctagtgctataatatttttcggtttttccaaatgtgttaatcgtgaactacaaataatgctaggtaaacctcataataacctgctggaactgaatacataatatatgaggaccttggatttgctgaaagaaacttttcaatttgacaactgagatttgcaaaaaaactgccaactatgaattaaatggcataacaaactgttttcatacttttgctacttaggtctggagatacttacaatagctccatccaccctgctactcctgtcatctttctgctgaaatacttgatcatactttccactactactgaaacgctcatttatagattcagacagcctccgttcatgcggaaaggcttcggcttgagtaaccactgttccattgccattatctgaacgaatatttgatcttgttgatacaaccacacggaagtccgatgcgtttgcaacaccagaaagatgaatatcgccattttcactccgtccagcctttgaaggtttattttgattaactagaggcccagaatggaatgttcttgtgtagacacgttgagagtcttgagacgattcagcaggatgagttggcctgggtggctcaatcggaaagccagatgcagagtcttccttgctgggattgaacatctcactcctgctcttggcattgacttggttttgtcttttctgaaattgtacacaaaaataaatatattcatctaaaaaaatagaacaacttggatagcaagattgtagaggaaaaatacacttggaatgtgtgctggctattaaaggcttcatgtacttgtggaaaaaaaggagacaaagcgcacagctt

SEQ ID NO: 18877 - DNA, 1392 bp, Oryza sativa
tcctcctctcgccgttttgcatcaaactctttgcttgggggatatctcggcagacttgaaggattgcaagcatatggttttgttgcaaaaaactgaagaagacaataacaagcacattgttaatatcccaaagattgggtactatgatgattaaaagtaaaaaaaaaaaacttttgagatgtattgtgaaagattaacaacctcctctaacataacatctagtggatcatggtacacagaaatgaatagcaacagagcttttatacttctaaatccaaaaccttgatccaactaggacatgatgactttcatagacattagagatggttcagggggaattattttgcagaaagtatttacttccaaacaaatatagctgatctgaagtttctaaaaaaaaggaaaataacgttttaacagtgatactttgctattttaaaacttcaaacagcagaatatttgaatgcagcacattactccctctgttacaaatctctggtgtttctggaattgtacgctctccaacatgtgcctttgactgttacttttaatttatattctgagagagtgagagtattattttacagcaaatgtaatggtaaggctttcatctgattaatcttgatagtgttatgtgggttagcatttattgtctgagagttcacggcacacatgccatgttgacatacatttgtaaacagaggggacaattgagaattgaaatggagtaacgtataatcaaatagaatctctatatggattctctctcgaaataaaaaagaatctctatatggaaataaacaggaatgtctccagcagctggagaaaagtccaaggaatttgaatacctcactttgcaatgcagaagatgctgttcctcgatctgctggatcaactgaaagaagaacatccactaacgccacagcaggcggaggaaaatctttaaatgtttctgatacacgcctagcatatggatgctgtggcttaaaaattgtggcatgaggaagtttagacttcctccaatagtcctctgatggtgaaccacagagtttaaatattttatgtaactgctcaacctacaaaaagaaaaaaaacaatatgaacactatttcaagacaaattcaaagcattcactaatagcgtttactccctctgcccactaatataaaacgtgttttgattacagaaattcaaatttgaaagattttgaccaatgattagttactacctctgtcccaaaatataacaatttttagctatgtatctagacatacccctgtccagatacatagctagaagttgttgtattttggacagagggagtaccatacaagcacatttagtgtgtcaaacttatagcattagattcatacttcaaagtaatttcacata

SEQ ID NO: 18878 - DNA, 1449 bp, Oryza sativa
ttttaagtaaacagctacttgaggcttttttaggactactataggatgcaatatattcctttagtctttctttacagctaataagatttaataacgagtacagattccagaagaggtaatatcaatatacctgagactcagtaaatttcactccaggaaaagaagctagtccagctaggtcatgttccatgtactcaaaaacaagatataagctacaagacattcttgaagttactagaccctccagcttaataatatttggatgatcaagccgtcgcaaaataaggatttccctggccatgaacttcacactctcaggttccaaattatcaaaccgcactttctttagggcaacaatcttctccttttcaagatcgcgagctctgtaaacattactgtatgttccctgaccaatctgtataaacaaaataacaacaactgaacacaccatggtataaagggcgcaatcagtccaggtgcaaagtaaagtttaacagtgcacaatctagttacaaagaaaaagggacataattgtcaaccaaatagcagttcctaaaattttgaagttcagagaaataaagtatcccgtagcaaacaaaacaggaaaccgcggtattataacagctaaacaccagtgattcagctaaactgaaactggatcaactgttagcagaatatattacattattactattactatttaaattttaaaccaagtttgcaggtgaaaaaaaaaagttgccaccatactctcagatcccatagcaatgtagtactactactagaatagcattgttcaccccaccccattaatagcagggcatgagttgctagtaatgcccactgttcccaggttccaaggtccaccaaaattatcaagaaatccaaaataaagaaaatgccaccgcattttcgcatccaacgtaaaaggtgcctcccactaataacagatttgtactgtttccagtcgtcctagctaccaagaatccacttaatagacaacccaaataaaaacatcgcgatagtacccaccctcatcaatcgtcagtaaatatccctgtaagaggggtaaactccccacattttacagcccaattttaccttttttccttccattagagaaagtatgaaggtggggagcacattgttaatgcatcaatctatattctcaacgagaaacagaaatccaaaagggggaattcgcagcccgcattgctccaaattctcgccgttccaatgttccaaattagagatcaaagatgagagcagaaaatgaacagagccaaaatggagatgtagagagagagagagagaggagaagagagtgtgtgaccttgtcgagcttctcgaacgactcggcgcggcgaggcacccacccgcgcacggcctccgcggcgacggagacgagccacggcggccaccccgccgccacctgctccccctccaccg

SEQ ID NO: 18879 - DNA, 9630 bp, Oryza sativa
ttttctcattatgttttgaaggagttgagaagatagtggagaagcgatagatcgtgcatgcacggatagcaagaagcaacagatcgatcgagatgactttgtggatcagaatgcaagactttcagagccgtccctagcttagaaatcttgcagcatttaatttcgttctttgcttaagagagatgacaaaaatgcatgctcgaatgtaaaggatatgtgtttgtttgtttgtttttgttaaatcttatacttggagaattgaggtagtgtttgatctagctatagtgggtaaaggcttgtcaaaaaagttggtcgtgtctgtacaatggggtgtggcatcaagatcatgcctaaaggaaggttatgtgccttttcgcaccttaccaaatgtcacttttggatgtggttatgtgagtggatgggattagacacaatctcttcagattggtaaggggactacgtaactacgttaaatatgtagtttctctttcgatttgaagaatgcggtgaaaatggatgattgagatttatttaggcaatgtaaatgatggcgtatttggttgggggcaatggttaagggtaatagtagtttgagggggtggagactgttaagtctattgtgttggttgaagaatgtgggagttttatttaagagcgtactcccacatttttaatacctggttagggagaggtaattgggagggaatttctttctaagtatgacgagataaatctgagccggacatcatcacttaaaattcaattccccttcatactccccatgattctcatctctattaccaaacaagggattggcagtaaaaatgtaagtcgatcccatgaccaatccctccaactccctcctttaaactcccaatccattcccatctcttgccaaatagccgtgaggaatcgtcaactcctacggtcctacccctactcacaggtattaaaattcaggaagttcatccctcaattctcattcttcaactctgatgtctcttaaccaaatgaagcaattagtattctcttccctctaaactcctaatccctcctaaagactcccccaaccaaacacatgaggggcaaaagtaattcaatccctagggtaaatcttaaaactttgtgcttaaacatcctcctataaggacatacatgaagtttaggatggctgatgttcaggtgtgtacttcatgtgttaggagcggtcgaatttcacgttcgcgattatgttagtacaattattgtatagggggagggggtgatttgaatatagccttttttacaacataccccaaatattcccgaaagacgttgttcaatttctttttcaaacctagctatataagaggtagatccaaaaaggaaactgtgaatcatccaacaaaccttgctatctgaagctagaccaattgacgatctcacaaatcatgggcatgtacgggttgagagtgtgtactactcgttcacggttggcagatgcctatcgcaaacacaatgcaaagagagaattcaaatgcagtgcaaacctttgactatttgagtttgcttccacgctagatcaagctaggatcaaaaacttgctcagctaggattcagccttgcgggggtcagcttaattggaagataaatcaaggctgcctcataatcataagatggaaataccattcaaaaagaaccaaaagcaaacaagttcagaggaaagacacacaccaatagaccaaacattcgtttctgagcacatatttcacaaccttacctgcattagttacactccctcttatcgacatctaccaaaactccgaaccagttttctaacgaaaaagccaacacaatggtcaacttttcttgccaattttccatcacaaaatataaacaatcatatgatggattcaccctgcattaaaaattttgataaactttatccttttttaaaaaaaaaaccatggatatgaaggaagagcttggtatcaataatattaaaaacaaatataagtgcagtctcgagtcgagtgaggatggaaggggcgcttggtagctgccccaccaactgcgtatatttgcgattcatcctacattaagagcatatattatagtaaaacttgatcctaaaggggaaatgatcatggattctagggaggagcttggtatcaataatattaataatttgggatgtcaaaaggaaacatgagtgcactctaaagtcgagcaccagagcacggatggacgagacgcttggccgctgccctgccaactatgcatgtttataattcaccctacgctaagagaacaaattaataaattttgatttgtatgggaaaaaaaaagatatgtgagcgcaatctagagtagagcgcgggcggacgagacgctcaatggttgtccacaccaattgcgcttgtgcaattctcgttgaaatgaaaataaaatgctacatgtatttatgcgctctcgcggagagcatgttatatatagccacttttgattacatttttatgagggaggttgcacaagagtacacgatatatagattaacatgtaaatgggaacagattaaaatgaaacacaaacaaaatgattactcctaattaactaacatatatatattgcccttaattacatcccaacaaacattctagaaaattggcataattcatagcatctgcataagaaaaacctgatgtgtaccgcaactaattagtacatttcccgcaagccggttaattagtacatttattcctttcccaaattaataattaaatacccgtatattgtaaactgactcgtaaaaaacaaatgttctatttttcttttaatccattgaaccagttttagcttttttttgatgggcctattgaatcagtttgttaaaactacggtttttctagcaagaagacttggaactcagacgtgcactcgtttttacccccctcacacggtggtgtgaaggagagtaagaaaaatttagtacgtatacgtcccactcttttgggaaagggagatgcggtgagtggccagttcaccaaataattataactcatacttactagtacaaagaaaaatgtcatcacgtatatatatacctgtcggcgagatgcgtgcacgctaagatagtagaaacggtcgtgacagagagatgatgcatttgacacacgagtattttctgatgagatgagatggctcgtaccagctcatacatatgcctgcttgcagtcgctgcggtcatttgctgttgttgctccttgaggcaggcagggtggacgtcaccgccggatctcttcagattttgctgttccccccttgctgcgattccggatcaagaatccaaccaccatccatgctccatctcactagtagtactccctccgtcctaaaatataatagaactttctttttctttaagaaataattaagaaagggtttcataggtaatataatatgaaatagaatcagaccaaaggctaatagctgagaggaaccataattatttatagttcttttgcgaggttatttatggaagttaacatgtgaaattgatatttcctcgtttcatattgtaagaccttttgttgttttctaagtcatacttttttttagctttgatctaatttatagaaaaacataacaacatcttgaaatccaaaataaatatcgtgttaaaatataattaatgttagatttaataaaactaattaatttagtgttgtagagatgttgctactcttttctaagcatgatcaaacctaagaaaatttgacttaaaaaaatacaaaaacatcatataacattaaaacattataaaaccaaaggaggatcttagttatgatatcggcttttacgtacggtcaatgaattaggggtgaaaacggatcggattcggacggatagtagtcataccatatcctataccatattttttaatcggattcggaggtgatgcggataatgtgcggatgcggagcggattatttcggatgtcggaaatggtgcggagtcggtgcggactcggctcggaaacggataaaaataatcggatgtggcatgtatatacaatcgatacaacatctgatcatctgtacaatgagcaacaatgaggtaccaatatcacaattcacatgactcatgaaagcaccgatcacatcataatataatgtcgagttgttaacgattgacttgtcttctgtccaaaagcatgtaatcgacacatatagtattgacatcacgatatatcgcattcacataacacgtaagacatagaagttccacaaatattagaaaaaacaatatcacatgacataggtgatagaacattggaggtccacaaatgatgtccaattctcatacaatactactaataagttgcatattgcatatgacataataacacatatgcagctaaggtcagaaggagatgatctagagaagtagacttcaattctgataataacacatacgacagagttggtgctggagatggcaggaggcgtcgccggcgccgagacggagacaaccaggtgactttggggtggagagggtaggccgcggcgccggggtggagaaggcaggtggcggcggcggcgctgggtggagaagtcaggcggcggcgtgggaggactggaagaagagaagtctcgatgaaaaaattggttgacgcgacgccgacagagtcacggactgaactcctggatagattgatggataaggtggacgtggatgggctgaatctttacacgatgaaaatgctcgtgtcaaataggccaaattgagtggttatatgggctgtgaaattcagattatccgccaaaacgtttattggataatccgcttaaaatagcggataatccgtatctgtcggatataaccgataccatatccgcatccgcatccgcatgtaactatccgtatccgcatccggccggatatctaaaaacccttaccatatcctcacttcggacggattcggagcggatcggatcggataatatccgctccgttttcacccctacaatgaatgcttgtgctacatacagcatactagcactactgtacatgtctgcacctgaagaacagcacatactgttgcaatgcaacaggatatatgcaaattaaactgcaaaggcaaacctgaaccctgcgcgttgtgctttgctgctgaaatcagaccactggtttaactttaaagtgatctatccatgcatggtgtgcataatcaacagtagtgcaagtgtggatggagaagtggatgccaatgctgccatgcagatgcagaggcttcagttcagttcagctggcctgttcatcaactcaagctagcttagctagctgaaagggaaaggaaacaaacattgcaatggaccacatgaatgcgttgcatccatctctcacctcaatatctttgtgtccctttcacaaatatcatcatccatgcaccaccattgcccctctctcgctcgcctttggccaccgtgtctgtcgtcctcgtcctcgtccccgtcgccgtcgacggcgacggcgatggcggtgggtgaggtcctaacagaaaggcgacgtggtatgcatggtttccacggtgactgattatattggtcgagacatgagacatccgtggttaaacgatgctccctctctgatcatggatatttgttgtttaagattaaagtttggttgattaggtcaaacatttaaaattttgatcattagttttctattaattattattactctctgaatcatactgattattgtgttgtaacctgattaagccgtgcaggaactaattaatcgattttccaaatgtgacagctactgcagatgattctttaattccaaatgcgcccatggttatatattagttagtggacggcctgctgatcgtcttgcttaagcttttctcaacttgaccagacatttgttgcccttctggacaagtttcagggtctcttgccattccttccaatcagttataagatctttatgtagcttttgtgagcactcttctctcagctatacatctgaaaatttctcctagatggtacaaattcttttgcctgaaacactgaactgttgtcaaaattgggggcaatttattactactgtcatctatacagtttagtactttctgcaggtttgtgtagccatagctagctatacatttttttggtgaaaatcaaatcaagcatttggtcacagaatcaacatgacaacgtgtgagaggcagttatgtgtttaggaaagtgtcacatgtcaactggagtagtagtgtgtgtcattatgccagtctctttcaacaagaacaactattgcttaagggatgaaacctcttgcagaccagctaaagatctttttcttcatgtgggagcatccttatttcaggcaaacaatcaatgttgtcaccatagcatcttctccatggcttctccatttgatcatctcctttccatttagtgtgttcttgatgcatgtatatgcaatattgctctctttctttccacccataaagctttgtttaaagttgatggttatgtttaatgttctctgaatttgtggcctcagaactataccagaagtgaagtttgtcctctgatatgtggaagatagcattcatctcttcctcttcaccaaattattgatccacattaattattttctctgaccgtgctaattctgacaggaagactggaacaccgacttgctactttttcactgaagaaagaacaatgaaatgcttgaaagaaaacctgttgccatcaattgttcttgtgactctgcagtctgtggatcccaacacgtacctgaataatccaaagcctcaaagtaaaacagcagaatcctaatttcattttcatgtcttactctttgttagaaaacgataagcgaacaaacgataaataacaatagatcaatcacaaaagacacgagatttaacgtggaaaaccctcccaaaacaggagagaaaaaaccacgggcgccagccagcaaaatatattcactatatctggagtgaggttacatcgccacacgacggcttacaagaggtatatatacggtggaaccctatgctctggcccaagcctcccggcgacgggcctccgctccgctacggcagaagctggcctttattaagtgcaaatgaatttggatcacaactcaacactcttctcctagatgacaatatttctgcctgattataaactgtgatttttttccctgattttatagaatctggtacttataactgcaaatttatgaaactaataccagaatattaattcccagttaacaagcaagttcagtgtcattcatgtggccacttacctgacaagctagctagcaatcatttctgaagctgcagcaaaccccatgccttgccaatcaggaactagccctgcgttaccatccgaagaacactacgttgtgcctggatcaccacaggatagcacagtgctctaataattggctcaaagctgctgtggtgagccccagctggggctcaaagacctggagcctgcccttcttctcaaccatgaatgacggtttatttcatcagaatgtagtagtaaattcgccctcccgaaattaatgtgctgtcataaactgatagaaaacacatactgatctaattactgtgtgttaaattcagagcatgcattgcaacttttttttgctaaatcaattcagagcacactgcaacctttttgttaactttcggttggattagcatcccagttaaagcttcaacaacttcagtgacagcaggtggaaaacgagcaagtgtacaaaatacaggtacttcaaaagaaatctacttatgccacatggaattcaaactcaataggcctattatttcgaaaagagagaaattcaatatgcctatgaaaaactatatatgtatcatcttaatttggaatacagatcacacaaaacccatatttaattaaggtactagagatattaaccaaattaaataatctaatatctcaatcgcgtaatgcttatcattcatggatatgatgtgttctgaaaggaagctatatgactaggttctatttggtgcaatattagaaatgtagccaaaaagttcagcaatatgcggtctgaaagttcacagattctgatatatttgttcatgtttcagaaacactgacaactgatctggtgttgattccagtatgtaaaatctatccatactgtatggtttcctcagctaagttaaaaatcatagcatgagctttcattttactcctaatagttcaatttacatcataactaggcaaattaaactctaattcgtgtctaatgggcttcagatttgtagacaagaacccaaaatatcttccattgttccagaggtacctgcaattaatatagcaagtttgcccaagtcaaccacctcaatctccactgtttgattggacgtttaggtttcatatcaccaaggttcaatcagtgtggagtacttttcagtccttctggcctgtgccaaatgtagaaggagagccttttctctgatttgatccattcttgcaagctacaggtaagttgatttgattccacatagaattatttttcttctttgtttttccatgccttttcttctctgtcataaactcctaatttagctactataattttttcagtgaatcctagctaagagttagtttattgttctttttaggtactgaattttggtacatactagcaaattgtcatatacagcaacaaggatctagtggcatgagactttggcaagtgttcttgcagaaaccaaaatcagagctgcctccatttggctgaataattctggccatttctaaccgttcctcattgcttttctccttatgcatatactggaaaggtagctctgcaaaagtcaggtagacaataacactagaagcagttatatatgcttgcaaaaattcacaacctttccaaacaaaatttatttcttacaccattccaccaggaatggaatttcaatactaccttgccaagtgcagttacaaaatgttcaccaaaacgtccaaaccttcgctgcaactttaatttggacataattcatatatacttgctagtatagcaacaggaatgctgcatagtgacaacacatctaggatcatgtcccaactctgatagatccattacaccaacctatcttgagacagtgccaatgcaggaactaacctctcatggaaatgcatggtagctagctccacaatgtgacacatgtaagtctcaagttcaccgtgcgaaaaatcacgatgcgcgaatcgcccccccaatttcgacaggtaagggtagatcttcatcgatcggccagttgaaaacaacaacggcggtacaacgatcggccatcatcgtgcaccgcaccgcggcggtggcccagagccggtgatggggatgtatggacggtggagtgagtggagagagggttggcagcaagcatgatgcatcacattatgtgaggaagagataggggccccatgagagcaactgaaaggactgtgctgaattaataggaggctgctgctggtgagtacttagccattatctctgcatcctatgtgacaaacagaaactggacagtgtatgtggagtgtcacatggttgtatatacatcatacattaaatcat

SEQ ID NO: 18880 - DNA, 832 bp, Oryza sativa
tactacgtaagtagttagtagtagtaaaaacagactatctgaatttatacactaactccatcctatttcttaacttatataacttaatttgatgattctatcccagcacagtaagctactatagtatgaaccttcagactgcactgatgtttttctgctagagtggtgtattgcatacagtagatttttattgaaaaaaaaacttggcctgtaaaatttcttatagctaaatctgagagatcatgtagttttttgtgaagaatatgacgtacgtaacataaaacttttaaacaaagacatgtttaatacataagtgaaaattgaaatagactaattataacccaaacaggagtttttctctgcgaatgttcggttgaacatcatttcagctagaatatgttttcaacataaactttatgtactgatgaatgctatcatatatgctgcaaactgcagcactaccagcaggagtcctccaaactgcgccaacaaatcagtagcttacagaacgcaaacaggtaaagattccagatacgtatgacttacttttgcaccaatataaaccaaaatgttctgtattgcagtctaactcggcttgcctaaatatctctagtaggaccatagtgggggattctatcaacaccatgagcctcagggaccttaaacaggtagagaacaggctggagaaaggcatagctaagataagggctagaaaggtatatagtgcaactcaatttaaagcattatataacttatagtatacatcagctatttcttcatgacttttgactaagtgcaaattctatgttctttaattccatgcatgagctat

SEQ ID NO: 18881 - DNA, 3168 bp, Oryza sativa
tcggacgtcgtcggttggaaatgcatgtcgatcatctttgttagggcatccacaatgtgatgcaaaagtagtccataggaaatataatattctattcagccacctattaatattgtgcaactagtccatatagagaaaataataaaaggtactcatatgcatatagctaaactagtcatatgaaataaaaaatatcatctatctctatttctctctcatctcgtaatgctatcttgtatccatatacattatgaagattgctatagttaaaatccatttgtgtgggtcccatatatatggatcactttagccatatacattagtgatgcccttatgcctacttttatagcactattttccttccgaccatgtgtacttacatcaaattgggctgcctcatcctcccttgacaacataaataaattttattacatgatacttaaaatttaaagtttgtgtagtttgttgatggatatttaaaaacatgctacagctaaacgatactacaaaaactgataggagtaatttgctagaagacgctgcaacaattattttattatttcgcatgcaattagagagagatttttttcaaaaagacgagaatacccatcatgccacaagcttctaacctagcgctggattgaataaggaatatgatatatggtagcaatttacttgaggtgatgacagattgagaaagcactactacgaaaaggatttttgcgtgcggagaaaaaaggttttcgtgtgcgggtgggcgaaccacacgcacccaggtgtctggaaaaatcgctatttttgtgtgcgggtgcctatgtcgcccgcacgcaaaaataaaaagccaaaaaataaaataaaataaatcaaccctaaccctataaaccgttgtagccgtcgtcctcgtcagatctgccgccgtgacgcctcctccccaccgccggcccactactagaaaaataatttatcaccacgaaaaaaatgtaacatcaatgctaaaatttttgcaatagatacatgttgccataatcttaaaatcgttgctagtcgtggtaataaatagcgtgataataggttattgcaacgatttttatttagttgtaataaattttgttatagctataaaacggatgtgtcaaaaaaatatatattgcaacacttcacatcattgcaataaataactattgccaccactccatatgtggcattagttctacgcaccaaactaaatgtttcaatattaatttatcgtcctaattattttcttttgatatcttgtcatggctaggattcgaacccaagatctctccctcatgtgcgctctccatgatcaactcacctatgcatcaattttgtttaaaaatacatataattccatttgagactgcttaactgagatttgaatcaagaatttgagcatttaaaagatttcaaatgaaaaatttaagttgcagatctcatcgagagctgtaaattttatataaaatttgtcctaatccgtgtccatatgaaaagaataagttaaattatgagatgataaattttttattgtaacggatttgttgatcatggcaatagaaaatagtgaaaagtaccatgtactatgcaaattgccaaaaaaataaatttgtggcgatagaacatgtttttttttgcaatagtaatgtttttgtggcgatagctcattttctattgcaacaaaaaaactgaataaaacaatgattgtaaatcgttgtaacaaagtataattatttgccacataaaaattatcattgcgatagtacaacatattgccatgaagttatttttcgttgtaacaaattggtggcgatagctcaattatcttgtagccgtcgtcagatctgggcgggggatggccttcatcgccccagaccgccttctgcgcgtggccgccgtcgcacgccagctgtcacgcgccggccaatgcgagcacgccggacaccgccgtccgccgagccgctcgctgccacgcccgagcccgtcgagccactcgctgccactcccggccaccacctcgtcagcgtcaccgccgagccggccgccgagccgcggagaggagagaagagaaagagatagagaggagaggagagagagagggatgagtggaaataaaagggagagaggtgaaaaaattaaagtgagtgagaggggaaaagagggaggggcatttttgcgtctatttaagaggctcacacacggaaatcgatttttccatgcagtccttttaaggagctgcacacgaaattggaggacaattttcgtagacgcgaccagttatggtccgtctgcaatctaaagaggtctctgtacaggaaaatcgttttttatagtgaagccacaaatttaatgtagttgtggctaccactctatggttttggaggacattggggtagagatggattggttccgtcatgttcgaccaaaccaagccgagtaacaagtgctggcttcagggacaaattcatcatttcgggaaatttaactatttgccactattagctttaccaattatccaaatacccttattagattagcccttaattttttgcccctctaaagtggtggcatcttaactatttaccacttttgcccatgtggcatcccaacatagcaacacagtgtaaaaatcaacatgggacccacttgtcagtcgcacacttctctctgtcctctttctctggtctgcccgtcggctaccggcactgctcctctcttccccagtgctagcggcgacgacggcggtgcactggctcacggctgcagaggacgagggggagccgagcgctgctcctctctttctcggcggcgaaccatctcaacgacggcgacggcgcgccgactcgcggcagcagaggagggggagccaagcgtcgccgcggttgaggacgagcgtcgtgcgaggtttgtaccgacggtggtcggcgtcctcgccgagcgcctgcctccctcgccaaggaagccatggaaggaggggggagagccgagtgccgacgcgagtccgaccttcgcctcgctgcgctgaggcacaaccacggcctccaatcggccgacgcggcgtccctccctccctggccatccaccgacgacgctgacgactccgcggatctgaccgagccgtcccccgcctccgccgactccatccggtgggtt

SEQ ID NO: 18882 - DNA, 2453 bp, Oryza sativa
tgttttttaagaacgcgttggacagacacaagcatatatcacgacattccttgatcatgttaagtggttgtgtaattctcgaaaatgagatcatgctgattgcagaggagctccgtcaacggaataattaactatttgccactcttacaagtggttctaaaggatttactattgaacccacatatcatagacatgagaacccacacatcatagacaacaagtgacaaattctaaattaccatatcttaaaagtggtatataaggtggtatatagtttaaatgtccctccatcaagagacgcacaccacaatagtgaaatatgtgaccgggtctttaccgaagtctttgtggacatcacttagcttgtttgaggacgtcacatagatcatcatagacggccagcctttactggaagcggacctcactttccgcatgacacagcagcgccgacaaggcctttgcatactcttaaaaaagaaaagactttaatatgttttactttctaaatttatttcttgtttcttttattccttaattgtgaggaatggagtctaaataggttgtaatgtttgcctgtgcatatccatgtatggatatagaaaccggatttttatctattataaaaaaatactccatccctagctttcgtatttatttctggtaacttttttttctattttctgctcttacttcctttctttcctcctcccttgcatgtgtcttcattcgtcatcttttattgctgtgttttgtttgtctcaactcaaaccaaatacaccctccgtttcaaaatatgtgacgccgttgattttttaaaatatgtttgaccattcatcttattcaaaaaatttaagtaattactaattatttttatatcatttgattcattgttaaatgtacctatatttatacatataattttacatatttcacaaaagtttttgaataggcaaaatttgctacaagacattcaaaaaacgtgtaattcgctagaggacatcgaaagaatgtgtatttgctgtagggcatcataaaaaactggtaattagctcctggacacccactgcattactttattatttctagaggaataggagagagaaacgatcattaaagacaaatttgcccttagctcaaatgaatccacgtgggcccacatgtaagcccctctctctcccggcacagcgccgcgtcggccagccagaacatgccggcggtggcaggctcttcgccgtgcaatcatgtctcgcgtcgcgtcgtcgtgcagcgaggcgtcgacggccgaggggaactccatgccgtacgaccaccagtccatgcctgcgccgtgcccaccgccgcgcgccacctccggcgccacatactcgtgtgtgccgacgaacgagctcgaccgtgcgtgcactggttctgcccgcgatgcccatcatgtgcagatactcgagcgcgaggagcacctcagtggcgtagaacctggcgaacgggattgggaatcgacgaccgggcatgctttggcgttgtgagtgagggagtagatctggccggcgtcgaagtcgtctaacatggcgagcatgtaaagggtggtcgagccaacgcaggatgcgcttctccgcggcggcgtggcccagctcgcccttcttggagagcgcgcggcagttcaccaccttcatggcgtactcgcacgaggacgatgagccgacgcattctccttcataccatgtccctggcgcctacttggtggatgagggtaagtcccgcgggcgtcgcggcgacgaggatgggcgcctaagcgaggtcgaccgcgtggtgcgggcgtggtagggaagaggtgggtgtggccatgtcaagtgagaacatggaggagctgaaagcgacacccactgacccaccgtgctactgctgccgctggcctgctgctacttatgcttgagctgggcatggaggcagcgtgtatgtgcatgtcgtggtaggcctgcgcgcgacagcgcagtgccgcaccaggcccgcgcctcgccgcaccgtagctgatgctctccctctccctcgggcttgcttggagaaaagagcagagagagagagaatgagagagaaaagaacaaggaagaaggagcagggaaggatagagaaaaacaaaaagaaaaaaattcgaagggtagaaccgtacttacacagtttttctctctccaatttctccggatataataaaataatcccgtgggtgtccagcagctaattaccaatattttgtgatgccctatagcatattcgcgttcttgcagtgtctcccagctaattatacgttttttggatgtcctgtagcaaattttgccttttgaataagacgaacagtcaaacatttgctaaaaagtcaacggtgtcaaatatttagaaatagagggagttttacgtagtacacaccaaccgatcgtgccctagccacactcgtactcattgaa

SEQ ID NO: 18883 - DNA, 675 bp, Oryza sativa
ccagagcgatcgatcgcccatcagcatttccacgtaaaacctatattactagtcgttctcaaattttatggccactattacagatgtcggttcacttaaaaccgatacatatgagatcctcgaacgtaaaactgacacctataatacctcattagtaccagttttataataaaaccaacactaataaaataagtactaatttattaaaaaactggcacttatacatgagtcatctgcactggttctctaaaaatcgacgcttataagtgagtcatatgtatcagttttcttaagaaaaaggtgcctatatataagctgagctagctgggtgagcgtaggaggtctccgacgaaaatatctatataccaacctctatttttctattcaatcggttcctctccacttctcgttctccctcccagtctctcacttctctcccccttgtttgcctatctcgccgcttccacctccttctcttcgcttcgatctccccgacttagttgatgaggatgcagattgaagatgatggcagcaccggccgaagagggacgagctctcctcaagaaagcttgttcctcttcagccaactccgccgtctatcccctctttatcggatcccgccgatgcctccgaggagcttcttcatcggatccgcacctacatcgctgatgtgcg

SEQ ID NO: 18884 - DNA, 1329 bp, Oryza sativa
tgtgatgaacaattgggcattggagattattggttttgtatttggaatttattcacaaggtaattttggagatgattggatttacaggtgaatttacaggatactgctgtgattttatgtggtccggtcagaccgggcaggggttgccggtcagaccggcggtgatcgagcggtcggaccggccagcccgcggtctgaccggctgacactgtgtcggtttcggtttcgggttgtttatttggatatctgagtttatttcatgattatgacttctagatggataatatacttatgtaatactattgtttgctgctaatgagtcaagttagagatagcttggtctcggaatatggtttctttgtttgttccatgtgtaggtgactcgatgtctcggaagagtatttgcggtgatggaccgggagtcggcttggggataagacgacgtccgttgtggtcagagatcatgcgggatacttaggctagagttgatgcacgtggttgatggagatttcatatggcatacgatggagttattgtgtgtgtatgggatgcggagtcgaatttggaagaagtccaaatttggtacgattggttatgtaaagtttctttcttgtactagtgggtttcctaaggtgtttaggactcctagtatgagtttggttcgtggctttaggctgcctacctcatgtataaatagagggggagcgtgaggcttccctgtatcgctttagagagtaattgagttgagttttgagttagggtttcgagtttagttgaaatttttgtaaggagtgctgttggtgcactttgtaaacacagagagaatcaataaagttgtcatccactttaagagttcttcgatttgtgtttaccgaggttcggcggtctaactggcagcgcaccgacggtcagaccggcggcattgcggcggtcagaccggcgggcacacggcggttagaccggcggcgacaggagtcggcagccggcgttctcggcggtacgaccgatcgatctacatcggtcagaccgatgttcatcaggcggtcagaccggcgcagtaccttcggtcagactgcgatccatcgatttcaagggtaacttttatttccgctaaaagttttcggtttttgggtataccaaccattcactccccctctggttggcttagttcttgtgattcgatcctatattttagaggaaaataactagatcatttgtctcttgcaatccttttttttcagttgttgcaatcagacacatatctgaagcttttcatgtggtttatctttcctatgaattcagagtccatgtcacttgattttttgtttt

SEQ ID NO: 18885 - DNA, 755 bp, Oryza sativa
tctcgccggccgccgccgtcggtggccgcttgggccgccgcatcatctaaccggccggccggtttgaagccgagccgggccgaccgggcgcctcgccgctcccccccccttttgtgacactgcccagtggggcccgcctgccagccgccccctctccctcccttagtgccgcttaccaatggggcccgcatgtcggcgccgccccaccccttgctgacgtcagccctgggatgaattattgcgcaataaattcattaaggtttttcttttatagtaataaacacagataatcttctaaaaatcataattaattcatccgagctccgattaagtccattcaagtctcagtaaatcaagaaaaatgtgtagaatccattaaaaatggttttgttctctgtttcaatagtcttatagcatgttttgcttgtgtgctttgtttgtcgcatagatttcggccgtttcgtcaatccgcggttccttgaagacgttgctgtggtctcatcagtgcgagagcaagacaagtcatgcattacaattgatcatattgtacctaatttacaaatgtcccgtatttctattaaatattgcattattttacaatatcatgtgggatgggtcttattactcagctatatgttgtttcccttatgccattgataacttgggtatcgaaatgactagatgttggtttaggaaatgcttagccatgcctagttcaactagtacacaaaaggggaatcacattaatgcataga

SEQ ID NO: 18886 - DNA, 1379 bp, Oryza sativa
agaagaagccccgcgctgccgacccccagaccagcaagagcgcgctcgacggcggcggcgacgacgacgacgatgacgacggcgccgtgttgccgagccgtgcggccaagaagccccgcgccgcggacatcaagatcaagagacgacaccccctcgacgacggcgaggagagcgacgcgtgctggcaagtcaccaccaccgacaacccgcacgacgccgcgcggacgtttaggaagaccctggagttcatcgcgtggtactcgaagctggtgaccaccatgaggcgcgctgaggagctggagaggagagagccacacccgcatggcgccctcaaggatctcttcccgagcagcgactgccatgagatcctcgaggagctctacggcggcggctggaggacagtgcaggtggcgctcgacgacggcggtggggggcgcgccggccgcacgacgttggcggcgatgcttgtcagtctaaggcagagggagaacgcagccgtggagcttgcaaggcgccgcgcggacaaaactcgctacggtgaagaaccagccgccgcgtggggatcgcggcggcggcgacgccagccgtgatccgtgcgccgccgcctctggacagatgtgtccgaacgggcggcgatgccgttccttccggctgtgacaaacttgacggagtgcatcgtacagcatgacgatcggcgcgttccccaattatcacacaagaagtgtcgaagataattggggaacgcgttgatcgtcctgctgcacgttgcagcattctttgttggtgttcatgattagtataatttcattggatatttatttagacttatatgcgagaaatgactagggatgtttcggctagctctataaggtggtgggcttgtcggcctgggtttaaagcctcaccccttctatttatttgatattacggtttttttatttagatttatatgtgcgtcaatttcattatttccaatgtagaactgtttacgcttggacagaaaatattaatgttgctgagagagggatgccattggctgaaaaacttgacaggaagtacttgtggtttcatactctgtaaaatcagtagcgaaacagagcagaattaatcaaccaaatcgaagttccactaagttgctttgcgttctgtgcgttgaagatttcttgaaaaattcttgattgtccactatgaagaataatagtcacatgcaaatttagttggccaatttccatgtgaaaaattctactaccctttgcatgctcaaagtttcttttttttttaatgcttcacatccatgactaatttccatgtgaaaaattctactaccctttccaacatgcattttgaacgggattttcatatcattggtatgaattccc

SEQ ID NO: 18887 - DNA, 654 bp, Oryza sativa
tctttcatgaatcaaatgtatcctcgagtttcttattctgacttggccaaagcaacaaacggcttcacatccaacaatttggttggcacagggcggtatggatctgtttacaagggtacaatgcggttcaagaattcagtatctgacgtagctgtgaaggttttcgatcttgagcaatctggttcttctaagagttttgtagcagagtgtaaggcactaagcaaaattcaacaccggaacttggttggtgtcataacttgctgctcttgccctaatttgaaccaaaatgacttcaaagcccttgtgttcgagttcatgccttatggtagtcttgataggtggatacatccagacatagatccatcaagtccagtcgaagttcttacgttaatgcagagattgaatattgctcttgatattggtgctgcactggactatttgcacaacaactgccagccagcaatagttcattgcgacttaaagcccagcaacattcttcttggggatggcatggttgctcatgttggggatcttggccttgcaaagattcttacagatccagaaggtgaacaactgatcaattcaaagagttctgtggggataatgggtacaattggatatgttgctccaggtaaatcacatttttgctgcagt

SEQ ID NO: 18888 - DNA, 1893 bp, Oryza sativa
atgctacgtagtgtgtctaatttgtgactcaaaagtgctatatattgtcaatgttggcttaattaattccatctctgtttgattttttagcttcataaaaggtgttaactgcataatatcggcaaaagaaatgtaacacagtactcttctgttaggcactcattgattttaagaccaagtacaggatcaatattttttgctgatgtaatccattttttggtgatcccaaaccattaacaatcaacggtgctaattttcacagattacttattgacagggttagaaggtgtgcagttctttactttatggagtatcaagtttttgcaagtgcgcatgacagtagatatattaccatccaagaaattcatttgtatagcttttaatagtgtatcatgtattcgtgttcatgcctaaacaattgggctgcaaacccgcatgggcattaattttatttatatatattcttatccttttcacaaaagatatagatgcagttcttttgattgctctgaaaaacatataattcctgcaaagaactatgctggaaaaatgtaaacattaagcctagtacttttatcagattcacttgcgaagcccattcttcatagcaggcatgaactctatctttctgtaagatataaacaacaccggataatactaacacacacatagcatttgattggtgataaacagagagttctgactggcagatgcaacactggaacaggaaagtggaaaatcaaaatcatgtatgacgttatattttactgtgaagtactactttagaacaacaaagtaaacaaaggggagcagattcgcaccttttgttggtcaaaaggggagcatatgccctaagctttcattccttcctgccttctctcttcccatatactccctccgtttcacaatgtaaattattctaccatttctcacattcacattgatgttaatgaatctatacatatatatctatttagattcattaatatcaatgtgaatgtgggaaatgctagaatgacttacattgtgaaacggagaaagtatattgctacctttgcaatctgcaaataagaaggcaggtagggtctcctcaacacagccaaatttactctcagatatttaacatgcttctacactacctgcaagactgcaaccattgtgttcatagcacgaaaatgcatttcattttccagagcgctggccgctgagggagctatgaacttttttccccgatctaaaactgaaatgccattccagtaaagccatgctacagtaaatactagcacactaaatcgacagcacggtagatcaacgcgatgaagtcttagttcttcctcaaatccaacgatagaacgcaggtcaagccaaggccgtgcaccgaagaacggattccggacgagtcagtagcggcgaatcggagggcaccaccgaggcaatcaggaattgggggaaatagtaacttgctgcgcagaaacgaacagcgggttttcacctcgcgtcggggcctcgagggagagaagatcacctcgtcggagaagaagcttccgacctggtctgtagcggcggagtagctcgccgtcgccggagttccggtgccctggacccggaaagcaaaagctttgatttaggtctagttttgtttgggccttacggcccgctcgctgtaatggatccgacccatctgcaaggagaaaatggacatttagcccagttcaaaacagggtttcgctagattgccatcccaaaaacgtgtttccctaaaatgctaatatgaagcgctcgtactcaccgccactttgccattttagcttttttgtgcattttcgaaatcattttcgcttcttcagtgggtaatgagacgaaattacttccatccttccccttccgtggtgg

SEQ ID NO: 18889 - DNA, 849 bp, Oryza sativa
ccggccgtgtcatcggctccgacctcgccaatcgcgagttcgatggtaggacgggcgtgctcgatgaccaggtgtctcttgttggtgacataagccgctctttgctctctctggagcacctgagtgacctccaactcggctggaatttcctggaggggcgcactggtcgtctcccggacttccttggctctttcaaaaggctggaatctcttggcctcaccggcataccattttctggcaccgtgcctcctaagctcggtacgttaataatattttatttcaaaccaattcttattaattacttacattaatctattatcactaaattaaatatttagctaaataagtaaggacgtaaattagtagcattggtgtgggtagcgcgccgtgaacactgtagcaaacgcgggatccgtatggcagtggacgcagcagtggaccgggaaagctgagtactccctatgtcccaatacaacacggttcctggattccggttagagtatgtatccaatatatgtacagagtctgttacagtttagaaattggagttgtactaagtacattgaaatagagtcggactctttattataggatatcacttaaatagagggatggacatgttataaccgtatggcaacttagcatggcgaaatagagcggctgccgacggcatccggccgagggtcattgtaactctaatacgctgtaatatggtggatcggagaggagcgcccgtaatcagtgccccggggatataggcttcggctgaacctcgttaacaaatattgtgcctggtgtcgtcatcatgtttggatctcctatgacgtcttttccatgtttggttactaa

SEQ ID NO: 18890 - DNA, 2668 bp, Oryza sativa
acataaaggcggcagtattctactagtcttgtgcatcgctcgctagtggtagtagtgggaggagtgacgtccgaataatcctccctcctaccgtgtgcccaccgcgtgcctttgctttccctccagcatccttccttccttcctctatttctacctctcctcttctccttctccttctccatctcctcctcaggacactcctctcctctgcttctcttcatcccattcgcatcagtgctcagcgacctaatcaagatctttactcgaacagaagagtataagtccagcaccggagaagcatctgattctgaattcggtttgctgctgcctggggagaggaaggttaggttcctggctcctcctgactgacttaatttcctttcgctgtctttctccaccaggtgtggtgcttgtcttttgtgttcatgtgtgattcaagtgattcttgtttggtcggtctctgcctttttgttctagagagatctcctggtgctcttggggcactctctgctcctgttatactggtgatggccttctctgttcttgtgctgaaatcctgcttgaatcaacagagtttctttaggttttttttttttgattcttgattcatgtgttgttcttgaggaagaggtcaggagagttcagttgggttggagccattggttgttgccatgcatctttctcttcttgatttttatgtgtgtgtgtgcagtctctttctggatgattctgtactggcagtttgtggtacaaacaggggaagaaaccaagatcggcttcttaatgtgtagtaaacaaatttccagtcttgctggaagttgacatggttaattagagaaaggaaacaaattagagttagttttagtaaatcccaatgattccttcagggcttgtactgcatgaagccaagaatctgatagctttcaccacattagatttaacccagatatccaataaggagaaagagcatgcaaaatcactgttctttacttcttgttttctacagcagcaataattttgccatgaaatcgcatagctgtcatggcgattctcttctcaccaaccaaatttagaacagaaacccagctgtgttttccccccttttaattttaactcttctgtgaattcaccgcatgatacacgccaagaaagtgttttaaatcgctagctaaaaaacatttagcgatcggtcttctcaaacagctaatagccgattgaatggggctgtagcggctaaattctacatgaggcgagaaatagctagagacaccctcctcgaacagctatatctgaagatagcggtagctatagccggagatttaagacctcgcaagaaacagggatggtgtcacatggcataggcaagaagagtctttcttcttcctcctactcgccgccgtcttcgtcgtcgtcgccgcctcggtcttcatagctcggctgcaatgtctgatcgtcgtgcgtgtgcgtaggattcagctgagtttggttcttagtggattcgtttgaaattggtgcagggtaaggtttgccaagacggctccgcggcggcgtctccggctaatctccggtcactctggccttccccgtggcgccgccgccgcctcgcgccgtgagtgaggtgtgtggtgctgtggggcatgcgatctcctccgccgtcttcctcctcgtctcgccgtcgctgctccggagagtctctcccgtagacaacggctaaaaggtctcagaaacttactgaaatttggaacgaattcgtctgaacagaagaaaattcgaagggatttgcgagttttgagtaggtcaagatgaccaggatgaggtgcatcccgggtctgctcgccggcaggaggaagaaacgagtggtaaatgtttgatcgaattttgcctttctgtttttgtgagattttggttttgagtttgtaatggttggtgagtgttcgacaggttgctgatgccaagaaggctagtggggattgtcccaaggtgaagccggtggagttcatcgactcgccggcctccgaatgcggcgacagaaaggtcgcgccgtgcgatgtcaaggtcgtcgtcgacgacacggttgtcaccgccttggcggcgaccaaaggaggcggcggcggcgacgatcatggcggcgacatggcgttggcgaagaggggcagcatgtcgtctgacttcgagttcgagttccacgcacacgagaagcccgacggacatggcgtccccgccggcgcctcgccggacgcggtgatcgcgagcgggaaggaggtggtggtggccgacgcgtcgccgaagctgaagcggtcgtgctccaacatcgagacgaagcggccgggcacgcacgacgcggcggcggaggcggcgccggcgcggtcaagatcctacggcgacctcgggaacctgcccggcggcggaggcggcggcatctccctggagacaaccccgcgcggcgcggcgccgcaggcggaggcgagcccggcgtcggtgaggacgtcgcgcaccgccgaccgcgtgatgctgaagaagcgttcgtcgagccaggtgctcccgtcgcggagccgcaagctgtggtggcggctcttcctctggagccaccgcaacctgcaccgcccgtcgccggcggcgcgccccgcggccgccgcgtgcacacccgcgggccaccacggcggcggcg

SEQ ID NO: 18891 - DNA, 3455 bp, Oryza sativa
cgagcaagacgacgacgaccaccaccaccaccaccattaccacggcgacgccgacgacgacgacggcgagcacgccatggagcacggtgactgcgtggcgcgggcgccgcgcgccctggagatcggcgagtcgtccgggaaggggcacggcaagtcgaagcgttccacggccgccgacgaggtcgcccaggccaacaccatcatccagtcgctcaacgcattctcgtcggtggcgcacatctccggcatgggcctcaaggtggtgccgatgatcgcgccgttctccagcctccgcgccatcaacctctctggcaacttcatcggtgagcacaactgacaacagtagtaacattttttgtcgctgtagcatttcaagcaaagtaactagatactgcacagtagttacttactactaccttcagttaccgaaaaatttgactgaatttgggttctaccacagttcatatctcgccgggatcgctgcccaagggccttcactcgctcgatctgtcgcggaacaagatcgccaacatcgaggggctccgggagctgaccaagctgcgcgttctcaacctcagctacaaccggatctcgcgcatcggccacggtaaccgcacatcttgcctcaccaatgtcacaatcttcagagtatcctgcatgtccaaaccctccaaattttaccctctcactagtagaattacaattttcagactataccaagtactgagtagagttcctttttccctgtggagtgatgagtgatagggacaaagattagagtttttaatctgtagcatctagtagctgacaaagccagtctggaccagaacaaaatgagcattccaggacatgtcacgttggttctagcatgaatctgcttcatgtattggctgtcactgcctcgtctgtccacagtttccgtgatccaggaacattattaatacagttggaaatggggccttatcatcatcatcatgatcaaatccctgtccctgacttctgtccatccataccctggatgtaaaagtgcactcctccataattccaacctggtccatgcatccactgaatccactgctccctaatgatctcaacttaattctctgaaaaaaaaatcaattcagagcatgactctgttttcacttgagaagaatcttgctgaaaacctgccactttggaaatgaaaaataaaaaaaaaagaaaatctctgcactgcaagtctgcaactgcatctacatgactctgcatttcttcagattttgcaatcttgagaagaatcaagttctaaccatgcaacttcggaaagaaaaagaaaaagaagaaaaaatctctacacttcaactacttcatctacatatgactcttgagaagaatcaagctcaaaccctgcaacttcggaaatgaaaagaaaaagaaaaagaaagaaaatatttacactgcaactacttcatctacatgactctgaatttctttagattttgcaatcttgcccagaattgttcaaaacctgcaactttggaaaccataaaaaaaaataatctctgcactgaaagtctgcaattgcatctagatgactctgaatttcatcaggttttgcgaaatctttcagagatgagatgatcattcatggcggctgactttgtgaatctgaacctggcagggctgtcggggtgcacggcgctgagggagctgtacctggcggggaacaagatcagcgacgtggaggggctgcaccggctgctgaagctggcggtgctggacctggggttcaacaaggtcaccacggcgagggcgctgggccagctggtggccaactaccactccctccgcgccctcaacctcgtcggcaaccccgtccaggccaacgtcggtgacgacgccctccgcagggccgtcacgggcctcctcccccacctcgcctacctcaacaagcagcccgtcaagccccgcggcgccgcccccgccgacggcgccgtgtcgcgcgccgcgctcgaggccggcggcgccgggggaggctcccgtagcgcgcggaagcggtcgtccgctgcggcggcgtcgcggaggctggggcagcgcggcgaggggagcgggagcgggaggagcaggtccaaggggaggcagccgtcgagcagcttgccggcgaggaggtgaagacggcggcggcggcggcgagtgcgaggtccattttgtgttgttgcgatacattcgaatttagaatttgaagatcttttgaatttggaatttggattggagagagagagcgtatgtattgctgcgggtgtgaagtttgactgaatattgttgttcagtttgcaaattattacagtgcatcattgcagctaatagtaggtgtgtgtgatgatgagtggaaaatgatgccaaaatcctgttcttggtcgatcttataaatccagtcttcgtttaaactcaaccttttttgtttcctgttgagatgagaaaatcttagttgaaacatttcgcagacttacgaatgaaaattacttcaaggtttcatatctactactactttaaaaataaaactcgtttccgtcgtccgtttggaaaaaaaaaagcgagaaaaacaaaaagaggaaaaaaacatcaatcggcaaaaaaaaagtccgactcctctgttagaaaaaaaaaagagagaaaaaacgaagagaaaaaaaaaggacgtccgactccccggtggagaaaaaaagtgagaaaaaaaaagaatttttccggtcgttatctcataggtgcggtgtttttttcatccccctcgcctccccccaaatcccagtcggaattgcatcacccccacccaaaaaaattcccaatcggaattcaatcaatcttcacaatgggaattcaatgaaaccccccgaatcccaattgcactaagaatcagataagggaaatatcttccaaaatcggcacaaccaaatcggatgaacacaccgcaagaaaaattcaaccaatctttgtccccaaaaaatcatcccacatacatacatcacaaaactacacaccctcggccgtcgccgccgccggcggatccatccgcggccaccgccaccgccaccgccaccgccgacggatccatcgtcgccggatctagggcgggagggaggtgacaggggaggagggagccgccgccgccaccgccgacggacccacgcgccgacgccgccgacaccaccattgccgccggatctggggcaggagggaggcgagaggggagaagggagccgccgccgccgccgtatccgcccgcagccgccgccaccatcgccggatccacccgcggctaccgccgccaccgccaccaccggcggatctgccgcgggagggaggctagagggggtggagggagccgccgccgacaccgcctcccaccctcggatccactgcggccgccaccaacccgcggccgccgacccgagagggagaggaggagggggggcgcc

SEQ ID NO: 18892 - DNA, 3442 bp, Oryza sativa
attagccccttgccgccctctgtatgggcggcaagggcctaatcgcaattttggccaacgacggggcagacggcgcggtcgacccaccgtctgccacgtcagcttgccgcccaccattagggcggtaggggctatttctgcaatttttttggtcgatagattatttctgtaaatattaaaaaaaataatctaaaaacgaaaaaaactcccgcctgcacgcctcctgccaccctaaccctgactcccctagggcgactgggctgtttttttctcgttgggccgtccgtcgccgggatgggccaaattcttgggtgttcccagacaacccattggaacggaaaaagtacaccgaaggtccctcaccttgtcgtcgggattaaaaaacatcctcgaacctcaaaaccagatatgtggggtctcttaactatacaaaaccggtcacccgagatccttcggtggttttgaccccggttttggtctacgtggcgctgagtcagcgtgggacccacgtggaccccacatgccaggtgtccacgtcaccctctctttcccctcttctctcccttcctcatctctctctcactctctctctctctctctcacttctctgcagctggccgaggcgaggcgggagggcggcgccgcgatggccgccggcggaggcagcgtgcgagcgcggcgacttctccgatttttccgcctccttgtcctgctcggccgacgtgggcgcgctcgtgtcgtcgcgcgcggctaccgcgtcggccatggcgagggagccgccccgcttcccggtgccccacgcgcggctacgacgtggggtggtgggggccgaagaagcggtgagagggtacgactacgaaacgcgctacttccggcagcggctggaccacttcaaaaacttttgttcttggtgtggctttaaggtcgatctatgtgccaaggtctcaaaatcccctccccgaaaacctcaaaaattcctgattcaattttaaatctagattttgttgaaaagttccacattggttgtggaagggcaaatgacctaagatattagtggaggaacccctcacctcaacggctagcttttggggtgggaaaggccctttacgatccttcagattttgcagtatttcaacttttgggcgggtgttttcttgcaataaccatgatatcgtgactatattttaacattgttactatgataaagcagttatgttcctactttggtcatcatgttattacgccatttctacgagacggacctaaaaagagatagcatgggggaagtcagcaggtgtactttggtcatcatgttattacgccatttctacgagaaggacctaaaaagagatagcatgggggaagtcagcaggtggatttgatcaattgatcggagtctgcccgacgtgcgaacgctttgattgacgtggaaggaaggggtgcataatatttattatgtggagggggtacataatagatgtgctatattttgtcatacaaattttaaagatgccacgggccaagatatatacaatacaagcatgtactcacgcgcatctttaaaaaaaaaaaaggtcactcacatgggaagaaccagtcagctctccatcttccatccgacccataagacaacccctccctttttatggacaccggattatcaaatctgaatgtgtcgttcttcatgtcatacacacagtaggcgcagtcaccaatgccattgatgatcccatcagagcataatctggttatgtttaagctcgaaaagaatatacagctgccataatccgatgaaagaattgccctggagcaggaggtgccgaggaagagagcttggtcacctagttccttcacctccaaccacctgcgcttctccagatctgcctcgaacacgtccagcttgatctccttcctcagctcgtcgacgccccaacggcgtacattgtaaaatatggggagatgccaccgccatcgaaccatcatcagccttccagtagcgcacgatatgacgaggtaaaaagtgctccgccaactgtagccttgacaactctaggcttgaggagctatgccgatcacgatatctgcactgatgctatcgctgaactcgtgaacgaaaagctccccgtcactgctaatggagtagagcttgccattgtagtaggctatgtcgcgcgcgaagcaggggccgccggaggcaaacagccaggttgagtgcattcccggccggtagaagaaaacgccagagccggcgatgacggcggcgacgagatcaggcgagcacacggcgatcttccgcacggcgttctcgccgaagcacatggttcgttgtccctctttctcctccccgtagtcggggaggatggcgtcgtcgtcgtcgtcgcagtgccagtggtagggcagatcaatcctggccttggagattgggttcatcaggaagcactccagctgctcgctgcggtcgtagaggagccagccatcgaacgagccgcggcagacgaccgtgcctccagcttggagctcgtcggggacggggatgcggtgcacctcgccgtcggggagactctggtaggtgatgcggccgtccaagttaagccaggggagcgccggcggcagagggtgctgctgccacgcggcgaggcgccaccggcggcacacggctcggaagcggaggcggtcgccgtgggacagcagccggcagaacaccatgcctgccagctccggctggagatccggccatggtgaccaggtgctttcatcatcgtcgtccatgatgccggctggaggtacaacaacgacgtcccgcccaagatcggatgcagcaggcatcgcgtacgtctaagatctgtgcgtacgtacgtgcttgggatctctatagctggctcgatcgtatacattgattatatatacgtatgaattaccgagtccgaagctgtcgaccgagttgtattttgctagctactagctgttaattttgtggtgctccctccgtctccatttcatattataagttatttgtttttctattttaagtttaatcaagtttatagaaaattattgtaacatttcaaacaaaatatcatcaaaatatgttcaatattaatgaaactaatttgttatcgcagatcagtatatatttaaaaaattctataaatatagttaaacataaataagtctgacttaaaaaaattcaaagcgacttatataatataaacagagagggtagagaccgagtccataggttctcccacagagcaaggataatcataattataagtcaattataaatttatttggagaagaataatattaaaatgattttttcacaacaccgagctttcatttttctatatggaccataaaattcactcttttaagttatagctgactccaaacccccctctccaccctctactccgtgcaaaagcatgggcggtggcggcgg

SEQ ID NO: 18893 - DNA, 5824 bp, Oryza sativa
ccctcgccaaccggctgccgccaacgaggacaatagcggccgagcatggaggccgagcgcgccatagtcactgctgcgaaccccatcctcagcggcgagcgctcaatgaccgccgacctcgaggccatcaaggctcctgacacagctgccccgctccctcctcgagcttcctcccggccctccttactccctctttgagttcccttgctaaccggccaccgccgccgaacccatcctcagcgcctagcgtgccatggcagcagacttcgagggcgtgaaggcttccaaccaggctatcgaggccttcgacgccgcctcctccttgcagcagccgacgctgccgccgcctcctcacagcagccggtgccaccgctggcgagaagaagtagccagaggaggaagctaccggcaagaagggggagaaggggaatgaccgaatgaggagttgctggagatagggaggagggtggggcccactgacatgtgggtcccgctattttttatcatttgtcttacagacatgtgggcccatagtctctatctctacttctactactattattaaaattgaagatgtttttgtgaagagatttttgtacgtcgtctttgtccgatcgatcacctgattccgcgccatccgttttagtccatcggcgcccttcaagcctttgcgatggaatttttggctcccttttctattttcgggaatgctaggggacgggatatcgtcccccaacgggatagctcctcctccataacgtgattcttatccatacacgcaccaggcctgctcactcgccgccgtcgctgtcccccgtcgctgctgcgcccgtcccctgtcgcctccgccgccgccgtgcccatcccccaccgccgccgcacccgtcccccgtcgacgacgccgccgccgccgcgtccatgccccaccgccgccgtcgcaatcccccgccgccgccgcgctcgtcccctaccgccgccgtcgccgtcctcatctacaagggacatctgcagggggccgaccgcacgtgtcggggtgctcctcccccaacgggatgcccagctatatatagtaggaatcacctgatacctggtaggtatcatccgatacttcgtaagtatcacgcgatacatggtagaaattgtcttatacctgacaagtatcatatgatacctcgcgagtatcacgcgatacgtgttagaaatcgtctaatacatgacaggtatcgcatgatacctcgtgagtatcatacgatacgtggttgaaatcgtctgatacctgacaggtttcacatgatacctcgcgagtatcacgcgatacgtggtagaaatcgcatgatacctgataaatatcacatgatacttgcaagtgtcacctgaaatgtgtgtagaatcgtctgataccttataggtatcacacctgatacctactcgggatcatcatgttgtgtagaatcgtctgatacttgataggtatcacacctgttacctactcgggatcattccgttcgaaaacgggattccattatatagcagcctctttattttttgtctgtaagatctgcacaaagatttatatttatgtagacccaacttacaattacactcatttacaaaacgcttatatatactatagaacacttacaaatagttacagtgtatctgcactcagttatattataaaaaaattgattttacaactgcttttgtctctagaattactatttttaacatgtttgttcttttttttttgttgaaaacgtagtattcactggttgaaagttttgtaagatttgttggtccaaatctaatgagtactccctccatccctaaatatttaacgccgttgacctttttaaacatgtttgaccgttcgtcttattaaaaaaaacttttgtgcaatgtgtaaaactatatgtatacataaaagaatatttaacaataaatcaaagaattaataattacttaatttttttaataagacgaacggtcaaacatttttaaaaaagttaacggcgtcaaatatttttttttaataagacgaacggttaaacatttttaaaaaagttaacggcgtcaaatattttgagatggaggaagtattatgatgtagtgataaacaatctacttgtagaatgcaaagaaacgaggtcgtggcgacccacacgcacagacaaaagatttcagtagtcaaagcgagacgattccgtcacttccgtgagaaacaacgacgttttctgagacggcgtttccgctgctcgccgtcgtcgtcgcccatggattcggcaccggcgccggagccgccatgagatgcaggaacgggttcaccggaggcgcgacgtccatctcgccctccagcatcttcaccaccgcgcccatcggcggccgcgcctccggccgctgctgcacgcaccagaacgccacctggtacatcctcaccaccgcctccttgcaccgccgctcgtcgtcggcctcggccacggtcaccacggcctcgccgtcgctgccactacagatctcgtcgctcggatgattgatggcggcggcggcgtcgtcgaccatcatcaactcgccgcgctcgtacctggcccacgcctccatcggccaccactgctggctctccggcgcggcctcgtcgaagttcctcctccggccgacgatcttgaggaggagcatgccgaagctgtacacgtcgcacttctccgtcacgccggactgcatcaacgtctccggcgcggcgtagccgggggtgccgcgcatgccggacacggagacgtgcgtgtcgccgcggttcaccagccgggccagcccgaagtcggccaccttgggcgtcatgccgccgtcgagcaggacgttgccgggcttgatgtcgtagtgcacgatcttgtgctcgcactcctcgtggaggtagcggagcccccgcgcgacgccgatggcgatggcgcgccgcgccgggacgccgacgtcgcggctcaggtcgaacaggtaggcgtcgagcgcgccgttgcccatgtactcgtacaccagcgcgcgcacggcggcgtcgtagcagaagccgaacagcctgacgaggttgatgtggtgcgtcctcccgatggtgcccacctccgccatgaactgctcctcggacctcctcctgtccatgccgccgcggagcaccttgacggccacggcgaggccgttggggagcgcgccgccgtacaccgtcccgaagacgccggcgccgagccgcgccgagtagccgcgcgtgaacccggcgagctgccgcggcgtgaaccggatgggcttctcgtgcgccatctcccacaggaacctctccaccgtcgcgctccgcatcgcggcgtcgggcaccacggcgtagtgcgccgtcgccttcatctcggcggccaccgcggcgccgcagctctcggcgccccggtacaccttgaccagcaacgccgcgaacgccacaacgaagatgatcgtggcaatcactgcagggaccaccgatcgatcaatgcaaaaatcaaacaagaggaagcaactcaatataatcgaaatcaagcagccagtagatgagagaatatatgagatgatcatggaaaccgatgacaagggtgcacaccgtaacggcaggcgacgccatgaagcaggtgatgtaatcttggtgttttgatgaaagcatgtgaagagtgacggccttgtgccttgctccacacggccttgcaaatcttaataaatttagccggcgattaactttttcttgagagagaggcaagcttatcccaactctgtgactagtgaggtgattgcgacatagcttagcggatgattactgtagcatcactgtagcaaatcctggattaatatgcttcgttagattcgtctcgtaaaatagtctaggggttatagaatgggttttgtcagtaatctacgtttaatactcctagatagtaagattctgaaagactatttaatagtccggaggatcaaacaaaaccatagttcgctgaaattttctgttatacttggatagatatatcacatatatttacctcttcactactttattagacataaaatttaaattagtttaactagtttgaaaaatgtacggtcgacactgtcacaacatctccaaagagcaccaaataaaaaaaagtgctccaaactccaaagggtccctatcccaagtcacaatccctgccattcgtttgttgtcgccttaactctatgtctgcacatttaaaaattgaacgttattattgatggattcattcatactctctccatcctaaaataaactaaccttgaatattatgtgatacatcttacaaatttagttgtactatatatttagattcgttgaactaagaagtctaagatgcgttacatactagtacgatgtttgtttattttaaaatggagagagtggttttcaaagtctgcttagccaccatgtgccctgctggtttgctagctggccatatgccacccctctgctcgtcatgctcatcctcttcgttatcatttggatttattttctataaaaaaattggaacttatcattgctaagttcattattttttgtttttagaattctggcagccaacacattcctctcgcctcctgcccccctgcctcccaatcgtcaccacatatattaatccattaaaaatatagctattaaagataaagatatttgtaggcaatcaataacatatgacaaagttaaatacagagggtgggatttagatattgggttggagaaaaaaaatgtggggagaaaatatttttagggagttccctaaatgggggttgtcaaaaattgaaaaaaacttgaacaaatatgtaggtgaattatcacttgtattagtttgaatacatcacttcatggagctagagcccatctctcaagtgtgatgagatgcatatatatatctttaaggatatataagtggaacccttgtttgacatttcaagcaaaagggaagtagatcagtagcatcgccacttgtgatgccactatttgtgcatttgtgcaatactctcttttagataatggattaactaaaacccacactctacatcctacatgtacatgaccaaaactgtgcaatactcctttcaacaaaaactaacagttgtgcaactgtaacttccaggaaacatccaaattaagagaagcgctaatacagaggtaatgtcaatccaaacaactttatggtgttgcgcaatgcctaacattcatcatctcctctccaacttgcttcaaaccaacgaccactccactctacgagctccaaactccacccatatcttttgccacatactacttcctcagaataagttaattaatctgagattaatttattttggatagacgtctgtccagatttataaaattaggatgtgtcacattctgtgctatcaccgtaatggtatttgattagagcaagtttaatagtatagccaactactaactccaaagcatctacagctaatgtaatagctaattcatacaatagttccttactatactattaatacccggtcctacctgtcatacacacattacgtcttggagtttgtgctgcagctggctacagatctgtagcccactgcttttctctctcttcctttatctatttaaaatatgtttatagctggattatagcctgctattatacctgctcttaacaatgtaatgatccaattggaatgatcacctctgcagactgacgagaccctgatctcaatgagttatcactttcagctgaatctgtagtgcttgtccacctaagcgcagccgccggcgacgcgaccaaatgctggaacgggttcaccg

SEQ ID NO: 18894 - DNA, 4941 bp, Oryza sativa
cgatctcgaacaggtgcacgccgaagctgtacacgtcgcacttctcggtcacgcccgcctgcatccacatctccggcgcggcgtagcccggggtgccgcgcatgccggacaccgagacgtgcgtgtcgccgcggctcgccagccgcgccagcccgaagtcggccaccttgggcgtcaggccgccgtcgagcaggacgttgccgggcttgatgtcgtagtgcacgatcttgtgctggcactcctcgtggaggtagcggagccccctcgcgacaccgacggcgatggcgcgccgcgtcgcgacggggacggcgcggctccggtcgaacaggtaggcgtcgagcgcgccgttgtccatgtactcgtacaccagcgcgcgcacgtcggcgtcgaagcagaagccgaacagcctgacgaggttgatgtggtgaatcctcccgacgctgcccacctccgccataaactgctcctgcgacgtcgaccacccgtcgccatggccgccgacgtggaggcgcttcacggcgaccgtgaggccgttcgggagcatgcccttgtacacggtgccgaagccgccggcgccgagccgggccgagtagttgttcgtgaatccggccagctgctgcgccgtgaaccggatgggcttctcgccggcgatctctttgagaaacctctcgacggtggcgtcgcgtatctgggagtccggcaccacggcgtacatcgccgccgccgccgtcgggttggtgttgatgttgacggccgggaggccattcttcttgacacatctgtacacgaggtaaacaatggcgactgatccagcaatgctcaccactgaaagcactgcatcaccagagatcaaaaccaagcatcatctcagtgaaaccagctcatcatctcgaaacaagaaactgaaaattgaaaagaacaaaagaaagaaaaaacatgtacaaattgccgagatttcacgcaccgacgacgatggctaggaaggagttgaaattgctggaggcttgcttgttgaaatcgtcgaacgactggttgggattagcagacatgttggtggatgaataatgaattactgctgcaaatgaagaacgaattgggaggattctgaacttcttggtgatccaaactctgaagctgatcgatcaagcttgcatgcaaactaacaatgcgtgtagcatatgcagctgtaatctggggctgaatttatagcactcaaggggctatcgtgttgggacagcaaccaaagaactgttcaacacgcgctgcagtaaccaggtcaagtcagaaaaaagaacgcgggagatatgataattaacctgacagcgacaggcatatcgtatctcattagattaaaaaatgcagaagaaaacctgaacaaaagaactaggactctgcttacttccctcaagaagaaaaaacagagagggtctcctgtctgaattattcattgccgccgttgatatgaagtattcatcgacgcaatcactcagtttcgacccttccattcatcaaattttgcagaaaactcccttactttctctttttcagaacgcggtcctatacttgaattttttttcaccttcacataagatatatcaggatctagagggcctttacataagaatacataagacagtgaacttacatttagagacttaagaaagattatcaagttaagcgaggactttttgtaaaattgccagctcgtgcaccaggtgatgtggccatcaccggaagcgaacatgccagtaagaaaagcctcggagcgctctggtgcgagcagatcgccttcatctttaattactccgattgactcctgaacaaaataaaaagaagaagagaaaagtcaaatcttctaatcttcatcacaaataaaatctcatgttctcccaaatcccaatgttaaggcgtaataaggctccaggttagggtgactgcggcctaagggagcaatttctactgggcaagaggatgttgggtatccaagcaagcgacggcggaggcgccattgccgccgtatgcggttctccctgagccatcgctgccgcccccaccgcctccgctcggtacttccaaacttcggtcgcggcggataaggcagagctcgccggagaaagttggaggcaccaccgtcgccgtgtcgccggagagccgagcgcgtcaccgtgccgattcgattttgagtttacctaagggtttttgtgaaaaatgacgtactaaattattacacctccgtcttaaaataaatgcaaccatgagtttccatgttcaattttgaccgtcgtcttatttaaatttttttatgattaatatttttattgttataagattataaaatatgaataatattttatgcgtgacttatgttttttagttttttttaaaaaaataaataagatgaacgatcaaaagttggacacgaaaatttatgattacgcttattttgggagtattaccttattccacaccgtctgatcaagtataggtggtggagattaaagaaaggcaatattgcaacacgcccccccttacaatgtttcctttcccaattcggactcgtaatccgaatccgaatgagatttaaaacattcggcgccggcggcggcctatattaagtagcacaaacccacatctctgatcctcacaaacgcagccatggcggcggtaactgtgctcgattgccaagtgttcggcattcacaagatggtgctactctccgagacagcggccgcgccaccgccgccgccgccgttggcggagcagcagacagcgccaccggcggtcacgctacggcttctcgtccagcgggcttgctgctaccacgacagcgacgacgacgccgacggtgtcgtcgaccacgacatggacacaatggaggacgtgatctgccgagcgccgctccgcgagctgatggcggatgatcgcgacgacgatggcgcctcggtggcggagcgggcgttccgggagatgttggccgggatcgagcaccagacgctgctcccggaggtcgagccggaggtgtcgaaggccgcggcgcgcgtccgggcggtgtgcgagggtcgcccggaggaggagatcgccgggctcgagctccgcctgcacgtcctgctcgtggtgcacgtgttcggaggcgccggcgacgacgacgagatcgggagcgacatggatctcagcgacgtgtgcggggaaacagaggacgacgacgacggcgtactcatcagcgacgaggacgacgacgagtacggcgtctacggcggcggagggtgcgccatggcgcgggagggcgggccgagcgacggcgcgctgctgctgtcgggcttcgcggcgcgctccgacggcgcggagctcgacgacgacgaccagctcgaggtgacgccgcgggacgtccgccggctggtgcgcatggcgctggacggcgaggacgtcgagcgcgacgaggcctaccagcgggcgcttgccggcggcacggccgtgtcgccggtgtcgctcgccgcgatggtcgaccaggcgctccagtccgttcgccggcagcagcagaacgcgccgcgagacggcgtggttcgccggatgcgcaccggattctgacgtgcagcagagcggatgacgtgtcgcgccaacgcaacaacgccaagttttgtctgttactactactgctcctatttttgatcttggtagagaagttggttgtcaatcgattattgaatagcaaaagctgatttcagaagatgtttgggggagtttttaagctaatgcagcttctaccagaatcagaaactcccctaaacagtccagcttttggttcagattgaagctgtagttgtggaatccagaaaataaatagaagacagaaactgggaaacccacctttttcatattctcataagctggctgctggttaccagccagctgcttctcagaatcttaagctcaccaaacagacccttaggtactgtttttcaaattgattgaaggcaaatgcaagccttgttcaggttcaaatattggaatcttgaaatcagcttatatgtttcaattggatgtaggcagattaaaaccttgttcaggttcaataattcaaatctatatcaagcatgcactgtccaattcaaaagctaaacatagcaaattagaaatctggacaagttcagtgcccatttgaagctggaatatgaaatggacaaatggtggtgtatgaaactatcaatttccaatttccgcccccaaattcagccaaacaaaacttcaggttaattaggaactgaaaacttcaatggccattcggttctgcttctcgctatcctatccttccgattggcatagctgtgcatcaagtatgaaaatgcactagattaaactaaataaagcagctcctacatatatatgagtgtcatgtcaagcatggattaaattaacatagatacaaaaatgaaacatgattaattactaggattacttaacacacggatcacagaaaatcaatccttgcatgcaggggaaatcgatggatcgacctctctccttaacttgttcttaattctcatgtacaatcaaagaaacacacacgcacacacacatgcgtgcactgcatctctctgagcaacgaactcgattgatttgattttgattcgctagggattaaagagaagctgagatagagatttcgacgatcatgcgacgctgaaggagctggctgcgctctcgacgaacttcctggcgcccttgaaccacctcttgtcgccggcctgcgccttgcagatgtacagcttgccgtcgttgacggtggccgtgatcagctggtgcttgccgccctcgtcgccgtccgccgtcctcgtcagcaccgttacgctgtagtactgcttccctcccaccaccggcgccgagctctccaggatgttcgccgtcgccaccgcgtccgactcaaacccaccctatatcgcatat

SEQ ID NO: 18895 - DNA, 709 bp, Oryza sativa
gctattccaagcggcaaacaacaatttctattggaaatagagcaaaaacaagcttttggcgcgacaactggctccaaaactcctgcccaaaggatgttgtgccactctgcttcaagctagcaaaacaaaaacaaagaaatgttcagaaagagctggaaggcaatctttggctccagtccttcaagcaattcaccacggtggaagaaatcaacgaattagtgcaactaggggagatgctacagcaaattcagcttaacccgcaagtgcaggatgacattgcttggaactggaatgagaaaggtgtttacacagcagaaagcgcttatttggctcagtttcaaggatcctttgtaacacatgacttcatttccatctggaaagcacctgcggaaccgaagactcgtttctttggatggttgatcattcaccaaaaaacgttgacagcgcaaagcctccttcgcaggcattagccttgcaactagatctgtaacctgtgcaaagaagcttttgaagacacaaaccatcttttccgttcgtgcatttttttcggaaatgtttgttccctggttagtgcttggggtggtcttccctccttgtcattgcgtgatgacatttgactgtggtggaatgatatcaactgcatcaaatccaaagaacaaaaaagagtgatctctggaagccttctcaccacctggtggaatatttggtt

SEQ ID NO: 18896 - DNA, 4420 bp, Oryza sativa
cacaaaaattattgagcatatctgattaagtgatgtcaaatgtctgtgctatttgttgatttatgaaatataatataaaatagtaagttggttatgcatgagaacatctcaaacaagcattaggtgcgatactgcgaaattttgatgattgaatagggcatgaacaatgtaagcaacggcgccctcaacctcaaggtgaaagagtgtgctacatacaattcaatatacttgatttatttttatttacactttcatccaaaattgcgtgcaactaccactctccatagaaaaaaaataaaaaggttgtatataaaataaactagtttaaaaaagatgggcaaaacctttgatgtcaatcagattcatgtcgaggtcatgctgaagttgaagttatcatcgagaatccatggcatgcttcctatacattaatatgatctgccattttactgcagtctcagatgaaccatgatatggtttcctgtttctgtcatgtcatttttcttgttgtaaatggcctcatgtgtgggttcataccataccacaaagtgctcaccttgattcttttcctagctgtttaccttttgtagtagatttcctgatgatacttcaacggagcaaaaccacttttcttaattgttgcaaaatcacttctcttaattgtttagacccatttccaatctatgcaattgattataattctcatgtttgaacctgctcttggatgcaaataatacttagtacacagctgtactcatttggaacgtcaagattttaattgtgtggcatgttttgtatccctatctcagagagttgccgtagctgtacattgtgggattcgatctgcatgtgttcggttgcattgccataccatgtttcatccatgcatgattccatgtcaaatgacattcatgcgcttagccgcaaaaattagctagacagcttatcttattaggcgatgccaaatgtcagtgctatttgttgatttatgaaagaaaaatagttaagtttgttatgcatgagaacctctgaaacaagctttacgtaggaaactttgatgaaacggcactgcacggaatatgtcgtatccgcgcatgtgagttcaatggaactcaaagtctacaattgtgtgtgttggacgcatacgcgggtgtgtgcgtgtggtgttgtgtgaacttagaataagttcgtgtgcgtacttagttgtaccttcataaaaaagtaaaatgtaaaatactgttgttttgatacatggtatatgcgattagagcaagtttaatgaaagcgccggctactgtctccaaaacaaccaaattggcctagttagtatagctagtgccaaaagcggaccactatataatcggctctctacgcatttttcactgatagcttttcttttttctaacctcagctttcacggtataacctgttggagcatgcgtgcatgcatttttatctctcatcttcttttcctgcctttttttttttgccctttggggagacaaatctttccgtttcacttcccccttgggccatttgataaagtcatccttccatccaatatccatatatgatttgattcccatggtcatggtgggctgctggctgctgctatgctagtgatcgatgggtgagttgcaggtgagctcagcgcacagcgccgtggactcgctcctggggcggctgatccggatcctggaggacgaggcgaggctgctcggcggcgtccgcggcgacgtgcagttcatcaaggacgagatggagagcatcaacggcttcctcctccacgtcctccacctcgaccgccccgaccaccagctccaggggtggaccaggcaggtcaaggacctcgcccgcgactgcgacaactgcgtcgacgtctacatgcagcgcctcgccggcgccggctccggcggcagcgcgcggcggctcctcaggtaggggtgcaagtgggtttgtccgtgaactcgcttataggaaaaaaaaagtgcgtaacccacggattcgatttacgggttaaatattaatttaacttataaatgggtttatggatggatccacctctatatttagatacggcaagccgggttacaacgagaaacgaaatcactagttagcgtgtgcgcgctgccggcgcgcgttttatgcctagaaggcccagcgccggcgcgcgcgcctctccacgcttttttttttcgtttttttcgtttttttttcctcgctttttttctgacttttttttatcttttaacatgttttgagtttaaaagtttttaaattttgagtagaaagttttcaaatctcgagttgaaagttttcgaatctcaatttgaaaattttcaattttttcaaatctggatttgaaagttttcgaatctcgagttgaaagttttcaaatctcaaattgaaagttttcaaaattttcaaatctggacttaaaagtttttgaatctcgattctttagttgaaagttttcaaatctgagttgaaagtttttaaatttcaagttgaaagtttttaaaatttgactataaaatttaaaacttaaatcgaaagttttcaaatctaacttaaaaatttttcaatctgtcagtaaaaaaatctcgagaatattttcttaattattatcattagtgtcagtatattaataaataatataggtagttaaactaaaagggagaaagtgctcgccaactctttttcttgcgcgcgctagcaatcccccgcgagaaaacccataaattattttttatttgaccttagcacccctatcgtcaggctcctcacgctgccggcacgccgccgcatcgccacgcggatccgggagctcaaatcgcgcgcctgcgacggtcggggagcggcggcgcaggtacggcgtcgtcgtccccagaaccagaaacaatgccgccgccgccgccgccgcccgtcgcggcggccaacgtgggctggcgaagaggcagctgtcggaggctggcggcggcgaccaccatgccgacgcctcctccgccggcaacaccaccaagcaagatcaccggaggcgcgcgctgctggaggaggagacacccgcgaaccttttcgcaggtgaaaccgacacgctggtcggctggctgctggctgccgccgacgagcaccgacggccaaaagtgatatcaatcatacgacctgatgacgaggagctcgtcgcagctgccattgatcctgtaaagcgagcgttggatgatccgcgcatacttgaattgttccaaatcaggcagtggcacagcggccaatctcatcccggctgggtttaccaagacatgatgacacaaatactccctatgattcagcacatgcatcgggcgctgggagggatggtatccgattacgacaagaggaacaagaggagatatacgcggctgaagaagaaaaagaagagaattgtggtctcaaatttttcgagaaaaaatctgggctcaaaggggaacaaatttcctgtaggaacgacgtttgacgaggtgaaggaatttatcggtggaacagcatccgacaaggatgaggaggaggaggaggaagagggatttctacaagcagcggcaatggaagttcatgaaagatttgcaatggacgttgccaagattatttcagaaacgatggcatccgagatgggatttcatcaaggaatgacatttcaggagatgatggagactttcatgaaagataagagctacctaattgttcttgatgatgttcctgatgaatcgctatggcgtggcatcgaatcagctttccccggcaacacggctcacagtgccatcctgctgacaacccggtcacctgccgtagcctactcctgttcaccacatgacagagtcttccctcctctggatcatctcatcgacttcttccatgccaaggctgtctccctggttgaaaactatcccagcaacggtaacctggatgaagtgattagatccatactgtcaaaatgtgcctccaactccactgacatgtgcatcagagcattcctccatgtcctttatgccaatcctaacaggaacagggaagaacttcagggcttgtgtgatagcctgcatgattcacatggtttaatgctggatgaaaacatgcagcaaatcctgatgttctggtacaacgacctgcctgtccattacaagagctgcttgacgtatctctctctatttatccaagatgatggaagcagtagcaacagtactatgatgatcaggagaacaagcttagtcagaagatgggctgctgagagcataaacacagaacgaaacgggcagacagcgctggatgaagccgagcgatgctttggtgtgctcttagcaaaaagatttgttcttgagagagacatcggcgcttctgggaagatcaagagctgtgcagtgaatggcttgatctcaaagttcatcaccaaggt

SEQ ID NO: 18897 - DNA, 697 bp, Oryza sativa
  unsure (1)..(697): unsure at all n locations
tatcaggcacacatttggcctcataccaacaacttttgttttaaccaatttcaggaaccagtaccagctgtcggtattctcactctcaacaaaagcaaatgccaagggcaatacctgattgatcccatctacccctattgctgttagtatctggccccgatactttcctgtcaagaatgtcccatcaatgcagagaacaggacgacagttcacgaatgccatcttgcatgcatgtagagctaagaacgccctnncgagcacactcttgctaggatgttcaattgaggggaatttcttcaattcgtaagagctcccagggtttctttcctcgataacaccaagcaggcgtggcaaattgtcatacgaggcttcgtaagttccaaatctcatctctattattttctgttgggcccttcaagccttggcataactaatagtatacttgtatgtctcttcgatgtgtcggattattgaccttggttcatatgtgagattgtcgatgacatgcgcatacatctcagatgcaacaaatgcacaagtaatgttcctgtggtatttctgaacaccagatagaaaacatgtatgcttggtaacgactgacactgtccaataatccttccatttccccttatacgcgtgcactctccagggacaaccatctttttccttaatacactgaacttcatattgcgaccgg

SEQ ID NO: 18898 - DNA, 6515 bp, Oryza sativa
acttgatgcaatgtacttatacggttttggagtttccgtattgatattagtgtactccacaaagatggtgatttttttccttttcccgcagacatccaaatccgtcctcgttttcatatgaacggcatcttttcttccctttctagtatgccttccagccacctgcttggtataaacttgaacatgtagcattggtgaaacccgagtttctgagctcaggaaatatcatggacgacagtgtcttattgttcttggaaaccatgataagtgttactcattgctaattttgtgcagtcccatcatggtttacaacgttttcttaccatgtattccttgccatttgctgacatgttttatttgttatgctaatgatgttttggcatggaatttcccacgatatttcaaagacactactgcgggttgatctatcaaaaaataggactgataaaatcataattgttttgagcagattggttcactgcacacattcatgaggtatatatgtcataaaagttggctgggtgagtgatttctacctcagaagatcatgaattatttagccttaaagcttcctgattggtggtgggtttttggccttgatcaagcacttcatgttgacattgatatctggagttcaagtctttttcagagcgtcagaagaaggtaattacattgtgccatcttttaaggtgttagcaaattaattttgtggcctatgctatggtgtacatttctgaatttgatgattcagttcttctggagaaaatgtaatttgattccagtacaccagcaacattactctacacattgttgtcatgagcaaaaagttgtgcaaaattccatgtgaagtttgctgcgtggggatttttcttagtgactgatactagtgagttttgcaggttgaacaacaagaagtgaagaggtttgtcactacgatggtgctgttctgcccttttggcaagaagttggaagagtggtgtcttcaggacatcctttgttgcttttttggtgttccttctgcagtcctggaactgatatttatatgtgcccacaattggtgataaatgacactacttatctagataaagagtcctgttgttagctccacaatctctttagctaaagagacaagaatgctatagtagtatgaaactgtcaagtttctcgctttactgttgttttgtggctgtaccacgaagactcttgtgtacaagcagaaactccaaaagtttcttgcactagaacatctgggagaacaagaacacccaaagggagaaggctttaaactgagaagtagccaaacctctactcgcactccggaaggctacatccagtcaccattttgcagcctcagaaatggcatccatcaaagtcgaaaccgcagaagaagctatggtacgggacaacggacttgatgtcgttcaaggcattggtgctgaaaccacgggccctgaacaactcttgcatctttctcgaacctggctgaaggcagaacatccgaccaaccctggccatatggagaaaaatggcgccgccatggtgagcgaagccgacgaggcgaggtggactgaaaagctgaatcgacgcgcgtagcgtccatgccatggcaccggcaccggcacctgccgtctccctcacccacacgttcagcacgaggtcatcagtagatgcgaatcctagcccacccccctccgccgccatcagcagcgcggcgcgtcgagcgtatctccgggctcggtgcggcggcggcggcgactccagcacagtcaacttctcctcgtccatgtcatactctagtggggaggaaaagcttccttcccacaaggacgcaggccttggtatcaatctgatccttctccttgtgcagaatctcatcgctccagccatcggtgtaggaagagtacatcctgagagagctgtaggagtccatcgtgcgagtgcatgcggcgacgaccagaaatggtcccccgtggcagtgaagatgatcgttatggcactccaaaaggccacacatcacggccgccgtccagtactgcgtctcgacggggaagggaaatccatcgatccactgctcctcttcttcttcttcttccaccattggatcccagactacgaatcgctcctcctcgtcggagcaaaccctcacgtagaagaggaccaggccgtgtcggctgtcaaccgctgatgcgaggtcgtatatgtcgggactcgccctgaatgttgtcgtcatgtggacgaatcttgcgatctccattggctttccgggttcatcctcgttgatgaagtagccaagcataggaggtggatcatggaacttgcggaggaggcggatgaagcaggggtcgccgaggatcgcatgccattgcttgcaaaccagctggagtcgggcgaacagggctgggtcctccggtggggggcgaaggagaatctcggtcaccatatcttcattgagcacatcgacgagtccgcagcggctgcttgaggccgtggtgttgatgatggcgtcgccggcggagctcaagttgaggccgtcacttgggagctcatcatgagcattgccgaccggagagaggtcgacgatgtccttgtcgccaccgccggccacggcgtctgacccgaacctccacccgccgaacaagctggggctctcaatccacggaatccacgacggcggcggctcgtatggcgtcgccttgccggtgaggccatcgtgatcgaggacgccgtggccgttggggaaggggacgatgtagctgccgcctaaaacactagatcaccggcatacctagcgtttaagatttgtaaacaaagataataggagccgaagtcaatcccttaaaacactcctccccgaacctcctcctgtatctactattggttgactgaaaataaaccaaaagcaagggtggttgcacatcttctgaaaagaaaagggctcggtatcgagtcatctactaaaaaggaccctccccgctgtgcgcccctccttgaattattcggtcatgcaatactttttttaatacaaagaacaaaatgcatttcgacctggagccggcctcctcctgatcctggacgaggcggccaccgatcccgctgctctcggcgagggaggtggaggtcgtcgtcgtccccgccgccgccagcaccagcgccgcgccgggaccggtggtcatcatgttgccgacaatggcggtgcccccgctgtcggagtcggcggtgtcgccgccgattaggccatcgatgggccgtggctcgaacggggtggggaggtggcgggggccgttgggatcagccatcgtcgcgaggcgtgatttgaaaggggcgaggcgtggtttggtggtgggggagagaaggtctcagagagagcaaggggcccgtcttaaatagacgggaggtaacttgctcggtaagccagcctccaccgccgttgctggctgccgtgctcggcctcggcgatgagaagcttgaagctttttctcgccgatgccaacggccatgtggcgattaaacaggaaggtgactcgccgagtgctcttctcggtttattgggccagaggcttttcggcccaacagaagtgtggaccttttgtacttgtgaaaaagtttaccctttgatccttatcccttaaccgtaaaaccatgcaggttttaaggacgattttcgctgacatggcatccatgcagcaatctaattatcagataattaagaaaatagagtggacctgtttgtaagtgactcccctcttctctcatctatcctctccaatccgcattcttctcgacgtcctgtaggtcctacgctggcgtcagccatcttgcgatgcgccacccacgtgtccttgtcgaagtttaagataatcgagcacactatcacagaagaggaattgaacacacagtagaaatctactctagcaattaaacgtgtaatcaaaatctgctcctgcaaccgaacgtgcagtcgaaacctgctcctgcaatcgaacacggcaagagggcgatcatggacttcattgctgtcaagaataggagggagagaggccccatgggaggatggatagagggaggaagaaagagtgagagtgtggatgacacacatgtttcaggccactgacatgtgggcaccacataatattccttgatgacatagcatttttaaccatgtcaacgtaccacgtcaccaataccactatcaatactatcttatgaatcattttgtaccggttttaatagttgaggtattcgttatatccggttttatggttgagggatatgaattagattgacctataatttaagggagccaaattggaatttttagttttactctcaacaaaatgagacccacaattagattaccggaaataaaagggccagctatcaaaaacttcaaagcaattacaaatcgggcgcccgatttgtttctcaaaaattgggcgttgtttcatttaggggtgaaaacggagcggattcggacgataatggtcataccatatcctaaaccatatattttaagcgggtgcggatagtgtacggatgcggatacggagcagattgtttcggatgtcgaaaatggtgcggaatcagttcggtaacggattaaatttatcggatgttacgtgtgtacgcaatcgatacaacatcgagttagcaatgcaaggaacaataatacaataatcaataaacgacccatcgtaataattatgtgcttaagtgttaatcaacatgaatatatgatgcccataatataaaagtacagctacgacagtgtgacatgagacagtgaaagcctcagactaagaaatctaggttaactgatgaattaggcaattggatgaaccaacttatgtaagatgcaatagatagagtggttacatgtgttgataatttcggattatctggcaaacagcctatcggataatctgatagaaatgtcggataatccgtattcgctggattttagagataccatatcctcatccgtatccgcattgtactatccgcatccgcatccatatccgccatatttctaaagcacataccatatcctcatttcggacggattcggagcggaacgaatcgatccgttttcacccctagttccactagtcgaataaaaatgtttcacctattagatcgaaaatgtttcaatcccttaaaatgttgaaacacatttgaaataagactgaatcattttggtgcaacatatgaacatcgaatatccccctactgaaacaccaacaaataaatatcaaccaaggacaaagatatgaaacaccatcaaaatcccatcgcaacatttcaatccaatacaaaagaacatcaaattacaatatataaacaacagtttcaaatatattgaaacatgaaacacatctgagtatatcaaaaaaataatgaaacaccatcgaaaaacccattgcatcatttcaatctggctaatgaaacataatggtgcatgggctgaaacatcaaaaaattcaagagaaaaacctagatctatctcttcctccgctctagtggttagctaccacatgaactgggatgctgtcacgcccagaaatttagctcaaatttccagactattttatgtattaaatccctgtccaggatcaggcagggtacataaaacgacaagtaatatacagttccaaatgcaaataaaagcgtaaatacttacagaagagacacttaatcctcacaccgaaacgaaagcaacagcagcggaaaaaggcgatcctagcggggcttcagctccactccataggcaaaactcaattggggtctgagccttggtcttctaacttcgtcttcagctcagaagcactacacttctgaaaagggggaataatagcaaggctgagtacaaccaccgtactcagcaagccacaccaacgatgcagacgtgcaagaggaacacaaggacggtttgtggctattgcataaaggcggttgtaaaacattttattgagcaaaacagtaaaattgttgagtaattaaagtaacattaaatctcaactgatcaacgctacaccacgttgaacaggcccaatgtggacccccgtttttataacaggaatcaatcgtgtaacagtaccatttccctggatcaagtagtctggtacatacgagttcatagctgaaataccaaatacacatacacgagagtctagtgcgaattattacatcataagcccgcaggcatagtcttagatcatcggactgagcggtccggaatacattccaaaagcagaagtagataaggcagcggagttaaggcagcggcacgccattgccacaggcaacgaccgtaactaagacctactgagcgccatcgtcttcatcaccctcctggtaatagtcatagggatcctccgaagcttcatctccggcctctgattaagtttatatattgcaagggtgagtaccaaccgtactcatcaagccaccacagcaacaatgcacatgataggggtattcaaaggatggctatggttcttttgcgcaaagtaagtttt

SEQ ID NO: 18899 - DNA, 4071 bp, Oryza sativa
  unsure (1)..(4071): unsure at all n locations
cattaaaagtaaacaaacatgtagagcttaattttatatgaattttgcaagttgagtggcccaattcagagttcgaatgaattagatatgaattttagaagttttgagccatttaaatgaatttctagaattattatttatttattgcgcaattataaattattttctcagaggaaaagggggatgctgacgtcatcaaaggggccggcgctgacaggcgggccccatgcgtcagcgggccaaggggagggtgcacggtggaccacgtccaccgcggcctcgggcgcgccgtggaccaggaccacgccggcccacgggcggccacagggcaaggcgggcgcggccgagaccggccggccgagcggcgacggcggcctagccggatggccaccggcggcggcggcgcaacgcgggcgaccagcgaaggggagatagagggagagggagggatgctcaccaagctcgcgcaacggcgaggagacaacgggaacgcggcggcgatggactcctcggggaggcacggcaacggcgggactccggcgacgtccggcgaaggaggagcggctggggcacaacacagtctgggagagaggatagaggggttaggaagggaggaggaggcgcggtaccgaggggaattgcggccggaggcggcaatggcggaggtggctcgggtacgtggtgaaggggtggtttcggtggtggcgaggagaaaggaagcggtggccgggcttgggattgctgcggtgaagccggtggtgacggtgacacagtgcggcggcggttccagccacggggaacgacggccggagctcgcaaaggcgatggcggctcgggttgacagagggcagggcggctcggtgggggattggaggaacgagacggtggccggtgctcggcttggagcggtgaagccgatggcgcaagcggagcgccgcggcgacggccaggncgccggtggcgcgcagccggagtcggtggaggcggtggagagaggtggtgcgcgtggcggcggtgcttcggagacggggaggggaaatggagcggatgccggggtgcggtggggcgctgcgatgctataggtggcagcggcgcagtgcgggggcgacggaagcggcgacggcgcgcggctggagggtcgccggcgtgcggcggcgcacgggaacggcgtggggagctcgagagagcacgcgggagggggcgatgagttggggaaacggatgaggggaggccggggtgcatttttataggccccggagagggagatcgtggccgaggtgggcggcaaccgccggcggagggagctccggcgacgtgggcgagtgaggctcgaacggcgccgatttttggggaaaataggggagaacgtggaggaaggggaggacgtggggtggaccacgtccacacgcgcgcgggagcggggagacgcgcggaggaggcggcgtcgtggggcggctcgggcgtccatggcggcggttggagccggaggaaggggatgggcctgacgggtggggccgtgggtcccacctatcagccaaaggaagagaggggaagccgggtgggggttttctggactttgggggagaggggagccgagctggccgagcggcccaaagaggagaggggagggaggcggcccggccggaggggaaaggaggaaggaggggaatgggccgaaagcggcccaaagggagaagagggaattttatttgcttttctttttaattaattgattacatgatctttgtgctattaaaattattttttgagctccgaaaattcatgcgaaaatttcggagaatatttagggcacaaagagtattgcaaaatattctcggccaatgatttttaaaggaaaaattttaaattctcccattatttcacttgattgaattgacttaacttttatttaatttctaaaaaatatattatttaatgatttttaatcccgaaagaaaatcggggcgttacagatgccgctgtggatgaggaggtggcaccgacgtaccctagaatcactaccacgtgctcatgtggcaaatctgcaccgtggtcgtcgatgcagaccaagctcagccacaaccgcgtggctgccgttgtcgatgccgtgccgagctcggccatgtcagccacaactgcgccgccgccatcgtcaacgccgcgaagctcggccgcgtccatagaagagggagcgagagaagcgaggaagagggagagcgagataagaaacgagtggctgagaatgaggagcgcccgatatttttatttttatcgggcactcaggtaggaactttttcccataaacctgttttgggctgaaagcccatatgtgttttgcaggaaaaatagtactctattttctgggggaaaaagtacaccgaaggtccctcaacttgtcatcgagttacaaaatcgtcccgcaaaaccagttatccagcgtccctcatctatcaaaaccggttacaataggtccttcggtgtgtttgaccccggttttgacttacgtgacggctgagtcagcgtgggacctacgtgggccccacatgtcatgctgccacatcaccctcctctctctctcttttcccctcttatctcccttcctcatctctctctctcccttctctgacagccgccggtgggaggatgagggtgtcggcggccggcgaggggcgacgcggcggcagtgatgacggcgacgagcgacgcggcggcgatgggggagaaactgcaagtgggcggcgaggaggagcggcgcgcgggcggcgaggatcagcgcgcgggctcccccgccagccgccgcccaccgcccacgaggcccacgaggcagaggaggaggcggcgagcggcacggcggcgacgacacggcaaattacagaggatatcaccaaggtccatataaacaagataatcaccaggcaaattactgctgctgctgctacttcaccatttgtgcatttcctcttctactatcttagctgcagctcgcacgctttgagtacgtgcattgttcaactgccatttctctcctcaattcaaaaaaaatatattcacctttttctcattcgagctaaaccatttcgatcaatggaattcggacgatctccagcccttctactcctcgttggtaagtccgagaaactttcaggccggttaactttaggctgttagcacacatcttcttcattcttcaacaatggcgtgtctcaatgcagggttcctatggtcacagctgcagttcggcgctgaggcagccggcacgacggtcttcacgctgtgcaacaactgcacctacaccgtctggccgaccaccttgtccggaaacacagcggtcgggggccatcgggggcggcgacttcaagctatcgcccggcgccaacgtctcattcccagccccggatggttggtccgaccgcttatgggcgcgcacggactgtgcaccctccggcaccgcgtcccttgcctgcgccacggggtacttcggcggcgccgtgagctgctccctcggcggcgcgccgcccgtcaccctcgccgagttcacgctgggcggcgccgacgggaaggacttctacgacgtgagcctcgtgggcggcggccgacgggggagtccgcgcgccgctcctccccccgccgcacgcgctctgctcctcgccgcccctccccgccgcccacccgcagcttctccccccaccgctgccgcgtcgcccctcgccggccgccaacgccctcctcctcccgccggctgagtcagagaagggagagagagatgaggagagagacaagagtggaaaagagagggagagaggaggctgatgtggcagcttgacatgtggggcccacgtgggtcccacgctgactcagctaccatctaggacaaaaccagggtcaaaactaccaaaagacctattgtagttttaatagttgagggaccttcagtgtactttttccattttctgggtcactcagcgagaatgaaagcccacctaattggtcaggctggtctctttcctttcatccgatcagtcacgcggccgttgccaacttgccgtccacgagagcaagcaaagcaacttc

SEQ ID NO: 18900 - DNA, 843 bp, Oryza sativa
tccacaactggctatgtaaagaccaatgcatgtagcccataatgagtagacacgtgaaatatcattggaacatcaggatccattagaagctaactggatcaaacataaaagataggaattaactttaaaaaaaacagcaatagaaacgcaaaaggtgaagcgtactaacttctccataaattgcccgttcagatagaagagggtaatcactagcagagacaaaccaggatgaacaaatctgctctttaaacttatgcatacgtgatagctttgaaataagtgaattgtcctcatgtttttttttcccacagagagaacacaatccagctagcagttctacgattaatagatttatctcttgagacgacgtcttgttaccacagcgggtcagtggctgtaaagtacagagcaagctatactttaacctgcaacaaggcacaaaatgcagaaacatggataagggacagctgaaaaggtaactaaacaagattaggtgaaaatacagaacactcatataattattgataccaagaaacttactgcacaatcttggattataataagcatatctgacttttcctctgccatacgagaaacaaggccaggataccacgggccaaaaaatatgacatggaatacgatcaagaaaattagagaggagatataaatgttgaggaaaagagaaaggctcatccgtaaatccaaccccattgactgaaaactggggagatggtgatattgctgccaagaatatccaagcagtatacctgtatcagagaacagttttagagaacaaatatatcatgtttacttaatttacctgctcccagactcacagaggtc

SEQ ID NO: 18901 - DNA, 559 bp, Oryza sativa
tctcttctcctcttgatacagcatgcttctcctctgaatcctttctatgccttccttttttctctaaattgaggcctcatcaacatagatattttcgctgctcaactgtcatggcttcaaggctgcatcacgaaaggatctgaaagtgagaactatcatgccatggtcgttgtgagctgcaattcaggctgatttggattttaatttggctggcaattggtgcttgtaaatttctgaaatcagaagagcccgcacatagcatccctgagttatttgggcctgcttgatgattgccgtttgccaacgagatgggaatcgtgttgattgaagctgtagctgatatgcatttcagcacatttcgttagtcatttcaaatttgtcaccggtgagcatgttggcctgcttgcaccaagcatggacagttgctgccttcttgaatggtgcagcgctagcatcgtggcagagcagtcgtgaccatagttattgagaccggaccggtcattaaaccggcgatgccctcggttcaatggtttgttggttcaaccagttgaaccactgg

SEQ ID NO: 18902 - DNA, 1255 bp, Oryza sativa
cgaaaggcgtcagctcttgcagcatccggtacgccggcgacgaccagttggccgccggcggcgacggcgacgacgccggcgtggccgcacaggagatccggagcttgaggcatcgggcgaagtagtaggccaggtgatcacccgggcttgttgcttcacagcttcttctgccggcgatgtcggcgaggaggtcgtcaagcctcgacatgatcgccgaggcgtggacagcgtctccggcgtccacggccatggcgccggcgaggagaaggtcacctgcgctctcctcctgggttgccaccacgttgccgttctcgtgccctgccactgctaatctctcatcaaattcaaagctagctgctaatggatcagcattggggacagagaaatcatcttgcagttgcagcaaatcattagcagattcttggattgccatcatttccaagaactcatgatcttgatgaatctgatcgtgagagtgatcaccatcaaattcattagcagattcttggatcaccatcgtttccaagaactcatgatcttgatgaatctgatcatgagagtgatcaccatcaaattcattagcagattcttggatgaccatcatgtccaagaactgatgatcttgatgaatctgatcatgagagtgatcagcatcaaattcatacatattggcattctcatgaggattttcttctgcttgaggagaccataggaggaggctactgctactgatctcttcaaattgtgtggagaagggaatgagaagggagcaagggtatgacatggtctccattgatttgttttgtgatttgagctgttaactcaacatgaattgcatatgctctggtttatgtggttttacacagtttatgtagacaaggatgaagcgggtgttaggaccatttctgaagataggagtgaaataaatttatatgtgtggacctaggatcttcatggctaatgtaagctgatttgtctgatcttgaagccccaaatgggacattcatatgacaaaggttctttttttgttgcctttttgtgtagttccctctaccaactttgtaagatatgtgagcaagcaatcgtgccaatttttctgattgattagaatgaagtagcagaggaagtgagcgtgtgcatgccaggcaatattcctgaatgcttgttgctagatgtcagcatgtggtttagttttgaatcatatgagcaaaacgatttatgcatgattctacaacctgtggacaacggggtgcag

SEQ ID NO: 18903 - DNA, 730 bp, Oryza sativa
cgttgatttccctttcacatggtctctctcatcgtgcacacagccataatcatgatcgcaatcatcaactagagaagtcgagaaacaaaggcgtttaccgatagcatggatggtgttgtgtggcgaaccgcagcatgcagcggtaatggaatcaccaggcccgttgttagtagcacaagaagagcatgatgaagagaatcccaacagcttgccagccgctttggccgtgtggtgagcgttgaggaagaggtcgctgacgcagcccttggcgtgctcagcagcggcctcggaggtgtcatcgagctcgtcctggatgcggaagtagtcgagctcgtcgagcacgtcgtcggcattgtacgctaagtcccgcagcttctgcaggagctcgttgaggtcggtgttgtggatctccctaccgcgaacgttgttgagcatggcccgcgcgtagagcagctccatcttgagggcatccacattgggcccgagcttctgactggccgcccacgcctccaccaagccgtctaacacagggttcaacgccttgcccaccacccaccgtgccacgatgatcccggtatccattgatcgatcgcgtggttgtggatgctggtggtttcaaggcaagatagatgtatagaagtagtagatgcagctgcctgcaataagaggaaggaatccatgcaattgatcagccactcgatagtgtcatactagtgcttaattgtactac

SEQ ID NO: 18904 - DNA, 1021 bp, Oryza sativa
attagagttttttctcgttttacgtgcgagcgtgtagctctcgtcgtttcggaagatcgctttcatgaggatcagagttcggaaggttgttgtgaagaagcaaggcaagtcactgtaacatcccggcctagggcttaataggattaatagaatacttatatcaacaagttgcaacttcttttccggaagccaatctccaaagaacttcagggttaagcgtgcttggcctggagcaatttgggatgggtgaccgaccgggaaattcttctcgggtgcacacgagtgaggacaaagtgtgtagaaaagacatgtgttggcctgtgagggcagtctatgacctatgaaagctatcagatgtaagcgggcccggcctgggggaaggcgggacgttacaaaatggtatcagagccgactctcgcggtttcacgggcgcgtgtgtcgcagttggacacatggacgtggccaagagaggacgttcctggcctagggttgatcgacgggggcgtcgatctctcttaagggggtgagggtgtaacatcccggcctagggcttaataggattaatagaatacttatatcaacaagttgcaacttcttttccggaagccaatctccaaagaactccagggttaagcgtgcttggcctggtgcaatttgggatgggtgaccgaccgggaagaattattcttcccgggtgcacacgagtgaggacaaagtgtgcagaaaagacatgtgttggtctgtgagggcagtctatgacctatgaaagctatcagatgtaagtgggcccggcctgggggaaggcgggacgttacagtcacacattcccagaattttgatcctaatttacaaatgttttatcgtttgcaaataaaattgcatgtcttgctaattacatgggatctgggtattacctatctgtttgcttgtgccatatttacttgatatctgtcctttgtcaaccttgggtaataaatcgactagctcatgttacgacctatgaaagctatcatatgtaagt

SEQ ID NO: 18905 - DNA, 2114 bp, Oryza sativa
cctgcattatgtcattataacctgtgtcttctgcagctttgagacactgtcaagatcatcataattgagagactcaaggtcaagcatatcttcaccgccatcctcatccatacccactgcctcagcattttcttcttcctgaaaattttgacgataaatgaacaagctctcaagagtatcgcttattaaatctagttgcatggcagaaatagaaataaactcacaggataggcttcattgtctgacagttcatcaagatctgctaagaaagaatcagcaaggcttgcctgcgaagtggcaccaatcagaaaaaaaaaaggcgaacaagtgaccacggaagaaaagaacttgcaaaccttaaacagaatatggatttagcacaagctactatcaagcagttagaatgtactcaccatgataactcctgctccaacttattgaggaggatcagtacacctgattcatagtggttatgtagtcagtggcactgtgcaaataaaaagaaagatgtagtaagcggtattactaccaaactattattgtagaatgaacattggccactataaatattagtgtaagcaaagttttgtgacacattttctaatttacaacacggcactccaaacagtaaagcttttttgggcagagaaatacgaagtacataattaaacacttaattaaccctttgttcttcggtttatcgatttggtctgcaatgcggtttcgccaaaattcagcccttcggcaatcctaaaattatgcacatctagcaaggggaggcaccgaggcaggcatgagatgtccaaccgaggattttaaaaaaaaaatagttaagaaactataccgctatacttcgcataaaataaatccgctaaaaactgattggtttcgagaatccgtaccataaacgaggcccgattagatttatcacagcaaaataatccaaacagagtaggctagggttcgtcaccaacgacaggaacaaatccatccgactcccaacggatctcaattccacacccgcccagcataagcaaggtagaaccgaaccttcgtctgcgtcgattgatcgcctctccgccgccgccgctgccgccgcagccgcgccgccccgtagcgaggatgagaaggagaaggaagaggacgttgtgtcgcggcaaaggtatgtttggtcttttctgaggttgttccgcaaaagtgcatcatgcgcaatatacacgaaggggcctttctgaaaatttaccaatgggcttgagaaatccatgggcccacattaattgggccgaatgagaattgggctcgcgtcaagaccacaatagattgtggttgccctcgccatcgccggcgaactcgctcgcccacctccacctgtgccgccggcggcgccggctctccctcccgccgccggcatcttcgcgctcctccgttctcggtccccgtcagcttggttcgcagcggtgtgcggtggcgtgaggacggggagcggtttctcgcggggcccaacggtgcctccggcggcggcaacgagtccttcctcttccaggtgtgtttatctgggacttaggatgcatgaaagattgtcttctgtttgatttgcggcgcagcagacgatgagagaccctcgcctcctggatcctggtagaagtgaatactgttagtatacctgaacaagaataggggtagagtgtggatagtactagtacggagttattatgttgattaatgggttagaaacttagaatgctgagttctgtttttgctcggattcatatagtcttcattcttcaaccttctagtatcatgtcatgtcaaaatggtaaacttgttcttttgttttaatgtgaatagcttacattacaacattatcggggaaaagggtgggaaatgttgtaagcagaagctttgctttcccttttttttttcctatcgccacttatttcagcttgtgagtggtcgtgttctaggtgtggttaaatcgtgagaaacgctcaagggtttttttggctagctccacaaggtggtgggctagccggcctgggtttgaagcctcacccttctatttatttaatattaggtcattccctaatatttgcgttttaggtgtggtcaaatcg

SEQ ID NO: 18906 - DNA, 4236 bp, Oryza sativa
  unsure (1)..(4236): unsure at all n locations
tcctgcagcccgattttgtcgatgaggaatcaggaagtgatactgatgaacaagccacagaagatgacttggaaatcatggaaccaaaggaagggatggcatttgccagtgtgaatgatgcttttgtgttctatgagagatatgctcagaagaagggattttctataacaaggagaatctcaagcactttccaatccttcaccttcgcttgcagaagacaagacaacgctcaatgctcctcaaacaatgcatggaagcatcatcagaatgaatgtccagctaagataattgtggatcttgatggtcctgacgacaaattcttcttatcttcagttacgcttgagcacaatcacgatctcagtccaagtgaaacaagtcgaatggaagttttcatatgtaacaaaaaactgattcgtgtgctaaaagaagaagggtgtcaaatgggagagcagacaatcatgccaacaagaagtccagtactccttgcttgcaagctgaaaatcgcccatttggtcaaaaggatcccatgaacaatttgcaattggaaagaaaactgaagctcagtgatgcatataggctttatcattacttcttctgcatgcagttcaagaatcctagctttttctatgctttggactttggcaaggactcctgcctgagaaatgttttctgggcagatgcaagaagtagggcttcatgtaaatatttctcggatgtcgtgacagttgacactacatacttaatgaacaaggagagcatccctcttgttccttttgttggtgtaaatcatcacaggcagccgattttgttgggatgtggactactatcagatgagaccactgtgacctttctatagctgttcaaatcctggctagctatgtcaaataagccaccagaagtcataattactgatcagtgcgatgcgattcaggatgctatcgagaaagtttttccacaaacttgtcatatatggcgtttacagtctgtcatgaagaagatgcctgaaaatctcagtggattctcaggatttcaaagcattgaaaatgctttttcaactgtggtacataattcattgacacaaactgtttttgaaaacaattggagtaagataattgacaagtttggccttcatggcagaagcgcatggcttaatatgctgttctgtaataggcataaatgggtgcccacttatgtgaaaaataacttttgtgctggtatgttttgcacacaaaatagtgaaagcattggtagtttatttcatggatacatcaattctaccacaacgttggacgagtttctggaccaatataataaaacaattgtgggcattgattgtaaggaaactgatgctaactggaaatcctcacatgaggttgtaccatgtgtcacccattatggcattgagaagaaattccagaaggtttatacaaataaaatgtttgaagaatttcaagagcagctaaaaggtaagatgtactgttatccaactcttctgaaacaggaaggttcggtttacatattcaaggtgacgcaagatgttaaaattagggagcaacaatgtagcttggatttcacagtgtggtgggacagagatgattgtgatggaagatgtaaatgcacatgccgtcatttcgaattccggggaatattgtgtagccacatcattaccgtacttgctctactgaaggtcaaaaaagtaccctccaaatatgtattgcagcgatggagaaaggatatgattcggagacacggtaccattactaactggtcctataatgagatggtcgactcaccggttgcacgaaggtttgatttgttatgcaaatccttctatgaagtggcagagaaggcagtggtatcaaatgaactgctcatgttggtgctggatagtgttgaagaattaaaacggaaggttgatgcacatacagcgcaaaattcatgaaattcaggtctctaatccttcacagagcagaccatgaggtgtgatgatcatgaagctccctttctcctgacacgaacaaccgacattttcagcgtccccatgtaagatatctttcttctagctgaaacatttcgaggggtaatgaaactactgatttcaatctgtaatctcggtgattgatatgtgtgaaattattgatgtgaagttacgttctgaaaatgcgttcccttataaacccacctttaaagcatgattattgttttctacatacttatcatggcttagcagtcaactatccagctggttgcaaaagaactactaccagtagtaccaaatggtttggttaatacacgcaaaatacactttggcatctatncttagtttttgctctgaagcatgagttgtttgctacattttggagccatttccagctcattttggggctatttttagcatgggttgtttacagttttaacctcaccaaatttagcttgttcttggattagattctcatatatcagcgagaattcttcactttggacttgcaaatccctcagtttgccggctttggaattccaaagggaaagtcacgatgagatccctcttctacgtgactttcctggccattttgtccataaacgtccattcctctgcatgcttgcgcctcctagctgaaactccattgccggtgatcccaaatggccagccaggagcaccggcgccgccccctccggcgaacattccggtgaacttgccggccaacgtgccaccggagatgccagccaacttgccggccaacgtgccaccggagatgctggccagcttgccggcgaaccttccggccaacgtgccaccggagatggtggccagcttgccggccaacgtgccaccggagacgctgtccaagattccggccaacgtgtcaccggacgtgctagccaacttgccgccggacgtgctggccaagctgccggcgaacgtgtcgccggagatgctggccgacatgccgccggaggtgctggtgaacctcccgccggacgtgcagaagcagctcccggccaacgtcccgccggagaagctggtcgccgagctcgcggcggcggggaagaaccagccggcggtcgccgccgccgcgggcatcccgcagatgcccaagatgccggacttctccggcttgaccgacctgtcgttcccgccgatgccgtcggcgaagatgccgtcgatgccgcacaacatcacgctcttcgggttcgacgtgcagatccccgagttcatcaacaagatggtggatgaagaaaccacttaagcttgatcgagcttggcaatggcgatggcgtcatcattgcctcgagtttttgtgacatggttggtggtgtaagttgcgtgccattgttgtgacctgtacagcttaatttctctgaaaagaagttgtttagatttttggaggaaaattagtatgtgttgtgtgtgggaatatggactatggtttgtggccgtgttgcatctttgctcatttgtgaatctccaaaagtatcaagggattgccatttttctgtatcttactatggttgtgtttagttcaacgcaaagtttggattttggttgaaattggagatgatatgactgaaaagttgtgtgtgtatgacaggttgatgtgatggaaaagaactgaagtttaaatcacagcctataacgacttcttgaattcgttcaagaattttatgacatataatgcgcgctgatgtaataattcgaaatgcaattgcaatagtaatatgaaaaaaaaatcacaaaacgcgcggttccctgtaaataccaatagaagtctatccgtttgaacggcgacacatctaaaatggaagaaaaattacttttatcagcctctggtccatttattttctaaaaaaaaaatctttgttaatcccttatccacttgatgttactgctactcgtcaccagatgtttcataggtccaactaggggaaaaactgtttagatagtttgggacagagatgggatacttgtttcagatgtcttaaaaattactgccagttttgaattttataattaatttataattttttttcattgtttttatattaaaccatggctttcaaatcaggagtaaaactataaaagtattatcttattttttttagaaacataaaataaacgcaagtgctcgcactcacccatacaagcaagttcgaaaaacttagtcggcgagctatgtttacttcgctataattatttgttttcagtcatgtatcttcatcttatacataggagctgga

SEQ ID NO: 18907 - DNA, 3895 bp, Oryza sativa
catgtgttttgcccatgagagaaattgggaaaaaaaataaaaggtgatttgtgattcttttgttgtttctgatatgcaagaacaaagggctggtttggttttgtggcataacttgagcttaccaatttttgtcaatcctaaattttggcaagttttagcatgactaatcttgacaaggaaaagttgtgtttggattgaagtcaaaatagcctaagttaactattgaaatggcctatttttctaggctaagcaaaaatttaacttcaaaccaaatagaaaacactattgaaattgccaaatattagtaaaggctaattcaggccacaaaccaaaccagcccaaagtgtagaaggtggattttggtgacttgaagttgtttccacaggccgctattcagcatgggcctccactcccggatacctgggctgaggcccgtagtggcgaaaaccaaatgggccatggtccatgaattttctgtgggctgggcctccaggcccattagaaggtgtaacagcttcgttccaccatggcgcgcatcggcgcatgcaggaggcgggagggaacgtgcatggcggtgtccctccacgtggatgcaccgtgcgcggcggccgcccgccacgtgggccggtgggccggctcgccacgtcggacgccacccaccgtagcgacgatctcctgctccatgcatataccggacgtgatgatcaactcgatcagttggactaattatctacgtcaaaggcagtcaaagcctgaaaatattcatgaggcagcattatttaatatatattttgttactaattttactttgggtgggtgtttcgttttaggccaccatttaaccattgtttttactttaaatcgggtaattttattttctttaacactttgggtcaccctcaactccttaatttatcaatctaaattcaacttgccatgtgtaaaaaaagatctacaaacagttgaggaagttttattgacgagtataagctgttgtaccattcatatgcttgagaagagagttgagttagtccaaaggctagattacccgatccaaagtgaaaacttgattaaatagtgatccaaagtaaaacaccggcaataaaagatgatccaaagtgaactttactgtggtgtataatatgattcgacaaaatgaagtcaccatgcaattatctaaaagagaacacttgcatgtcgtgaacattcaaaggcacatgtgctatatatatgcttgcgacaactatataattaactatgtgcatatatcttactatattatatatctatacatgcttagacttgcacagacaatccaaagccatgaagccacgtcagagttggacgacacgtgcatcgatccatgtcgtcaagaagaaaaaaacgaaagggagctgctgggtatcaatcaaaaaagaaaaaatcaatgtgctttgatagcttttagctttgcagacactgtacgaaaattccgtagaaaaattcgatcactttgttatcgattcgatcgatcgatccgtcggatctttaaatttccaaccgcacgatgacgatggagaactggagatgattaggtctcctttatactccatttgtttaatactataattcattataacttttttcttgttatacttttttttaatttgattaaatttgtaaaaactagcaacatttataacactaaattagtttcattacactgaatatatttcgataatatgtatgttttttgttagctaaaaatgttactttattttttataaatttggtcaaatctagaaaggttttgctaggaaaaaagtcaaaacaatctataatatgaaatagaggtagtattgacttttacatgatatataattaattttctcttgtaagaatgccatttagggtttgttgttggcgccattgcttttgggaacctttgggagtttattagtggttttttcccaccctccccggcgttaggaggtttacttcttattagctaactttttgtttattttcttgtgttttgatttttttttcttgtccccggtaacggctttctgtttgttgtgttgtgtaactaaacattttctttttttctaatatatcgacgtgtaattgttttgtacattcgccgaaaaaaaacatacgtgagaatgttcactgaaaagaaaaacagatcatgtacgtattgcaagtaccggtttttctcctctaggaacattctcgtcctctcactcccttttaacgtggcatacacgaatgcctctcaaaaataaatcaaaaccaacgatttattttcataaaagaaactaaattaaaaaatcgatcgcagggctccattacttttctcgatcgtcaggcattcgtgtatacgccgtcaattaatagatctccatatatcttcaagaaacaatgcctataaataactagttctacataccacagctcactcaactcgatcgaccatatacatatagaaacactttcttcttcgtcttcctcgatagccaaaatacactgtgcttggagatcatcaatggcgatagcgaagagcgagtgtgagcgccttgcatgggcattgctactggagagcaacctcctcgtcggcaaccgtcgcagcaacggcgacgacgacgacgacgacgtcgatgtggctccagctgcctgatttaattacggatataatatgattattactactgatcatctagactatattatgatgagtataacgatctctacgttaataagttctgcatggtctaagagtactcatctacatgcaaatatgcagcactttcaattagtcctgtaataggtgatcactgtggtgagtgtgcagactgcagaggttttgctgtgtactagctagttagctactcgtactaattattcgatgcatgcctttatctattaattactcctacttacttatgtgatatatatagttggcaataaagaggcatggtatatatgaatatatctggagtgctatatatataatgggaaacttatgtatatatgcgcaataactctaatgtaacacgacgtgtaaacatatggtttgtcaggtatgttaactatatatatatatagagagagagagaaataataatttagacaaaatttcatgctcaactactgtactagctagctagtggagtattatattatacctcttgtgtattaattaaacattagtgtttctgttccgtggaccatatatggtagtgatggattttgggggtttcagtttgttttcttccaatagccttcggaaaaccatatccgagcactttcatggtagatgacctgagtaaaatatatgtactttcttttgccgaattaccctcaattataagtttggaacacatttttttctcccaacaatagcctttggaagacagtatatttccacttgatgtacatgactagaaaatttaaagtgcatgcatgagatgagaggcctttgattgttcagtcatattatttcatttcgcaactgatgagacgatatgatattgacacatgatatgtaattatatatagagctatatctaatagaaaattcattcttaaatcgaagttcctgttcctgtatcaacggtttgctggtttgcaaagatggtatatcaacatgattatatagctatatgttatctaattaatgctacttttaacatatacaagttaataagttatttgtgccataaaatcacacatagaaagctagaatgcctcactacaagtataatattgatcttaagaaaatatatattaggagcctttatgctagacacggttgtacctaataagagaaaacttgtccagccaagctaaattgtcaaataggtcgaatattttgcatcctgcatgaagaaagctgcagaaggggttttcagct

SEQ ID NO: 18908 - DNA, 1136 bp, Oryza sativa
gctaatacccttgctttggccaacaaccaatgtcaagtttgtcaactagtaatcaactaatcttgatcagatcctcctataaattgacgagaaacatgcagtattcaaatcatcaagcagctcctggttttgcagctctagctattgcctagcaagctactagccactgctaatcttgccatggcttccaattcggttctcttcgccacggtactcgccatggccgtcgtgctcaccggcagcagcagctgccaagcggctcgcctcctcgccgacgcaacaccgcctgccgtgccggcggtcaccttgccaccgatgccagccattcctgccatcccggcggcgacactgccgccgattccggcggtgccaaccgtgccgaacgccgcgttgccgcccatgccggccgtgcccaaggtggcactgccgccgatgcccgcggtgccggctgtgcccaccgtccccgcggtggcgctgccgccgatgcccgcggtgcccgctgtgccgacggcgacgttgccgccgatgccggccgtgcccgccgtgccgaacgccgtgctaccgcccattccggccgtgccgaaggtgacgctgccgccgatgccgtcgattccggcggtgcccaaggtgacgctgccgccgatgccatccgtgccgatgccgttcttggcacctcctccttcggcataattaaggacgctgccagtgcttgtatatttagtgggtcatttgatttgattaatcttttggttatgtattaatttcccctgcttgatttgttttctgtgtgtaaatgcatgttgtatacttgtatgcgagttaattttttttgtaatttgttcaagctgtacatggagtgcgcggctataagtatttgtatatggcatttgtttatataagttcattttggttggtttaacttctgttcatatttcataatggttgtattttgttgcatatatatgtcttttggtaacttggatcattaattgtatcaaccgagatgtgtgggccggtattctaagacgaagtacaataaaaatggttcaacacaataaagatgactcaacaggctgtatatagaaaactacatatataagtaaaatcctacatagatttgtactatctataaaaaa

SEQ ID NO: 18909 - DNA, 2376 bp, Oryza sativa
ccgtgccgaaggtggcacttccgccaatgcccgcggtgccggctgtgcctaccgtccccgcggtgaccgtgccgccaatgcccgcggtgcccgctgtgccggcggccacgttgccaccgatgcccgcggtgcctgcagtgccggcggcgagcttgccgccgatgccagccatgcccgccgtgccgaacgccgcgttgccgcccatgccggccgtgccgaaggtgacgctgccgccgatgccgtcgatgccggccgtgcccaaggtgacgctgccgccgatgccatccgtgccaatgccgttcttggcacctcctccttcggcataaggacgctgtcgatgcttacacatttattgggtcatttgatttgatatcaagcttttggttatatatttcctctgcttgatttgttttctgtgagtaaatgtatgttgcatgcgagtttttttttttttggaatttttgttctagccgtgtttgtatatggagtatgcttggctataagtacttgtatgtggcatttgtttataaaagtttcattttggttggttaattttacttgtgttcatatttcagaatggttgtattttgttgcatatgtctgttggtaacttggatcattgtcattgtatggtaaattgaatgtggatgttctaaaagcaagtgcaataaatatgacttggcacggtaaagatggtccgatactccgataggctatagggaggaatacacgcaagcacaatcttatatagagcggtgagaaaagaaaaaggggaatatatactgtagaggactttagatttgtagttggttgtagtttgaaaaaagaggagagatataatattttgtgggtttttattgtctagattttagaagataagatagtagtgggcttggttagggtgaataatgactattgtacaagctagctgctatactgcctataggtgatatggaatttggctatagctaccggttagcttattattattgttgttgttgtatgattgacactagatcgagaaaaggtgcgacaaattaaaccattgcagtgagtgtgacagattttcctgaacagtatgggaattgaacttatcgctgtaaacaaattctcgtaaaattcatacaggccagtgtgaaaattctcatttctgatttcttgttcagatcatggttttaccattttcttcctccatgtcgatgccaaaacaatgatagaagccttcttttcccaataaaatctgactggtacaccataaacagttaatgcgtaataatacagcacattttcgatttttttttcccaatacactatatagaactattatgttacacaagaaaccatatgttaccatatatcgattttttttaaaagagaaaatagctctctatatagtgtatatgtggcgacgggccgggcgtctcataaatcagaggtcatcatgtactcaaagttcacataggctgaactcgcatgcttcagaagataaacagtgtttgaaaaatatataagcaccagctagctggagtcccttttttttaaaaaaaaagatagagattttacatggggtcgaaatttaataaaggattagttatatgacggactgtactacataactttttttaaggttttatatggagaaaacctggccaaccaagttataatatttgtcaaacagaggtccagtattttgcatcatgcagattgcagaatggctttcagctgcaagaaggtaagctaaccaactcattgaaaccaattaacctggcagctgatacacgtactcttgctttggccaacaaccaaatgtcaagttgtcaactaatgaattaatctatttgatcaactcctataaattgctgcgaaagatgcacatctttgcatcaccaagcagctccagttttgcagtgttctaactattgccaagctagctagccactgagatctctcagccatggcttccacttcgggtctcctcgccacggtgctcgccatggccgtcttgctcgccggcagcagcagcagctgccaagcggcgcgccatctcgccgacgcaacacctcccgctgctgtgccggtgcctaccgtgcccgctgtcaccttgccaccgatgccggccattcctgccgtcccggcggcgaccctgccgccgatgccggcggtgccaaccgtgccgaacgccgcgttgccgcccatgccggccgtgcccaaggtggcgctgccgccgatgcccgcggtgccggctgtgcctacagtccccgcggtgcccgctgtgccggcggcgagcttgccgcctatgccggccgtgcccgccgtgccgaacgccgtgttgccgccgatgccggccgtgccgaaagtgacgctggcgccgatgcc

SEQ ID NO: 18910 - DNA, 5225 bp, Oryza sativa
gatatcttctggcaccatatatatatatatataccatatatatatatatatatagtactagtacttgccaacgaaatttggtagttacatcttaaaatatagcatgcagttacatatgcgcatgttatcagataaagtattgaacaaatattttagaaatagattttttgttagattatggaaatgtcttcagagaaaaaaaaacatgttgcattattacatattaattgacagaaaaagtatgttgcattattacctattaattaattaactgcgggaaaccatacatattaacaacattaaccataactacaatcctatggagtacatgaggcaaataaaaatcagaggtcattacttttggctgtgtgcactaaattatatatacagagcgtggagatataatcatattccataaactaattaaataataataatcacgcaaatcgtcacagactcacaatccacacaggctagctgaagactgatgcatctgaagatagcagtattaattaatttgcaaaagttataattatctcatgtctagtcaaattttaaattttagtaattaagtagctgcagtcattatggataaaaataacttctagttttactatggatcatactctctccatactcgtaaaaaaagtcgttaggacagtgacacggtttccaaaacacaacattgactttcttatttctacaaaaatatttattaaaaagtaatatatgtatacttttatgaaagtatttttcaagacaaatctatatatatgatttttacattttcaaactcaacaacttgagagttatttatgatttatattctcaaggtttgacttaaacattgttctaaacgacttcctttataagtacagagggagtatatgcaaactttatggagaacactgtagtttactgataccatgctaaaaaaaatagtttaacgaagtacaaccgttcaactgctctcaacctgatgccttgtatgagatcagaaagctagctagcttgtgttgacagctgttctaatgatttgagatatatcaaacttgtcaaaacagtacacttgtgctgatctaatcacatttcaactgtctatctaatcataggtgagctaaccgaggaagaacaatgcaacatattgggccacctctattaccacctgatgatctcttcttcctaaccaataattaacaaatccttgcagatggtttggaaggtcaacaaccagtgtcaagatctgaccatgcaattagctttgtgagctataaatgtatccatacattgctttgcatcaaacaacactgaatttattgcagtagttaattagaacactgaatatattagctgtgctaagtgtagctagctcagtgggcaaagcaagcaatatttcaatggcttccagctcgaacttgctcgcgatggccattgccgtggctgccgtgctcctagcgggcaacggcaacaccggccacgcagcgcggcacctcgccgacacgaccgaggcgccggctgccgccattcctgctgttccggccatgccgaaaccgacgatccccaccatcgtcccggcggtcacgttaccgccgatcccggccgtgccaaaggtgacattgccgccgatgcccgccatcccgaccgtgccggcggtgaccatgccaccgatgcccgccgtgccggccgtgccggcggtgactctgccgccgatgcccgcggtgcccaccgtgccgccgaacactgtcgtcgttcccgccgccgtcgtgccggcgttgccaaaggtggcgctgccgccgatggccgccgtccccaacgttccaatgccattcctcgcgccaccacccaaggcctaaacgtagctcgtttcgccatgtgtgcacgatgagtgtcagtgtgtgtttaatgctattttgttgattgtacgtttttgcatggcgtacagatattttgtcattctttcatgtatgtactgtatactatatatgtgggcttgtacttgattgaattttatggaatcggttgtcgaggtttcttgacaataatctctgaattttactacaattcctgggttgaccgacacataaaaaagaaaattccattcataccataataaagatcgaacaaatttgaagaatacagtgtagaattaatagtactaccttgcaaaattgtggtactacttaaaatagccggctaaacctttctatggatagggttttatgattttctccacataaaaccatattcttttgggctacttttaatattggaatcaaaagaaaacaattataaataggaactagagcatccctatcgcttgccccgtgcatggccccccgtgggctagggatgaaaacggtcggaaataatcggaaacggtacattattttattatttttttcgaaaacgaacggaaacggtctggaaattttcatatttatgaattcatctatttagtgtcaacttcaatgccacgcttacagaaataaaaaaaactaaaatttgaaaacggtaaccaacggtaaaattattattattatattagttttgcggaaacggtatcggtacgatcgggaagtttccataccgttttcacccctaccgtgggctgtgctcggctgggggcacatcggcccccggggtgcgatcccctatgggcggtgcttggggcacatccctcccaccctccctgtggtcggtgcccaagacacctctatcacctcttgggcatatttttttctttttaatccatgtgtgtttttattaagcttgggcctttttccatttttttttctatagcaggccaaatccaacaagatgcacacttggacttcgtaggccacatgcttttttttgttttttccagattgctatttgaatctattttaaaactggatgtacaaagtttataggtataaaattcacatgaacaaaattacataaagtttatatgttcaaagtatttatgcataaaattttcgcatataaattgtttctaggccaaaatgatatgctactaaatttctttcaaattaatatatacaaattttatctatacaaagtttctatatactagtacaaagtttacacgcaacaaaatgtctatttgtataatttatatatacaaatattttgatatacaatctatctataaaaggaaaaaaaaaagaggttagctattggttgtgacccgcataaaacaagaaacataagtgggctctttttctctataagggttcattagcttacctaggaagagaagagggagacctacctgggaagagaagagggaggcaggtagcgctaccacacgaagtagcactgattttatcatgcgatcgcacgtcctaggaggcacatgatcaattgcgaattagacgaagcctttgtaggagaagtaatcttgtgccaacaggtacttctctatgtccacctagactttaggaaagcactaggacttgggaaaccttgcccttcaagcaaataaaaaaagagccagattgaattcatgctaggaatccaccagtcagaccgtctgaacacctacaatcaggccataattcattgtacatttgcactatattaaaataaattttaaggtgtcttaagcatacaagtggactaggaatcaaaaaataaatcacctgtaacgataataagtagatatgcagatgcaaaccgtgctttcattgagtgcatgtaagcaggctacaatgttaccttcttgtagaaagtcagaatataaggctaataccatggtagattgtgagtgtttagtcacttctgcgagaactcatgttctaactctacactcctacgtctgccaagttgtggtatgaatgtgataattttggagcaaagtatttatcgtcatatccaatgtttcattcataaaccaaacatatagaagttgatttctattttttaccagaaatagtatatatcgaaagaagcttttgacaattgagtttattcattcataagattaaattgtagatgttgtcaaaaaaacaaataacaaaagggcagttgaagaacttttatgttcgatctcaatctagaacacggttgagaatattgagaattgagattgagggaggctgttctgtttcgataacctatgtctgcgtgcgtgtgtatctaatgtaatcatatatcatccgtataaccgtgtaggaatcaaattcatagcttatatagtaattttatcatgatgcaaccaccctaagtagcacacgggtgcagtgattgaaatttcgaaaacccctccggcacgcaactatttcgtccaaaattttatccttttttccattttagtcaaattttgatcaaattcaatcaaattttattcaaatttaatacaaaccaaactttgtataatcctcgcctttcaatggcgccatagaattaaacacgctttccatgcatctctattattccacattccctttatttattgatagacattggattaccattaagccagcaaacaaacactaaaccatcaccagtcaaagcactctcaaaacaatattatcatgggaagaaaacgaaattaagcttcaagctttgtcgttgttgtcgttgaccagcagcaggtggtccggcgtgacggcggcccagaactcgccgtcctcctccagcgccgccatgtgctccggcgccagctccacctcggcgtcgatgccgccgccgccgccgccgtcccgccccgggaacagcgacaccttcccgtcgtacttgttccccttgccgctcctcgccgccaccgccttcccccacccgaagtcgcacccgtacatgtcgaaccgcggcgagctgctcacgaacacgccgctcgcgtcgaacagcctgaacgccgacaccgacggcgccgccgccgagcgcgcgcggatgcgctcgtcggtgtgcgcggccaccgcgcggcccacggcggcggccgcccacccgtgcccgcgcgccaggagctccgacgccggcaccgcctccgtcgacgcggggaggatgctgttcccgaagtactccggtggcagcggcgggcggaggcggccgcggctgttgaccgacgcgcggaacaccacctcccggcccggcgccagccgccgcgcgcgggtgacgcaccgccatagcagcgagctcagcgcctggaacctcgtcacggcggccgcgccggctgcgtccccggcggcgaggagctcccaccgcgcgcgctccttgagcgccgc

SEQ ID NO: 18911 - DNA, 4331 bp, Oryza sativa
ttcagctcagagtcaacccgtcgccaacatctcagcacctaagctggagattctcgggtggagtactactaatttagatcagagctctgtcaattttggcaagatgtcgtatctcaaagggctgttcatcgcatatttctatgtgtatggagaagaggatcgcaatcacgattgtctaaggctcttgcagcactttcagtttgatgccatccccagactttccatcctacttacctactttccagtgagttcagttcctctgctttgtgtgacatcatactaacatcgtatatgagagcactatcctctattatgagtatatcatctattcaactttcaatgtaacaaacaaatcatttatggaggctggttcttagattattacacaacagacaatacgcatttgcataatctactgaatattcggtaagacaatttagtacttcaggcatgttttgcattgctcaagcccctgcatcatgtttgagcacaccacttctccattatttcctactctatcttaatatctttctaattgatggcgttacactttccaccttactatgagattatgtgctaggactatgcaatactacactagtttgttatttattgaagcaaacatggtttctgaagagtggagagaatttgaaccggtcaatcatagacattatttctactcttgcactatatattattattgcgaagcttaaattgagacatggcgcatacttatagtgaatgcacagtttctttttatttgctaagcttccatattggctggacatttttaataagtaatccaaatgaaatcattagcttgtaacaatcatgccctgtgcggctaatgaattatccaaaatgatatgtttctgtacttttccaggttctatatatgaccccatgtttcctagatttagaattgccagattctgttgaatcagaattaaaatttttagcttatagcaagcattttccatatgctaataactttcttccaatgagatgtttggatcctctccaactattatatataatcacttattttactttgtacaacagaccataaatggcgatatatacttgatggaagatatgacagtgctccctgacattgtgttcttgaacttaattttcttttcaagtggatattgtattggtcctagcttattccatgttctcaggatgaccactggtgtcagaaggttgaagctagaattacataatcattataaacgagaggtaaaagctgaaactatacttggtttgtttatctgatgcagagttactaaggaagttacgagaagcaatttgtatttacatttcctgtcacactaggcttgatttgctattttgctacttgccctactctatatagtggtttgatactgatatatgtagtaaatgtgtgacatatgcatctcctatcggcaatactttggggcaacacaacaaggatttagaagatgatactaactggctatgcgttattgatattagaatacttaggacgtgcgtaaatttatactccgttttcacagaactttctcataggacagaggttggcttcaaactagtacccaagttgttattcttttgcagacttttttatgctggtttatctcgagttgttcaggcagcctgacagcttgaggcaagcttaatgttgctacactaatataccgctcttttcagttttgtggatcggattgtgtttgtgatcttccaccaaactggacatccgaggaacttgtgttgaactcccttcgtgaagtgcaaatcactaacctgagaggaactgagaacgaatttgctgttgtggagcggctattcagttgggcagcagtgctgaaacagatgacaataaatttccataactcaatcaccgtgagcactgcaagagagttgtgcgagatgttactgagcttctccaggccagagataagcatgaaattttacattaaccagggatcacgtaaggttttgtatgttccagaagactaatgtgcctcatcaggcttgccagttgactagtgaagtagaactcattttgctttcttcctttctctgatggattgatgaaagaattctgtggacttggttctttgatggtgatgaaacacaacttatctgggttcccaatcctggaattgaatggcaagaatcaatctcttggttggaaaaaaaaatgaaacgaatttttttttcatctcatcgttctacatgttgggtaggcttaatgtgtggctccagcctccggacaggaaaactcttctgatctttctgctcagatatgctactgctgctaagctcaatctgcatcacactagactgtagctgaatgctacctggatttgtaagctagcctggatttgtatttcagcttggatttgtatttttggtcggatttatttgggccgtccatgcagatatctcgcagcagcagcagcatctgcacgttactcacgtggcatctccaactctaccgccaaaatttgtattctttttttgaaaaaaaaatcgttggctcccgcgaccgcgacgcctcgtcgcggccttggtggtagagtacaagaaggagccaggcttctcttctcctcgagccagcagcaacacgcacgcacgcaccacacacgtagcagcagagcaatggcggcggccatggcgctgcaggtggtggccggcggcggctgctgttgccagcggccccgttcttggagctggtcggcggcggttgccggcggcgcgtgcggtggcgtcggacgcggcggcggcgaaggtgagcgaggaggaggggaaggtgaggctgggtgggtcggaagtggcggtgagcaagctcggcatcggcgcctggtcgtggggggacaccacctactggaacgactccgagtgggacggtacgcactgcctcattaatcaatccatcgaattgttcaagcttgttttgtttgtgctggaaaagattagttcttgttgctaattgttgcagtcaaatttagctccaggtgattctcagttgtttaggtgttacctgtagtaggtctggttctaagcagctcaaagcagcaggggcagaaagtgtgtgatcaggtcatgcttcccatgcgcacaaggtgcttgttgcattgcctccccgggtgacttgcacttgcacgcatgtcacttcaatcctctccggtgtgaaatattttgtcatgtgatttcgacaaccaaaaagtcccttttgttgagacatatcgtctacaaaccaacggtcatccgattgttcttgttccggactacaaccatcaggcaggtcactggttttggtttggtgtttccctttcaagagggcccggtgtaaatctcttcctgattagttaattagcaacttaacatgtccctatcattggttagttaattatcaactctgtccttttcctgcccctcttccccctctttctgggagagtttttcttttgtaaggtttccacttcaggtgtatgttatggtctttgtatttgtgatacaatcgttgctgctgttttgggaagaaaagtcttccaaaaacagaacaaagaaatgataagaaaacgtgcttcctttgatttcatcagacaggagactgcaggaggctaaagcagcatttgacacaagcatagataatgggatgaccttatttgatacagcagaagtttatggtacagcggtaagaaactagaaaaacttcatgattcctcgctcatattttccttgcgtcaaaattctgaaggttcatttaaccttagttgttctgtccttcagctgatgggagcagtaaattctgaaagtttactcggagggtatgccacgttttgctgttcagcactccattttttttattattttttatttttgcgaaagtcacatgtgcagcaatagtcacctgttgttgtctctcttgccgccagtttcatcaaggaaaggcaggagaaagaacagattgatgttgccgtcgcaacaaagtttgctgcacttccatggagatttggccgaggaagtgttctttccgcactgaagaaatcgcttgaccgtcttgggttatcttcagttgagctctaccaacttcattggtcggcttgtctgctctttctctgatacatactttttctgtaaattttgagcattttgatctcagccgcttttgtttctctgttttcaggccagggctatggggaaatgaaggtacacagtccaatgaaaattacccatataaccatttttatgaattattagatagttccttctagcatgacaaaaacttcaacattctgacatcgttgagcattattcagggtatcttgatggacttg

SEQ ID NO: 18912 - DNA, 2963 bp, Oryza sativa
taataaaccatttggcatataattagctcttggccaaccgatggggcccttgttcttgtaatgactcatttccgttgttcaggtgttctgtcaggaaaatacactccagaaaaacctcctaccggtcctcgatcaaacacatatacccctgagttactcaccaaggttatattagtacatattactgaacccttaagctagctagttacatacagcttcagcttggatgcgccatttagtctctgcaactgaacatttttcttatctaaaacctataaacatgtttcatgtgcacagcttcaaccactcatgaacaggatcaaggagattggagaaagctatgggaagaacccaacccaggtgcttcacctcatataatgctcagcaaatccatgcaagaaaaggaattaatatctccaagtaggatgagcagcaacttgcaaggaacagaagtgcagttccactgaaaacagctggtgttttcttttttttgtttcaggtttcactgaactggctgacatgccaaggcaatgtggtgccaatccccggagccaagaacgccggccaggcgcaggagttcgccggcgcgctcggctggagcctcaccggcgacgaggtcgaagagttgcggtctctggcacgcgagatcaagggcatcaagatgcccatcgaggagtcatagacatgtaaaaactgaagaagtttttcatgtatatgataggagatgtgtattgattgtaccatgcaatagtaaacattttacggcgataaaatgtgtagaaggtgtagaaaatgagtcagaaatttctgcctgcatgaatagaaaaggtttatatgactttgagccagccctgcccagtgatgattcaaatgcctgtacaatgtaactttgacgcaaacacgcgtgaaccattacacacttgtatttaaaaaaagaaatagatctcatacgtacgttttatattataagtcgctttaaatttttttctagtcaaacctttttagatttgaccatttcataaaaaaatagtaacatctataaaagtttcccataaaaaaaacatctatacaagttcagagactctttatataaattctataagtaacatacgcctgtagtgactttgtcaatctctagtatagatttgtcggctcagtcctcaaagatgcttataggggtatggtttgtgtgtgttcataggggtgggtgtgcgtgcgttgtgagtgtctgcgttgtactgtgtaatttaaaaaaaaaatgatgatatgaatactataagtttgattgaatcttatcataagcaccagatttaaacaataagattgcaaaatttaattatttaacatcgaaggaggccagaagttcttttttttttctatagaatgattttaccgccaaaaaaaaataaattctctctctctctctctctctttttgagttatttggaagcgatatacccagagcggccagcggcgcgtccacgtgtttacccgccaaacacacttgccagtctactctcgccggcgtcttcctctcctcgcctcgtctcgttcgtggccaaacgaagctcgcgcctcccggccactcgcagtcgaagcccagcaaccgccgccgcgccgaggccgagcaacagtgaggaggtagcttgcctgcaatgatggccgggaccctgcaggtcgccggtggctgcctggcgcccctcctccccagccgacgagcggcggcggcggtacgcccgccacgcgcgtccggggcgtcggcgtcggcggcggcggcggcggcggcggtggaggaggacggcaaggtgaggctgggtgggtcggacgtggcggtgaccaagctcggcatcggcgcctggtcctggggcgacaccacctactggaacgagttccagtgggacggtacgttcgcccaatgcgcatactcatcgatttgcttattaactcttgattatttttgtgttattccacctgcaaacctgcaatcgatcgggattgattgaccagttcttgatttaggatctcagtagagagttggagtccggactccacctaatatgttgattttgggggaattgttgggattgattccactcattgtgttgtagagtttcatgtagctgatgagctagctttcaggttcaaaggggtcatagttttaacctgtactaagggctaagtagtaattaaggctgtctaactgaggtttgtaaacttactaaccttgaactaacagtgtagtactatttgcaattgatttctgtcccaaggtaactgtaagtggtggtatcattaagacatgaacatcctggggcctagtctaagtaaacattgcattgcaattatgacactagactaaacgtcaaatatttatggtcagggggagtatgagttaaggggtcaggtctctaggtgaatctttgatcatgaacatgctcatggatttgttctctctgcttgtcctaatgttgttgcaactcgcaacgttcgaactaattacagattgtggaatttaagcaactcgcattggaatgttttgagtctgatttttgtatagtttggaaggcaccagccatctaaggatgtaggatctgaaagtgtgatatttaacaaagttgtctttcttttttgcattccttttttcctgctacttgttatttgtttgttgggctgaaatcagggtcatacatcccatgtgcttgatgtgcatgttgcattatctgcaagaaaccacgtgccacatgtaatatgctttgcgaaattttaacgaccaaacacatgaaatgtcataaatctctgcaattgttagtgaagtagacaatttgcttaatgtcaatgacaatccaatgacaaagataccagtgacagtcccttaatatgatgaagcactctgaaatttgccagataggaaattgaaggctgctaaaggagcatttgatgcgagtgtcgattgcggaataacc

SEQ ID NO: 18913 - DNA, 2994 bp, Oryza sativa
aacaggtcgaagtagccattgcgacaaagtttgcagcccttccgtggaggcttggccgaggaagtgttatttctgcactgaaggactcgttatcccgccttggcgtctcctcagttgagctctaccaacttcattggttgtctcattgtcttttcactccaatattatgtgtttattattgttgctagtttatttaactggtgtcatcatctccttttcaggccagggatatggggaaatgaaggtattctttaatatacccatatttaaatactccctccactttttaatatatgctgttgatttttgcatatatgtctgaccagtgcaaatatgcaaaaataagttatgcttaaagtatgtttaatgataaaacaaatgacaacaaactaaatggtaattatatgaatttttgaataagatggtttgtcaaccatatgtttaaaattcaactgcatcatatattaaaatatggaggaaatacataatagaaatatttgaactgtactcaggaagcagtgggagcaattacattgttcttacatgattcaggttaccttgatggtcttggagatgcttatgagcaaggtcttgtaaaagctgttggagtctcaaactacagcggttgtaatctgacttcaagagttacatatgatgcagtttgttgtgctagttacctcttttcagtgaaactaatttcaagaacgctctttctataatttgatacagaaaagcgtctacgggatgcttacgagcgcctcaagaagaggggagttccacttgcttcaaaccaagtaaactacagtttgatatacaggaaccctgaagaaaatggggtaaaagcggcttgtgatgagcttggtattactttgatcgcatattccccgatcgctcaaggtagaattctgattctctgattctgttcttcacattaccattcaactatatcaagatcttttttttgcaagaaaaatgttcaatctagtagtttaaatgaaaatgtcctatcttagaactgaaatgtttacttcatcgatcatcattccatttctcaaatgagtgattatcgaaaataaaatcctagcttaatatgtctcctctgttcaggtgttctgacaggaaaatacactccaaataatcccccaactgggccccgtggacgaatatacactcctgagttcctgaccaaggttgtattttttactaatattattatgagcttgttgcatccttgttcacgaaccctctcctattgcactgctgcaactctgctcattgaagatgtttcttattccaaacagctccaaccacttattaacaggattaaagagattggaggaagttatgagaagaccccaactcaggtgttcttgctgctcaatatttccttttctgaagtctacccattgccaaaaacttagaatgcaaattattcagacataggagtaaattgtaagagggaaaaaatgataatttcatctttcaacaagctcaagggctacctggagatcaacaagatcccaaatgctgaagctaaaacaaccactaacactttgaattctcggaaatttgcagtgcaccaatttcgatgacatagtagtaagcaaagttgctccattctttttttctcctgcattttcttcaggtggttctgaactggctgatctgccaaggcaacgttgtgccgatccccggagcgaagaacgcagagcaggccagggagttcgctggtgcgctcgggtggagcctgacggatcaggaggtggaagaactgcgttccatggcacgagagatcaagccggtcatcggattcccagtagagaagttgtaatttctagtgagtttttcttctactttgggtctccgagaacatcatttacataaatacacaatgatctagacatacatagataggaaccatgtgtagtctttggaactgaaaattaagatgtcttagaaaataaccaaaatttacagtctgagtagcgtacatgcatgtatgctcatcgaccatattacaactaagattggtaactggattatcttcaagaaaccaatgttttattttctctggaaaaagagaaaacctgtttgcaatgtaatgaatatggccagtggcgaagccaggatttgagtatgggggggggggggcaacaaacaagtgattacacttcacacgaggtaaaatatatgttatttcactttacactgggtttagtacatatttttactttgcatcagggtatatcaaaataatttgtgttttacactagattgcatcatataactgcaggaaaatcttataaaccacgtgtgaaacttgtgatatttttttaccaagtttcacaaagttttatccatattttgtaaaacttgatgaaatttctataggtttgattatgtttatcctggtgccaagtgaaacttatttgaaagcagctcggtaaaaagtgaaattgggtgtgttttacccgatgcaaagtgtaatttactccaaaattaacaacaaagtgcaaggattaatatttcagcgatttgaaactaaaatgacgtgagaaagtttcctaatcagcatgtgcaagcgcgagctggaaatacaatatatcaaacgtatacacagtagtagctatagacggcgacgtaaatgatccctgactaattagagcaagattaatagtatagccaattgctagctccaaatcatctatagttaacttaatagttaattcatacaatatttataaacatatactatacaattaatatctggtcccatctgtcatacacacatgcatcttgtagtccgtgctgtagctggttaaatctgtaacccgctgcttttctctctcttttttttatcttctcgaactgtgtttataactggcttatagtatactattgtacctgctcttaagcttaaagctttgaggggatcgagcaattagcaagtgtctatatgggtcattactgcgttttcatgaagttaataaaatt

SEQ ID NO: 18914 - DNA, 1199 bp, Oryza sativa
cgcgctgggctgggcatgggcagggacatctactcgcagctctggcacagcttcgccaatgtcgacgggcacgcggcgggcgcgctcgcgctcgcgacgctgacgccgacgccgcgggcggcggcgaggagcgacgacgtgtcgagccgtctcgacgaggccgacctgagcatctgcggcagcaacgcggtcgtggcgccggcgctgcccgcggacgacgacgacgacatcgacgccgccgcgccgcgcgaggaggaggaggaggaggaggaggggccgggcgccgcgcgcgccgccggcgcgtcgtcgtcgggcgggtcggggagcgggagcgggagctacccgctgttcaagcgggggagggaggagctggttgacagccttagcgaggtcgccgacgagacccggccgtcgaagcggccggcggcgaagcgccggactcgcgccgccgaggtccacaacctgtcagagcgtgtaagacctcaagaacaccaaccaaccattgatggatagatggtgttgcatcatttgcaacaaggtgaatgttcttgattttttttgctgttcttgctgcagagaagaagggataggatcaatgagaagttgagagcattgcaagaactggtacctcattgcaacaaggtaaaataatttctgcgaaaagttgtgggaatttttgttatcctgtataatagtatagtgttcttggctattgccatggttgaattttgtggcaatttgatgattctagctgtttctcagactgacaaagcatccatactagatgaagcaattgagtacttgaagtccctgcaaatgcaagttcaggtttgaaatcaaactttccccatttctccacagtagcaatagaatttcaatccttctggatgaatcaaatcacggtgcctgattgtgagactgttgcttcatgttcagatcatgtggatgactaccgggattgtgccgatgatgttccccggtacccaccagctcatgccaccgatgggcatgggattgaacacggcatgcatgcctggggctcaagctcaaggcctgaatcagatgcaaagaacaacatattacatgaacaattctctgccaaaccagatgcctcagatcccttctccagctatgaatgcacccagtgttccagacgatatgcagaatgataatcgcatccgcgggccaagaaatccttt

SEQ ID NO: 18915 - DNA, 2488 bp, Oryza sativa
gctcatccaactagaactgaacgagaactgaactttttagaccggttcgagaacacaaaccagtcatcaattatggcaaaattgcatgaccattctaattatcatcttagttttgagatttcaccttataacctattttattgcaagaactcacccacccaacgttatccagtcgaaattgtttcctttgcgcatatgagaagttaatttgtcggcccactttaacgctcggtcgctccgccttcgggggcgacgcgggcagcgaaacaggccgcgccgctcccgaccccctcctcccctcccccacctcgccgctgcccgagccaccgccggcaaagccaggcggctgcaaggacggcggcggcggggctctcttccctcgctcgcagtcaagctggttagggcgccggcaagacggagctcagggcaaggcgccggcgccgaggagaaaccgacggcggcgtccagatccggcgctgggatgcatggatccgaccccccccccccatggctggatttgttgctccgggcggcggactgccggggacggcgagtgggcggcgcggaggtggcagtgtcggtggctggagtggcggcgtggcggaggaggcagcggcatggccatgtctgcagtggcaggcggtggccgtggccagatctgatcggtcggctggcgctggaggtggctgcggtggcggcggcggctgcggtgccggcggcgtctgcggtggctggtgacgacggcgacagctgaggcagctgctacggcggttggcgacggcgacgactgcgctggctggtggcgacggtgacggctgaggcagctgctgcggtggttggcgaagacagcgacggtcgaggcagccgcggcagggaccatgcggcagcggctcaagcagccgcacctgtcgtggcggctgcacgcggtgtcggcctgctgcggcgggagaccggatcccctccgttgaactgctgtggcggttggcgacgaggcggcggcttgcggcgacaacggctggctacggacagttggagacggcggctggctcgtagctgccgcggctgtggaggcagcgtctggcggccggggacattggcggatgcgacaacgtctggcggcgtcgtatagatgatcgacggcggcagcaagtggaggcgtgacggtgggaggcatggcggtcttcgacggctagccaggggcgtggaagacgagcgcacctggacggcgcagcagcgatcggaggagggtcgggggtcagcttggcacagagagtcgcagccgatgacaggagaccggattggcgcgagaggcgcgtccggtggaggaggccggcacggcgcgagaggcgctgccgacggcgacggaggacggcttggcgcgagaggcgcggccgatggagggaggccggattggcgcgagaggtgcatccggtggaggaggccggcttggcgcgagaggcgtagccgacggtgggggaggtgacctcggtgtgaggaggagctgccggtgggtgtggtgcggtcttcgacgcaccaaggctgaccggcgagggacgccggtgcaggggtcccacatgtcggcagagcttgagtgatggtggagcatcggtgcgtcagccgtggattcgcaggtggtgagcggcaggtgaaaacccagctcggctgtagctgaaccgacaatgatggttcattccccctcctgagggcgttgtcgtgctgtctcacccctcaagggcggttgtctggcaaaagcccagtcttgacttctttgagccctgacggatggcggcggcggttcttccgtcgcttctcttcctgaagacatcattttggcatcctctagggggcgatctcgtctatgttcctttgttggtctagcggcggtcggtcacgcttagcggcggccggttcggtgctagccttctcccgggtgtgtgtgtgtgttggcgctgtcggtgtgtgggcggtggtattttttttctttttgctggttatgatcctccagggttgtaatcttgtaattttttcctgctctatcaatagaacttcgcaccgtctcgtgcgagtcgttcaaaaaagaagttaatttgtcccatttcttttgacgtagattcgcagcgggtcatatcacctaggttaggcccgtccagtgtgcctataaggtgagcccgactcgagagagctcttaggctattttttttgactcgatattaggtgaaggacttgcttgctatgagttgtaagcaacatcattcttaggtgatgacaagttctagttggactcatcacataaccacgctggacaagcttgacctgcctgatatggccctcgtggatcgacattagaagaaactagtaatcgcaatgcacgtttcccacattagctatagtgataatataaaacacttaaatttttttgcacttttcatgtaatatatgtcacacaaaatatacaaacatactaaaagttattatagtaacttaacat

SEQ ID NO: 18916 - DNA, 1335 bp, Oryza sativa
ctaaataaaaatagagggagtaccatttatgtaccatacattttaagacaaacagacttcgtgtaccaatcagttcatacagaagccatgttcgaatcaataacgaaatatgaatgttcacctacacatcattagagatcactgtcctctcctcctccctgtcaaactcttttcctttgaaaaccaaggagaccaccatttcctttttgtgcagtactttgtacgagtactgatgggattaaccggataatatagacatatcacaataattaattctagtgtaaatgtgtaatgctgaatgcttgaaatttaataaacttttcttggaaggtttttggtaccgccacagctgaaataatttctcaagtatgttcaacattgtggttggaaagcagtactatagcgctatcttggagaaaaaaaaattcagcaacagttttggacgcatatatacatagcatgtcagagttaattaattaagtttctggtagtggtgaggaaatatatagttatgataattcctagggattctaccgttttctcagcaactttcgagatggactttgtaggattcgatttattcttgtaagcatttcctgtatgcatgttacattttgataagtactgaagaaatggttatgaatattccagtacaactcaatcaatttctctcatttattcaaaggattatttaaccttttcaaacaacatcgtgcccttcaaaggacccttgattatcaaaattccttgaccaattcatccatatatcacttatatttttcactattcatagacaatcacccattgtgaagttaagaacctcccaaatagcttcaggatgccatcattttagctcttttaattttggaaagatttcaaccattagcttaaaaatcatgtgaagtattctcttaaggaaaaagtacgaattacccccgaactatcgcggtcgaccgaattaccccttgaacctaaaaaccagactttgcttaccccgaacttttaataccggacgaattaccctcctcgacccaatccaaagctgttttgtcctacgtggcgtacatgtagcaatctagtcaacattttctttaaataaaatggtgggacccacatgccattactcctcctcccctctactctctctctcgctctctctctctctctcaggcgtgcgtggactagcagtgggcggtggcggcggcgcgtggggaacggacgtgcggtcagcggcggaagagcgtgtggatggcgcgatgggcggcgggcagcgccgaggagggtgttggaggaggcaggcagggccgaggatgagctccgcgtcaacggcgatga

SEQ ID NO: 18917 - DNA, 7475 bp, Oryza sativa
atccgcctctaccgccggccaccatctcctccttctctagccatagacgcaaagcaagagagagagggtgagagaagggaagcagggggaatgggattagggagggattggtgtgaggaaagagatgacatgtgggcctagatatttttttatgttttattttgctgactagatgccatgttggtggccaagtatgcagattgaagtcaaaaccgtccaaaacagtgttcgggggattatttccggtataaatagttcaaggtaaacgatgtctggtcttttagtttaggagggtaattcggttgattgctatagttagtggggaattcgtacttttaattaccttctcttagcaagttcaaacactatcacaggaatacctatcactgtcgactcattgttgtgggttccattagaaccgacagtgataaatggattcggggtaaaaagaaatcgatttgtaacagtcgagcaacactgtcgattacttattgtcggatcaactataggtctttcatctggcagtgttggaggtttatgtgatagtgaaagcacacgaatttctttctcttcccccttttgttatgctttaggacacatcccttgaaaactttcctcaatttctcaaatggagcatataagcatatctttttgggagcattcctcaatacctacaacatactactctaatgctctcacctaatactccgtcttcatctgctacatcgccaacagacttttaattataccatttctgaatattttttccacttactctacgtgttatatatgacaaacagtcttcgtgtacccatcagttcacccaagagagcctcatatccatgacgaaacatgaatgattcacctacacttcataagagaccgctgttcaccactgtcctctccctatgcctctctcaagtcctttttctttgagaaccaaagagaccattactaaaatgtgggttaattggatccatgccattgcaactttaccaaatttataaaatgacactactatttgtcatatcggctatatgccactggaagtttctaaaattggaaccatgccactccagccaccttttccgtcctcctctctcacgccgtctctgttcccgtcctcatccccctatggtgcatgcatgcagtttttgttactgcattcatcaattttgttaccgaagtaaatgtactacgaaagagtttttacttctattggtctcgatgcactcatgttatgtgtgatcaactggaacaaagccacagaggaagtatgacaataatgtttaacaaaaattataacattgtaggagtacttacaaagaaaaagcaacacatctggttttaatgttttcaaatcaaatatgttgagaactattcagggtcagtttttgaaagtttgatccaaaaaaccatcggacttgctaaaaatatgatgccacagtttttactaaattttagtcactgttttccacagaggaaataggaaagatactggcatatttaaatacagagagtagttagtttttatacatccattagttattaaaaacacatatccatccatgacaaggtgtctcttgtaacttcactgatcccaaaatatattgtcatggtctctcttagagatgctcgtaaagacaaggtgtatatttatatgaacaagtatacccgtatgtatataaacgcttacgtttgtatcatattttcttaaaaaaaaaataacgaaacatgaatgattcacctacacttaattaggagaccactgtcctcctcccctctctcaactccttgcctttgaaaaccaaggtgaccaccattttcttttttttttctttttgcagtactttgtaccagtaattaatcaactaactaatcatgggattaaccaaaactaattcttgtgtaaatgtagtgtgcaatgcccagctgccccttacctctcaccaaccaaccatatgtttcgcccactcacacacactgacactgccacctcactctccactccactatatataccctcgctcgcgcgcgcgcactccactcgcgcactcgcgctcgctcgcacgaacgcacgcacgcacgcacgcacgacgcgcggcgcggcgcggcgaggcgaggctagctcaattggcggcgatggaggcggtggcggaggcggtggcggcggcggtggcggccggggtggagccgttcccggcggtggacaagtgcgacgcgtcggggcgggaggcgcacgcggtggcggccgacctggaggggacgctgctccggtcgcggagcgcgttcccgtactacgcgctcgtggcgttcgagtgtggcggcgtgccgcggctggcgctgctgctgctgctggccccgctggcggcggcgctccgggcggcggtgtcggaggcggcggcggtgcgggtgctggtgttcgcggcgacggccggggcgcgggtgcgggagatcgagtccgcggcgcgcgccgtgctgccgaggttatacgccgccgacgtgcacccgggcgcgtggcgcgtgttcgcggcgtgcgcgcgccgccgcgtcgtgctcacggccacgccccgcgtcatggcggagccgttcctcgtcgactgcctcggcgccgacgccgtcgcgggcaccgagctcgccacgtggcgcggccgcgccacgggcctcgtcgacgaccgccgcggcggcgtcctcgtcggccgccgcaaggcgcaggcgctcctcgacatgttcgccggcggcgacgtcccggacgtcggcctcggcgaccgccgctccgactacccgttcatgagcctctgcaaggtactttacaaatataatttaaccattcttttttggaagtaattacaattaatcctctccattaatttttactaccattctatcagcatccgtactgcaccggccgcatgtacgtacttaagtaattaaatctataataactggataattacagtgacttatcagtatcacactgatcacaccgggtaaccgtgcttttggaacagttttaaacaagagaactttttaaccaaattttacaaaacttattaaacgaatttcatgcattaccaagttgataactacttaaatctttatttgcatgcatactgtcattatcaatggcgacatgttgacaaactctcaacaggagcatgcatagccctcttataaaattcgcaaaaacaaaaaaaactactctgcatgatcttccatgctctatgatcatctccatcatgtaacacaattagttacatcaattctttaaaaaaaataaaatttaacaggtgaaatttttaggaaaaacaacacgattagtagaagtacatgctactgtgtgacatgccaaattaagatgcaaaatcagttgctggccggggtccgtacgagtgataagagggcaccactgcatgatgaatctggatggactggtgtggtaccgaatcgcattgcatctcgcatgtgttgtggcagcagctagatagttagaattggtactagcctttttttttcacatttcattttttttctcttttgtgcatgtgcaacaattaattggagatataggagtactgttggcactgtagtggctccagtatagagaggagatgaggaggaaattggttaaaaacaaagttgtgggtgtatagggttttaaaatccggggataattcacggagcgtgaaaaactggctttgagaaaagaagttgcgagtaggtttttagaaatctggggataattcacgaaacgtggaaaatggtgcaagagtcactcaattgttttggaattttctttgtgtttcttgatggttttcaaacatggccatctggaaatcactccatattattcagttctatgaaaatagtagtcagctagttcttgcgtgagagttttttagcccaaaatagctatctagcctcgtgacgaaaaataaaaataactttacaccacatatacacattaattagttagaaattgttgctcaacctacttgaattgagaagaaaaagatccggccgcagacaagaaatggaaggctttttcttttcgtgttgtccttgctgtacttatcaaatcatcacacataactaaacggctaattaattagcgatcgatcgatgggttcggttggctcacatcttcagctcagcaagtaaatttaagtgcgtgctggttaaggacccgacacgccgtctacccatatttattaattcaatctcatctacatctccagctcgatttcttggtggttaggtcggttaaacactttaattacaacccccccaaatgtggttaacaaattgctccaaaaaagggttatctttttcgtacaagatttgtttgtaaatggatggggtcacacgagtagggtgtgtgtcttgcaaggtttgcttagcttagccctctgtttttagtattaaatcgcagcacacacacgcagttgcaatgctgtagctgcttttaggtgcaaccaggtaggtaaaccggttcatatatggccataggcagctgtcatgacaaaaaaaaattggcatttcttcgctctagacacaattcctgtgttccaaataagccctaacaatcgagaatttagccatttctaacaagtctccgagagttggaaactacagtgcatagaatgtgaattctgaacacgtgtttttataacaatattaatcattttcttttttcaaacacaactctgtgtatatatatatttaataagaacacaaaaaaaaagaggaaaatggaaccataatgaatccagattggatgtgtggggcttatggcacggcatgatgagatgctggctgtgatgtgagagcctctttaattctgttttttggtagtactgtgctgtaataataatccttgcgagttaatgcgggcattggttggctgatgccttgtcctgcgacgtcgtgcatggcgtggcgtggcgtggcgtggcgtgacatggcaggaagggtacatcgtgccgcgctcgccggcggtggaggcggtgcccatggacaagctgccgcggccggtgatcttccacgacggccgcctcgcgcggcggccgactccgctggcggcgctgctcgccgtgctctggttccccgtggggttcgcgctggcgtgcgtccgcatcgcggcgggcgcgctgctgccgatgccgtgggtgtactacgcgttctgggcgctgggcgtgcgcgtcgtggtgcgcggcgcgccgccgccgcgcgcggagcgcgccgcggggcgccgcggggtgctcttcgcctgctcccaccgtacgctgctcgacccgatcttcctctcggcggcgctcggccgccccgtggccgccgtcacctactcgctgtcgcggctgtcggagttcctgtcgccgatcaggacggtgcggctgacgcgggaccgcgccgccgacgccgccatgatcggcgagctcctcgacgagggcgacctggcgatctgccccgaggggacgacgtgccgggagccgttcctgctgcggttctcggcgctgttcgcggagctcaccgacgaggtggtgccggtggcgatggagagccggatgggcatgttccacggcacgacggcgagggggtggaaggggatggaccccttctacttcttcatgaaccccagcccggcgtacgtcgtcacgttcctcggcaagctgccgccggagcacacctgcggcgccggcggcaggtccagccacgaggtggccaactacatccagaggctcatcgccgccacgctctcctacgagtgcaccagcctcaccaggaaggacaagtacagggcgctcgccggcaacgacggcgtcgtcgacaacgccaccggcaagctgccatcgccggcgacggcgacggcgaacaacagcaaggacaaagcttgctaggagaagggaaaaaaaagggggaagtggatgttctagtagtgtaaaactataatgttattaatttttacctgtgtcgatttgcatggggcggtaaatttcctctttcttttggttatttgtactgtgtatgcacttgcaatgtaccaacggggagttgaatgcaatttgcataagtaaaagcaatgggccaggacaagcaaactattcttgtgagtcagaaactcagaagcatgcatctttctgcaggcaacagctaagaacataaaagcaaatttatttggtttggtagattgggtatcacacattacacataggccagggcataggtgttccattcgattcggcaactgaacaacaacccaacaagtaaaacgacaccagacattattgatatatacatactacgagtctacttatcaaatctggtccagatcaattgagttgtctctcgtttttgtaaattgcaagcaaccagtttcaccagaagaataactttcctttccaagaagaaaagcaatcgattgccacagaaagtgaagcaaagaagagtgtacaatccgtggtcgtagattccattgcttcagctaaaatgagtaactagcctcgagcttgaacaatgaacagaaacaagagtctggctataatttttctaggtgcatataggcgaaatggatcttagtacatcttaactccttccaggttacacatgctatgctcagtcctatatacacccggtaccgcggcaacaattatcgagggcgtgctgctatgtatcacaagggtggatcagtaacttactgtgcacacacattgcagctcttccggcagaagccaggtgcttcattggtacccaccatgtagttcggattcttggcacactcccctactgcagcccactgggggcagaggacgttctcatcctcgcacccgtcagtggaagctccctgcttgacagagatgtcgaaggacctcacatggatccatttagttgcggaccacttctgaccttcaatgaccgggcagctcccgtgcaggctgtcagagtctgttgttgcatcggggtggagactgaagaacagaagggcatcaccctttaccggttttactgaagaggagaaccaacagttaaacagctgattaaataatgatcataatggaaggtataactcatatatgcacggctaagacaacatgctgagtgctaagcccacagaatttatcagctgacaaggaacatacatagttctgcattatttaatatctggttttagaagcaaagtaacttaaaattctattacaggcaattcactatacctgcatatccatttttagcacagtcagaccatgtatcatccttgggttgtaataacttcccctaaaaaaaatagtcgagttactgcaagggaaatccaagtggctaacactgtagaaagttaaagaggacaggtaaactacctctgcttctggaaagatggtctctccccccttcccaacgtctgaaaggtacatgagcacagtggcgatccgatgtcctccaagagcttgattatttttgtcatggaagtaatcatagtgtgg

SEQ ID NO: 18918 - DNA, 2808 bp, Oryza sativa
cgtagagtttttattaatttgtgaaaggatggtagtgtcaatatttagttccagaaaatggtgtattgtatagttggagttagcaagagtaatcgtctagctcatggttttgggaaaggattttggtgttaactattttttcgatcagattatcaaattcaaaactacaagtattttcacccgaatgttgttcgtgaacccgtgaactttattagcttcaaatgtttttattttctgatacaactcacatgctattttattcaccaactttcgttgtttgtagatttgtattactaccatatgaaaactataaacatgtgatataattattattcgtgctatattaaaatttttattataaaggaattacacttaataattatttaacattatcttactgtgtgcttttaaattggtttataacttttacccgttgcaacgcacgggcatctaactagtcaatataaaagttgatgtagacaatatttatataagttccataagaaatctatcaaatccagtgttttaattcgttatagtaattacttaattaattgcatggtaatgtaccaagcttttttttccctttattttttctatggtataggtgaggatataataggcattttaattctactatgcatgcgactatgaaatgccatgtgtacgtacgtgatattctttttacagagaactactgaactttaacaacttattacattcgtcctaaaatatgagcattttagctatgtatctatagataattatttatttagattttgtagctaaaaatatttatattttaaaactgaggaagcacttaattaaccctataacgaaagtgttcgcccgataatgaatgtaaatacgtaatagtacacgtataaatacatactccgtatatagtacatactactcctacttagatacacgcatgccggagtgttactcgtctactcgatacgtctcacatcatatccgtcaagcctgggccacacgatctgcccccgcgccccatctggacggacagaatgtgagcacgtacacctccgcgtagcacctcgccgccgccgtgtcgtacgggtagctgacgtacgccgggcacgcgtcccggaacacccgcgagtacgcgctgccgcggcacgtctccgccgtgccgtgcgcgccgcggcagcagaacgcgtccgtcccgaacgccacgcacgcgctcttgcacgccaccaccgccgccgccgccgtcacctgcagctccggcgggcacaccgcgttgacgttcttggcgcagccggggatgacgcacttgcgatcggcggcggcggcgccgggggtggggggcttcgtccacacggccaccggcaggttgtagccgtcgacgaggctgacgtcgtaggagctccccttgctctggtcctcgtggaggtccacctcgacgagggtggccggaggggcgccggcggtgccgttgcacgcgaggcggccgccgcagtcgccggtgaggcaggacgcggcggcgttgccgtggtggttggtggcggtggaggtgaagttgcagccggtgcggccccagaagcggccgttccaggtgggcggcgcgctgacgcgcctggactggcccggcgggaggaggaagccgccgccggcgagcaccgggtggccggcgttgggcgccgccgccggccacaccgggaacgggcacttgttcaccacgcggaaggtgacgccgcgcacgagcgccaccggtcctgatcatcatccacagcagcacaacaaaattcatggaaattaccaatgctgaaaagtaaattttgccaaaagaaaaagaacgtaggtgggtgtgatttacggtatccatttcatattaaaagaacgtaggttttattctctctctttaacagagtttataaaaatagctagcaatttcagtttcaaataaatcagacatattttattgtagattttaatggaactaatttaatatacaaaagccatggatgtgatctacttcctccgttttacaataagttcaattttcctattctccacatatcaattaaaacctaaaagactaaaatatcttcactttatcaatcctgatacaattattttttgctttatctactcttaatgtatccatctcctaattttacaaactccaatataataatgactaaaaataaatttatttatgataaatcggagggttgaaaagtaaacttattctagaacgaaggagtacctaagagagtaatgagcaggagtagtggtaggggatgaacgccggagagcaaggataagcacgccatctgtgtctaaatctatatagcaaaccagagaaactaactaagctgtcatggagatggtgcagtcgcagagagtaaacaagggtttttataccctgcaagagtctgcaaatacaatgatgccatggctaaggagatagctaagatcaatgagcaatgtgccatgtgtgtgtgtgtgtgtgtgacttgcattgcaatggaagcaaaggaagacatgatttggggtagcaggccagcagccacacctggtgcaggcctgagggcaaaaaggttgagtggtgaggtaggtaaaaaaaaaggatttaaaatggatgtgccacaccacaacttgaaaactgaatttaaaatactgctagttcattgaatttcatcagcccattttggtcatttgggcatgcatcttcccttgaaaacattataggagtactttctattttagactttgagcacagatacacaattatgtctaagcagaatttatcggcccagttgactgggctgcaggaat

SEQ ID NO: 18919 - DNA, 673 bp, Oryza sativa
acgcatgtcacttcaatcctctccggtgtgaaatattttgtcatgtgatttcgacaaccaaaaagtcccttttgttgagacatatcgtctacaaaccaacggtcatccgattgttcttgttccggactacaaccatcaggcaggtcactggttttggtttggtgtttccctttcaagagggcccggtgtaaatctcttcctgattagttaattagcaacttaacatgtccctatcattggttagttaattatcaactctgtccttttcctgcccctcttccccctctttctgggagagtttttcttttgtaaggtttccacttcaggtgtatgttatggtctttgtatttgtgatacaatcgttgctgctgttttgggaagaaaagtcttccaaaaacagaacaaagaaatgataagaaaacgtgcttcctttgatttcatcagacaggagactgcaggaggctaaagcagcatttgacacaagcatagataatgggatgaccttatttgatacagcagaagtttatggtacagcggtaagaaactagaaaaacttcatgattcctcgctcatattttccttgcgtcaaaattctgaaggttcatttaaccttagttgttctgtccttcagctgatgggagcagtaaattctgaaagtttactcggagggtat

SEQ ID NO: 18920 - DNA, 1719 bp, Oryza sativa
agccccgcctggcctcctccccctccccgccgcgcgccgccggcgagctgcccctgaggcacacggcgtgtgcggcctcctcctcctccccttctcccccacccctgcgcggcctcctcgcgcgcacggccggcgcagcaaggtccggagacgcgacgcggccggcctcattccactcgcctccatccccggctcgaatcgaacccccaaggtactcgttcttctcccgtagcactctctcccttcctccctccccgccgcttcatgagccgtcgtggcgtggatttggaaatccatcccgacctggattgactactttgcctccaattaacccattcagtttcttccgtatttcttagtataatagtagttttttttttgaaaaaatgctgaacccccacgccccacgttaggtcggtttattttaacaaatttggtggtttacacttcaacgcttgtgctaatttcttggcttgctaattaattttcactaattattactgcgttcttcatatgctaatcatttgtagcactctaaatttagggggtacccgatttcttaaggtggacgcatgtcttactgtgtgcagcatgccatttttttttttgtgtgtgtgtgttttgcagttgaacaatgactgctcagaccaagaagaggggtggcggggagagcgggaacggtggcgctggcttgggccttgctgccttcatcgccaacggcgaggatctgggccctatcgtccgccacgcgttcgagtccgggaagcccgagtccctcctgcaaggcctcaggagcatcgtgaaaatgaaggaggttgagattgaggagctctgtagggtccactacgaggagttcatccttgcagtcgatgagctccgcggcgtgttggttgacgccgatgagcttaagggtatgctgtccggcgaaaacctgcgcctgcaagaggttgctagctccctgctgttgaagcttgatgagcttcttgagttgtattcagtgaataagaatgttgaggaagccctagggatgttgaagatctgtttgcaagtcaccagtctgtgccagatgtgcaacaaggacattgcagaagccaggcttcattctgctttgaaaagtttggagttgattgagaaggattttctgcaaaatattcctctaaagcttctaaaaaaggctgttcagaagcaaataccaattgtcaagctgtacattgagaagaaagtttgcaatgagtttaatgagtggctggtgtatatcagaaggacagcaaaggaaattggtaaggtttcgataagccaggcatccttggctcgtcagaaaaatgagggaatacattcccaacagagggaagcagaggactgcagccgtattgggtttgacgagcatgcttatgccttggatttggatctcataggtgaggaggaagtactggaattcgatcttacaccagtataccgagcaaactacattcacacatgccttggtcttggggaaaaattccgagaatactactacaataacaggcttatgcaacttaatttggacctgcaaattcccacgacacaaccgttcatggagtctcatcagcacttccttgctcagatagctgggttctttattgttgaggaccgtgtccttcgaactgcagatgggcttctttctgatagtcaggttgagacaatgtgggggacagctatttctaagggggcggcaggaat

SEQ ID NO: 18921 - DNA, 757 bp, Oryza sativa
cggattaccccccacccgaactatcgcggtcgaccgaattaccccctaaaccacaaatccggacattcctgactcccaactatgtaaaccggacgaattacccccttgactcaatccgcggtggttttggtttacgtggcatacgcgtggcagttcagtcagcattttattgattaaaaaaatgtaggacccactctcttctctctctcactctctgtcttctctctcactcttcctctctctcacgcgcatagcggcgaggacggcagcacgcacggcgcggcggcgcgcacgcacgcggccgggggccggaggcggcagcgaggacggtggtttgccccgcgcgctccatcgacctccctccgccccgcgcgctccgtcgacctccctggctacctcgatctccgggctgtgctttcccttccttcctttcaccttcccctccattggatcggtgctgtcgccgcaggagctcaccatcacatggcccgacgactgacaactccacctctgggaaggcgatgtcctctcagccgtgctccccgcagattggtctgctcggctcggcatcgctggctcgttttactggtgacgcacgcctagtgttcgatgtaatgtctcagtgaggtggcctgactgcttgcatgatcgttttttcatgttgttgggcagcgcgatgcatattgggaggccatgatgcccaacctgaagccaccggtgaccacgacggcacgagctttggagtacagggaggaga

SEQ ID NO: 18922 - DNA, 1078 bp, Oryza sativa
aaatttagttgtaagttgatgagagagaaaatgtgtgtggggaagaaagaatatatagaaatttagttcatttgctaaacaaggttttataaaatagttgagaaggaaaactctagtgaaagttaatattaaataatagaaaacaaactaaaataaaaattaaaagaagtaaaacacattaaaattagtttaaaactttacaaatagtttttaagaattatttggtgtaatattttatgatttttgtatgaataaagatatcttataattattgtatgactgtcattattgtaagaataattatttgtgtgcggtttttttgactcatgtagatggatcggcaatggatgtacgctgatcggcggtccaaagagtttattgacggcgtgcactattttttgagagtggccgaagctaacaggcaaaggggttttatttgttgtccatgcaataagtgtaagaatcagaaggagtattctgcatccaggactattcatttccacttgtttgagtcggggttcatgccaagctataattgttggacatcccacggagagcaaggtgttgaaatggaagaagatgaagtggaagacgacaatattccggactttgctcagtatgttggatttgaaggaaatcaaacgggcgaggaggaaatagctgctgatggtaacgacgttgcggatgatcttggtcagatgttgcaggacgccagggaagactgcgaaagtgaaaaggaggcccataaattggacaagatgttggaggaccacagaacttcgttgtacccaggttgcgagcaggggcacaaaaagttggataccactctggagttgttgcaatggaaggcaaaaaatggggttagtgacaaggcatttggcgatttattgaaactcgtcaagaacattcttccggggggaaacaaattgcccgagacaacgtacgaggctaagaagatagtctgcccgttaggactggaagttcataagattcacgcatgtccgaacgattgtatcctatatcgcggtgaggagtatgagaacctagaagcatgccctgtttgcagggctgcaggaat

SEQ ID NO: 18923 - DNA, 1963 bp, Oryza sativa
acgtgcagtgcaggcacagaatcaagtcaaacaacaaacaagatctgatgtttgttcgtttccagcttcttaaaaatagcagcagagtagaaacactcaaagcgaaaaaaggtagaagtatcctaaaaataaaacaggaatcctgatacagagaggtttcagagttttacagctcaaaaggaaaaacccattttatttcaggagaactaggtctgataagagtaactgcattttcgttcacaaagaaaacggagtaactgaatgatggtgcagatgaagtcatgaaactatgcagggggaacgcattggtgcttaaaaacagcaatacaacctatcatggtaacctaaacagcaaggcaacatataatggtaaccaagcatcatggaagtgtccattcttgtttttctctcaaaacaaacattggccatccaaggtgcagaaacaaaatgtcacaccagatgagcaaatcaagcactattattacgtataccctgattcctgataattcagttgatcagtacaggagtgaagcataacatttgccggaatgaccgaaggaggtcatttaatgtaattaagataagaagggagtgaagcataacataaggtggcctgcataatctagcagtccacatgaacaaaacaaatacctcacacaaattcatttgaagtcataatggagcaattcatgcatagatcactaagaaatgtgtattctaaaaaataaaacatatggctgagcggaccaaactttcaatcattttgttgtactgaacagcataacatctgcttattacagtgaatgaatttataaatctcactagcagaaaacaacaataatggtgtaataccaaaaggtacctcttctatctctcgatttaacaaggtatgattcatatgcagcaaatagtgcatatggtattgaactattgacatttggaatgacaaaataccaaatgtcctcaaaatttgtctcctaaaatacaaggagctctcctggatcccaattccattctaacaacttattattgcctgatgataaattacaaatggagatcacatacacctccaagaacacaacaaaaaatttgcatgcgcagctaagttctcatgatcaaactctcctcgtaaccaaagcacaaggcacactttgtcgaattataccgtgatccgtgaccaaaactacaacacggatcatatgcatcgctgagtttggaagggaaatttgtatcacctttttataccggattcagtcaagaaatccggtttgccggagaacggcgtcgcgcacgcggcggaggtcgcgccccttgagcgtccggccgacgccctcgagcatcgaggacggcttcaccggcccgccgaagccgccgccggcggacgcgcgcgccaccatctcgtgcgggggcagcatagcggcgtccccacggaggagctcctcgtcgtcgtcgtcgtcgtatccgtcgcctggcacgccggccagatggtcccacccgctcctccgcggcggcggcggccggacgggcaccttcacgggagccgactggtggtacggcaccgcggggggctgctccgggaggtggaacctcaccctgggggccgatgggatcgcgcgcgcggcggacgggggcgactgggtctgcgccgaggacgacgccgccgcctccgcggcggcgatggtcgccttgcggcggagcagcgccccggcggcgccggcggtggccacggcagcagcgccgccgcgcccggagagcttcctgtccccctcgtgaagcgcggcgaggagccctacgtggccgccctggacgcgggccggtttaccggacggatcgggaggcggcggcggcggagggtccgaggacggggccggcgcgaagaggaggtccccctcgaggagctcgtcgcccgccgcggtcggggaggtggggagagactgggtcggcgaggtgaacatgccgagga

SEQ ID NO: 18924 - DNA, 1598 bp, Oryza sativa
aataaaaggaagcgaaaggaaaggagaatctcggcgcggcccccgccctcttaaatactacgccgccgcggccgcaaaagctccgagcacatagcacgcgcgcactcgtctcgccgcgtccacacccatcggctccaacaccgacgagtagctcggtcgccggggccgccgccgcgcgcgcgcgccaccgtgtcgcgacttcctccgtgaccgggccgatcgatcgcgaggcgcggcgcggcgaggccggcatggcggcaccgggagatggggaagagaagaaggccgggagcgggaggaacaagcacgggttcccgcgcggcttccgcttcgtgccccgggaccaggagctcctcgacatcctcgacgacaagctccgcggcgccccgctcgaccgcgcgctcgacgccgtcttccacgacacgcggatcctcgacttccaccccgccaagctctacggtagccaccgcctctcgatccctctccccctctctctctctctctccttcttcttcttctccggcgacgggctgggtgggtgctcttggggatttgattttgactcgggtggattggactggtttggggcgacgcagggatgtacgcggaggacgaggagaacggctacatctacttcttcagcacgatagagttcaaggcagccaagcccaagcagaagaagtggccgcggcgcgcggcgcagggcggacggtggaaggccgtcctcggctccagccagatggtggaggttggcggcgtccccgtcggccggaagctctccatggagttctacgtcaagggggtcaggaccaactggggcatgcacgagttcgtcaggatcatcggccccaacatcgaggtaaactccccatgttgtatctccttgtgatgatcgaattcatttggtctgatttggatgcaatttgtgcgatcttgagttcttgactcgtacaattttttctctgaactttcgtttcgccaaggttgcggatcttgccgtgtaccgcctacacaagctatggacgaacggcgaggagaagccgggagacctcgccgcggacgttgccaagagcacgaaccagagtggacaagcgtcggcggcggactactaccagacttaccagaacgcggtctctcaggcgtatgcgtatgcgccgccgtacgtcctccagccaggatggagccaagggtacccctacgatgtcgcggcggcgccaccgaccgcgccctggcctgtctgttgggcgccgccgtccgcgccgggatcctatgactgctgctacgcgtccacgttttcaaggccgccgccgccaccaccaattgctgcgagcacgctggacaaggcgccgataaccagtaccgaccacggcgcatcaacgaacacttcggcggcgacacccgtggcgaacaacaagccgccgccgccaccagttgctgcgacagcgaccacgctgggcaagaagggggagggcaagggcaaggcgccgacgaccaccagtaccgatcacgccggatcaacgaacacctcggcgccacccgccgcgaactaccagccgccgccgacgacgactacgccgccgctgcagggcacgcagcac

SEQ ID NO: 18925 - DNA, 2964 bp, Oryza sativa
aggattgaattgatcgagttcatcttgatctcattcgggtggtgcaaatttgtgccgaattttgactcagagttttcttgaactttaatttgccaaaaggttccggatcttgccgtgtaccgcctgtacaagatgaggaaggaaggcagggagacgcctgcagacctcgccgccgacgaggccgcggccgcggcggccatgaacaaccgtggacaacaagcgtcggctgcggccatggcgctgccaccgccggcgacgggcctgcctgggggaaggatgatgtccatggcggacaaggcgaacatggcctcgacatcaaaggcgtacgggccgtcaaagtcaagctcatcgcaactccagcaggatgcggcggcggcggcggcgccaccgaacgcagcaggggctagcaactgggcgccgaggccttgcaactgccgggagtgcgcgccggcggcgggacactatggctacttcgcggccgcggcggccatgaacaaccgtggcggacaagcgtcggctgcggccaaggcgctgccactgccggcgccgggcctgcctggggtaaggaggatgtccatggcggacaaagcgaacatggcctcgacatcaaaggcgtacgcgacgtcgcagtcaagctcatcgcaactccagcagggtgcggctgcggtggcggcgccgccgaacgcagcagggcctagcaactgggcgccgaggccttgcaactgccgggagtgcgcgccggcggcgggacagtatggttacttcgcgtccatggttccacggccgtcgctggaccggaagggcaagggcaaggcgccgatggactgtgccgagcaggccggcggcggcggcggctgtcacgcggagtcaacgagcactccggcgccgccgaagggcgccgagtactacggatgcagcgtcgccgtcgaggatgatgacgaagaattgctgaagtttctgcaggcgatggtgaggggcgaggaggtggagggtgatggcgaccacgccatggccgacgagcgcggcccgcagcagggctcctccccggtggcggcggcggcggcctccggctccgcgcctgcaggtcatgacggtcgccgtggctcgctgcagggtggccaccatggatcctcctcccccacctcattggcggccgccgccgccaccggcgacgacgtcacatctgccgccagtgcaggtgacgacgtcagtggcagtcagcaggaagaccaccctgcgcgttgaacactgaaatttgaaatttgaatttgaaatctgggacaaattttcgtcgaatttgcagtgttcaacttcttactcttttctgatcatttggtgttgttacttcactagttctatgtgagagctgcaattctttactagtaatcctggtgatctattgttgctttacgatggtgatttgcttgttctagaatgctcgagattatatatttgttttgcctgagatgaattggttctagtgtactgtcactgatttggtatgaatgtttgacagatgaacaatcatatttaccatatctgggagatggatgaagggatttgaattgactgcttttatgctaacctgtagttttatgatatgaaagtgatatgcaaaagccatcctgtagttttatgaaatgtatgaagcagaggtctaagtttgaaatggacaaactgtattctgtatttctgttttaagcttatgtctctgtgtaataatggtgcaattgaacaaatgttgatctgcatagatgcaagtcttgatcactattttctgtgtggtgacacatggagcaattcttgcaccgtactactttaggcttagacgctttctctcaaaatatcatgttaatagttatgcaatattctcaaaatatttggcaatattcatgtgccacccgaatttcatatctaaactcaattcaccagagagaaagaagagacaaatccactaaatgaacaacaatgcttaaatactatattcacaccatggagtagtgtatgctggtgtactactcagtatcagctagtgcaaactcatggtaggagatcactgatcattggttacagagagatatttgatcaactcagaagatattctagctatcaaattctagattttacatgcaagctaaggccagtgcgtctgtgcgtgcatgattttgtccaaacactagatgctgctcctatacatgtaaaacatctagatcggccttcaaatgggccgggcccaatttgcgagagcaaagtaagcccattaacacccaactaaacacgtcttaaatcacggagacgctccattgatgccggccaaatcaatcgctagttttcacaaccgtcttacggcgatggccgccggcggcggcggcggcgacgacgaccaacgtttcgatctccccgacgaccctcctcctgcgcatcctccggctcgtcccatccaaggaggccgcgtcgaccggcgcgctctcgcggcggcggggctcgctctggcggcgccgtcaacctcgccgcgcgcgtctacttcgacggcggggtcagccgcagcgtcagcctcgacgaacgggaggaggccttctcctcccgccgcgacgccttcgtccgcgcctcgccaggcggcgttcgcggcggccgccccgccggaggcaacggcggctgccgcggcgtcaccaggctcaccctcgacgtgcaggcgaactgccctgcaactccttgatctccaagttcctgaacaatggcggcgagacgacggcgaggtggacgtggttgacctcgtggtctcccaccctgcggcgcgccgcgtcgaggatctccgcgtccgcgttgtcccctgcaggtaccgctcctactccgacgacgacgaggagaaagaggcgagatgagacagcggcgtgtacagcctgtcagcctcaccgtcgagtccgcgtgctggacatcaccgggtgcagtgcaccaggctcgctc

SEQ ID NO: 18926 - DNA, 604 bp, Oryza sativa
ggaaattttacttggttccatcattaaattgtaggaatgtcactattcagattgttctcattactatttatccttttcgatgattcagtgctaccaggaatgctgggatgaattcatattgtgataagaaagaggttactgtagcttttagcaaaactaaaaggcaagaggaggatgaagtgatttggagaatggtagaacaaggcgctacagatgatgaagagtgtggtggtaccaactgttcggctggcgaaaatagggatcctggttggcctggaacgagtgtcttcaggatgctgattcctgcaactaaagttggcgcagtaattggtcacagtggagaaaggcttagaagactgtgtgaggaaacaaaagcctgcgtccgagtaataggtggccactttgctgctgcagagcgagctgtaagttctccatttagtagtattattttttttcttgatcatccttgacttcccattactatttatactagaatactgtttccttttctgcctgcagtatgctagcatttttttttctttttggcaatgatgatcttaattgagtgcttgcaattaaattttatagcatttggccacaaaca

SEQ ID NO: 18927 - DNA, 2030 bp, Oryza sativa
tgcaagcgttgcatcagtgggtgcacgcgcgtggcaggggtctggcgtccgctcacctcctccctctcattttcatcttcccattctcaactgctctcctcttccctctctcccttgccgccgccgcctccaccaaatcccctacggtcaccaccactcgttcggcgtcttctccgatggtggactggcggccgacctcgagctccctcggccgaccccggtggagaagctgcagccgctattacatcccttgccatctccatcgccggcttcctcgccattgccggcgccgcctctcttttctgtcgccacaatcgccttctccgaccgccaggccaccagatccggcgaccatggtggcgttgagcagctaggagcagctgggagcgccggtgaagcaagtcaacgatgagattgaggggatttttttttgttttctcttttctattttcaattgagagaagagcggaggagcgcgcgtggcagatccgtatgagaggccagcgacggaggagcgtggtactggccggccggcggcagaggagccgggaacggctggcagcgatgaggcaagaactcctctcctcgacgacaatgaggaggacaaacgcttctatctttcttttctttttttttccagcgctttgcagtcaaatggtggggaaattttggtgactttttttttttgagaactcaacaaatttcgctttggtgcaaagaatgctggctgatttttaataccaatattattctttgtatgtgaaaaattgtttatacctattgtctagatttgaaatttttgtatgggatattatagaggtaacctcacccaattaaatgaagaggtaaccagactcaaatctatccaaccaaccaaacaaaatattttccaaaccgcatctctcatgcactcaaccaaacaaaatctcatctcagccgggctaaaccgatgcaaacaaccaaaacagttgcatgtgtatctcttcatctgggctagactcaaccaggatgaaagagatgagccaggctaggaaaatgcaagcaaccaaacacacccaattgttgctgtggtgtggtggatgactcaggctgggccgtggttgctctcatgagtcatagcaaatgggttgatggcgtctattcttgattgtgcttttgatgcgttcttcggtagcaatgtttgttctctagcaatagcccatggatcaatatggattaagcaaacccttgggccttccggtgctaattaaggagttttgtcatgtgtggttcacattatcaatgagattttgttttaggaccttgttacagtgcaatgagtctgcgttcaggatttgtggttggttgggatgacaaattggggaaaatgtgttacaccttagtaacagatctggtttaggatagccagataaacggtacatatgcctattgaagtgtaatttatggatgtattccctatatttccccccctattttgacacaaatccatagcttacaaaacaaccactgtatgaaacttctatcaggatcatgagcaagtttgcaaggggtcttattacctggaaagatcaacttgtatttactttgtaaaggtcgtgttactgaaatatgaatttgttcttgaatatgtttactctctaaaagcctaacatgtcatcgaaaatatggctaccaaatgcttgccatttcataattatccagaaatttcttatataaaagtgttgctttattcaaaagcacatcaacactgattttcatttgtcacccagctttggggattaggtaaatgaatcaactttagttgtgatattggggtccatgaaagattgggaaaaattaaatatattggacctttgccgagcaaggttccgattctccctgaactgtggtagtcttagtcatcttcttggatttgtgcaacacatggattgactggttatgctgtattgtaatgtaatgtcatggactcgatttgtcctaatcttttgctaattacactatatgtattatgcctttttttttcttttcag

SEQ ID NO: 18928 - DNA, 1269 bp, Oryza sativa
tacatgggcgttctgaagaagtatgttcgtaaccgtgctcgtccagaggcaagcatcgccaagggttatggaacagaggaggtcatcgaattttgcgtagaatttatcgaagaccttcgcccaatcggggtacctgaatcacgccatgaagggagactacggggaaagggaactctcggaaggaaagcaataatgacggtagacaacaatttattccgtaaagcccatttcactgttctgcaacactcttcattggtagctccttacatcgaggagcacttggctctagttcgcgccaggaacatcggtaagtccgatgcatggattacacggcatcacattgatactttccccgcgtggctacgacaacatctcatgggtaacgagtcgatcaaccaacaacttgccttcctggcgaggggaccgtctgggtctatcgcgacattccagggatatgagatcaatgggtacacattctacacgagagcccaagacatgaagagcacgaaccaaaacagcgttgttcgtgtcgatgccatgggacacgatggaacaactgccacgtattacggtgccatcgaggacatatgggaacttgactatggtcctctcaaggttcctctgttccggtgccaatgggttaggttgactggtggaggcgtaatgattgatgacagtgggatgacaactgttgaccttaacaaggttggatactcggacaaccttttgtccttgccaatgatgtaacgcaagtctttttcgtgaaggacatgtctagcaaaggaaagaagggcagagggcctgatgagcctaagcgtcaagtggttctcccaggcaaaagaaaaatcgtcggagttgaggacaagactgacgaggattacgatcagttggatgggcaaccccctttcacagtgacgattgaccctagcatcctcctatcaaatgaagacaccccttactcacgcagcgatcacaaggagggaacaatagtgaggagaaagtacgtgcggtcaaccgtcaccgccgatgtaatgccgtaattattgtgtacacgatgtaaactattttggatgtattgattatccatataaatcaattgatgtatggcatatgttaattacgcacgattattagaggtttcaacaagtttaaatcatgtatatgttagttatatgtgatacttacaatttttaaaagttttaaatcacacaggtggcaatttcatatgtatgttaattagagtttttaacatttaatttactagcattc

SEQ ID NO: 18929 - DNA, 1837 bp, Oryza sativa
ctataatctttagtcccggttcttaaccctaaccgggtttaaaaagaatttcgaaatagcgggaaaagatatttactcccggttgttgagaacaaccgggagtaaagatccatgggtatatatatgcccggtgcgccctcgtcttcttcaccaacacttaacgttttcggccgatcgatctctctcggcctctctccttcgccgccactgcctagggcaaatccccgcgccgacgccgccgtatctcgccgtcgtctcgagctcgtcgtcctcgccgccgcctccgcctcctccgctgccgccgcatctctggggtgagagccgccgcatctcccttcatgcatctcgatctctccgatctcgatctctctccgtcgccttcgacgccgccgccttcgacgccgcgcaacgccgccgccgcatgccaacgccacgccgccgccgccttcgccgccgcgcgcgcaatgccgccgccgccacgccacgccgccgccgccacgccacgccacgccaccgccgccacgccacgccgccgccgccacggccccacaacgccacgccgccgccgccgtcgccacgccgccgccgccgtcgccacgccgccgcgccaaccgccgccccgatgccgccacaccgccgttaacgaacgagaacgagaacgatcgaacgaacgagagcgagaacgaacacgtcaacgtacgttgccgcgacaacgtgaacgagaacgacaacgatcgaacgaacgtgaacgagctagggaacgtgaacgagcgaacgaacgaggacgaacgttaacgtgaaatgcaatatatatatatatatacatgtatatatatatacatatatatatatgttacttcgcatttatcctaatacattttttttatcttgcagaaaagacgtgttgtcggagtcgtccgtcaagcctgagtggaagagctagccctagaaggaattggagcaggcaagtgacgtaataatataaatgattgttatatttgtaatgcaattaattaagattattagacctgtaattagacttatcatataagattgtgtagtgttctaatattatttgagttttaatataagattattttattgcaaattagacttagtatgacattattgactacggaattggtgcgctcctaggaattgactattgtagtcttaattagacttagcatatacgcacgaaacacttagcatacattactattttagtcttagcatgtaatattatttgagttttaatataatattactttatttgtaattagacttggtatgtaattattgactacggaattggtgcgacaagtagcaattgactattgtagtcttaattagacttagcatatacgcacgaaacacttagcatatacatgactattttagtattagcatgtaatattatttgagttttaatataagattattttatttgtaattagacttagtatataattatttactagctagggttgtataatatacgtcacctagacttagcttatatcacgatttgtaattagacttagcacgtaaggttgtgtagggttctaatgtacgacatttacacttagcatacatgacttagattgttaaaacataaatgtctcgtgacttagcagatgtttcttgtatcaacagatggctgaccgcgatgaggaacagatattgtacgatacaatcgcggagggaagcagccagtactggaatgaagaagaggggaacgaggatccaaaccagtacttgaacgaggaagggaacgtggagagggatgcggaggggaatcagcaggggcacgtggaaagggatgtggaggggaacc

SEQ ID NO: 18930 - DNA, 3553 bp, Oryza sativa
caatgctgcatctgaatcaataacatgctctatccctggaatgtctggcatggatggccgaccaccaactgcaatgagtatgttttttgcagtataaagctttccatcaacactgacagtatgtggatcaacaacctgcataatatgaacaggtagtatatcaacactgtcattgctgcattgatcctttcaacaaaactgtatatgcaaacttaacccaatttacaaatttgtcccaacctttccacggccttcaattatagtgaccccagaattctttagcatgtttgtctgaacccccaccaagcgctgcaactctaaattcttgttggtcatcagagtgctccagtcatgctttggctcagtgccatacctccacccaaagccatgactctcttcaaactcatgagagtatttggatgcatacaccagcagtttctttgggacacagccacgaagcacacatctgaagtatggaaaaactgaacatcttacttgcacatttttgcaattggatatgaaatggaagaaagatgctatccgcacattatagatactaagcatttcactctgcagacgctataagcaaattacagatatagaaggaagctggaaacgcgtaaggctaactggttgataacaaccagccatcgtgacagagctctctaacttttttgttacttgcgtatatggagagccattcatgtaagtatgtaaccctaatagtaaatctcatatcatcatctctacacatatattgaacaacattatagtgaataccacaaaagcctctgaaattaagcatgagctccaggaatggtgaataagaatctgttcttatagtcatagagtagactcctagtggtcgttgatcataacagagcactggatcgtgcgtgaaattgttcaatcctctcctcactactaaatcataatcctaaacaaacaatcagaagcaaaccatgcacaccatccgaattccaaacaaacattaccactgaacaatgtgtgcgacttgaactaggaagaagggtggcgaagttcactcacgttccgccgacgccgccgaggctgtcggacgcgacggtggcgaagggcatctcgcagacggcggcgcgggcgccgtagagggaggcggcgacgcgcgacgcccgcatcccgccgctcccggcgccgatggtgaagaggtcgtagtcgtagtcgcacccacccccatcgccgcccgcagcggccccgttatccccggcggaggcggaggcggagaacgggcggcgcgggccgaggcggaggagcgggccccggccccgggtggcggcagccgcagccgcgagggggtggcggcggaggtggaggaagcccccgccgccgcggcgggggaaggagaggacgcgggatatggtctggaccgcggcggcggcggaggaggaggaggaggggagggtcgccgccgtcgccatggctgctgctccgaggcttccgcggcggcgcgggggcgcgtgacgagacgagacgagacgaggcggaaatcaaatgcgttgcttcgaggcggggcgcgtggtgtggccgtgtgtggggctagccaggagacaaaaggcgaggctttgttgcttcggtgaggcatgacgtggcatcggcgggtataggtcataggtggcgctggcgcatagccgcggagccgcctgagccttgggccctcgaggtgccataagatacgctttgtaagttttaaagcgtatttttgtaactccctccgtaccaaattagatgtcattttgactctgtaaattaggtgtcgttttaactttttgctttcaattttcgatcattcgttttatttaaaaaattagtgtaaatataaagaaagtcatacttaaaatattattgataataaagtaagtcacaaataaaataaataataattatataatcttctaaacaagataattggtaataaaaactcaaaaataagtattttgggacggcggtaatgggccggatggcctgcaaacgtctactgtgtaccatcattagcttagtttagctttgtgctaggtgtgtactatgtagcctagaacggcccattcctaatagacgtggacagatggggtatcatcatttggtgacccatttcagtactccaacatgcgggaagagagggataggtggaaccgtggatgttcacttaggccattcacggtgcataactgtatacatgtaccattcaatcctaacattccacgtcatggattccataccacatctgctactcccgtaacaaagtgaagtccggagagccaaagttagccacgagttcctcgtcagatttgttagagtgttggggagggaggggaatagcttgggctatgcatccgggggaggaaccgggggaaagaggggagacaggagtggcaccgtcgtggggctcgtcgccgcccccggctccgcaggtcgccggcactaccgttgttccccgctcttccccgatgccaccatcaccaccacaggggaaagaggggagagaggagcagcgctagagaggggagaggccaccgacggagagagaggtagcgccgccacagctgcccgctaccctccagctccactcgactcgacgcctgagatggctgccgcgcttttcctcgtccttactcgatccaccgccaccagagaggagagggtaaggcaaggggggagggaagaagccgccgccggagatgggagaagccggcatggcgagaggagaggggcagcctcaaccgaggaggggtggatctagtcgcccctctctggcaccgtcgcgccgccaacgccgccgctgcttcgggggaggagaggaagggtggatctagccgccccgccgccgttgtcgccctagtgccggtgccgccccagtgccacctcgcccgccgttttctgcgcgatggggaaaggaggaagctgtgcaatggggaaaggaggaaaggagagagaaagggagataaaaagtgaaaaaaagatactagtggaacccactataggtaacttgcattgtaaagtagtatgtggctaatgcggttcttcatctaggtggcatgtgaagttcgccaaaatcacagggcgcactgctactgcccttactaggatgccacatgtggaccccacatgttttgttttactaggatgtcacgtcagtcaagacaaccatctatactaccataggatcttatttaacctggttgtaaaagatgaaggtttaatattttcagtattacgatttgaggatgtaattcaaactcgatgtcaatataagatgtaaagtgaacttattcctctatgcttggccttaaccccacccaaagaagaaagactgttacccaatttgaatttcttggtgcaaccaaggacatcatttttttttcaattttggtatatatatgttgacaaatattctggagaaaatttgtcaaattttgggacatcaatttttttcgattttgctatatatatgttgacaaatattctagagaaaaattgtcaaattttgagacattagatttactctaagattcgggta

SEQ ID NO: 18931 - DNA, 20408 bp, Oryza sativa
catgtaaaagtaaattcaatgaagcctaaaagtaatttacatatattatagaagtaacttataaaaaaagaaagtaactttaatgaatgtcttttttttaattggatgtgactacacagctagtggtagctagtttgtactccatttagtatctcctttcaacttgaaaaatacaatagtatcttcttttctcattctacatgaaaaacaaaagtgaaaggaaaaaaacaatcgatgattaaacagatttatagagagttacttttgaaccatgcaaaagttacttccaattaacattgaaggtacttttaaaaattgttaaacttatgtgtgttgatctgtgctgattaaatttaatttcttgataaagtcatatttttatctctacaacgaatttacttctaatgtcgtgacaaaattacttccgttttgttttaagttacttttataatagatgtaaattacttttagactctattaaatttacttttatatgtctaagaagtaatttagtcaactctaaaagtaacttatatatatatatatatatatataaaaatagcttacatatataataaaagtaatttacatataaatatttttcattgtaatataatcatgtaagatcttgttttgaagatttaattgtaacgaacacaatgatgtaatcgaattgtagatcggataagtaatttgagagaaaactttgtttgaagaggaaaaggacgtacatgtatattgaaaaaatgtatgcatgtagtaccacgtagtagctggagttctccacatttctccgtgttcaggcgtcatctccaaatagattttacgattttcttaataagtcgtatgtgaaaataatggttgctttttacagacgttacggtccgtctgtaatctaaaagaagtctcgtcgtttatgtagtagtgtcactatataagggcatgtttagggagcttctagctgctgcagcttctctcaaaattagaaacttcccaaacaatttagttttttatatagattctgagaaactatagttgtaaaatccaaaaaataaaacaagaacccaaagctgaaaaacctagcttttttaaattatcagaaattaactactaaccagctgcttaaacctataggatcgaactgcaagaactaaaccaaccaggggggtgaatggttgtagtacccaaaaaccaaaacttttagcggaattaaaagttaccctcatatcgatgtcgatcggtttgaccggagttgatctaccggtctgaccacgccgatgccgtcggtctgaccacgccgatgtcgtcgatctaaccggagtagatcgttcggtctaaccacctgaagatgccgcagtcgcctgatcctgctgctagtctaactgccgctgtcccaccggtctgaccgatgcgttgccgccggtatcccgccgattgaatcgctgaacctgagcaaacacaaatcgaagaactctcaaagtagatgacaactttattacttctctctgtgtttacaaagtgcaacaacaacactcctcacgaaaatctcgactaaactcgaaaccctaactattatctcaactcaatgttctctaaagcgataccaggagaccacactctccctctctatatatacccgaggtaggcagcctaaagccacgaaccaaacttgtacaagaagacctaatcccctagaaaaccttcacgtacaagaaactaactttacaaactccaattgtaccaaatttggactctttccaaatataactccgcatctgtacgcacacaacacctccatcgtatgccatatggaatcatcaccaatcacgtgcattgatctttagcctaagcatctcgcatgatatatgaccgtccagacgtcaccttatccccaagttgactcccgatccatcaccggcaacactctcccgagacatcaagatcacctacacatgaatcaaataagaaaccatattatgagcacaagctatctccaatttgactcattgctagcaaacaacagaatttcatatgcatagtatctatctagaagtcataaatataattaatccacagatattcaatgaaacaacctaaaaccgaaaccaacacagagtcggccggtcagaccgcgggctggccagtctgaccactcgaagcacgccggtctgaccgacaaccaatgcccggtctgaccggaccgacaatcagtagtccctattcatcaccaaaaccacttcgctaataatctttaaatagcgaaaccaataatctcatatgtcaattgcgtgagcgaccatagcagtgcagtgattctcttctccatctctttccccaaagtgcgtgagcgaccactttggctctgtccggcggttcgtggataggctagtgtagtgtcagtaccttcatttgacttatttttgttctcttccctaaagaatcaaatcagggacacatgtccacatgtaattaatggttctgtcaaaggcacgcaagcatgcatgcattgccagccgacttcgatcgatccacattgttttctttctgcaagctcgcatctttggatgcccatgcactgacctttccactggtattttgacatgtgtgatactgtggttacagttttttaaacaatcaatatcttcggaatgatattttcttagcatgtttacagactgataatgctaaacaaatttgaagtccgccaaaagttcaaaataccttctgaactattgcaaccctcgaaattttctcacttaactacaaaacccaaacatttaattcaacacttaaaattttgacaccgaatgaataatcccaaacactattgtgagtggtttcgaatcaagcaatccaattgaaaaaaaaaaacatgagacccaccaatcatcgctaaaaatcctctgcaatcgactgcaccgtgcttttgtcactaacatatggacacgatgtgtcgtcggacccacatgtcagtgacaaaggcacagtgcaattgactgcagaggatcctgatctaccgatcattccccaggcaatccctctccctcctctaccactttgtggaggcagttatgggcttgcgacagagactgaggcgacaacctactgtggatctgttgtatggctgtgctccttcttgaagcgcggctagccccgatcatgtctccccactacctactccttgacgtgccgaacatgagcgtggatctagggcaacactgaatatggcagtgactgcaacatggatctaggatgataccaccaacctccttcatcccgcaacattggtcactcctccgtggtgtcagaggagtcgttgggagacgaggagagggttggcatggcaagaggtccaaatctactccgtcgctcttttcctttccctatgtctcccctctcccatgaaggatgatgagcgacttatttagcctatgcaaagcacgaaggataagagaaacgtgtagcaaagcgagtgtagtacttgtagcgaatatggcaactaacgggctcacagatgacacaagtgataggggaagctcgaagttggttgcatgcgctcgtggcccttctctcccgcattctgcacatgacgagcatatctggtgggacaataggtagtggagttattaaggaggaagatgatggagctcaaggagcaagtggtggagtcaaagcttgaggagaggtggcatggggagaaggcgcggtggaggtaggtcttagcggagcagagctcgatactaggtgagctagagacgacggtagtgagctctctcaccatggtgcaaattcggaaagactgacggagagcaaggtgaagaagaggaaacactgataggtgggccctcaccggttggttgctgattagcttagactatcatgtgtgcatcatgtcagactaaaaccgttcaaattgagttatgcgtaattcatccgatgttaagagttgacagatatagaattttgagtattggagttgatggggaaaatcgaactactgtaaaagtttaataacgggtataattgacttttttctttttaaatcttggtaaataaccgttgttagatggactgaacggtaacttataatgaccaagcatatcaggatcgatccaacaacggaacacccagatctagttcatttttatgatcaccaaatactacaatcctatgttatgttcttgcatggcaccataactagttgtgtttatctttccattttagaaagaagctggctatctgaacccattttagaacgtaatctctctccagcaaaatccaatgacctcctcctcttcctcagaacaaggacacaccacaaccacgtacccaacaaaacacaaaccaaacaaacttgtattagccacgctttgttgctaatcatagccagtttagcttgttcatcgttggattcgttcgtttttccgcatgagaaatatataaaactgatgcgccgtcatcgttgtcgcatccatccatccatccatcgatcggaggagtcgcctcgcgccgccgcaccggccgtcgacgtcgtgacccgcgctagctagctcgcgcgggcggcaatgtcgtcggacgacgacgacgatgggtcggggcgcaccaagctgatcatcgccgccgtggtcatgctgctcgccatcgtgctcggcacggtggcctacgtggtggtggaccgcgccggcgacgacgacggcctgagcaagcgcggcatgaagtcgacgatgcgcagcgtggacctcttctgcgcgcccacggactaccgcgtggcgtgcaaggacaccctggagcgcgtcctggcgcggtcgtcggacccggccgaccacccgcacgccgccgccgccgcggcgatcacggcggtggagcgggagctggcgcgcgggttcgaccggtcgtcggtgctggaggcggtgcgggcgagcaacgacagccgggtcgccgaggccctccgcgactgccggacgctgctcggcgactgccgtggcgacgtgagccgggcgctcaccagcatcgcgtggcgcggcgtggacgccgtgtcgcaggacctccaggcgtggctcagcgcggtgatcacgttccagggctcctgcgtcgacatgttcccgcagggccccatcaaggaccaggtgagggaggccatggagaaggcccgcgagatctccagcaacgccatcgccatcatccagcagggcgccggcttcgccgccatgctcgacctccacgccagcgagagccacgccgccgaaggcgaggagctcgacgtcgaccacgacatccagcaccacgtggaccgccacctcgaggatcagtcgttaccaccagtcccgccgtggttgtccgacgaggaccggaggatgctcaccagcggcgaggagttcgtcgccgggctgaccccgaacgtgacggtggccaaggacggcagcggcgacttcaccaacatctcggcggcgctggacgccctgccggaggcgtacgccgggaagtacatcatctacgtgaaggaaggcgtgtacgacgagacggtgaacgtcaccagccggatggccaacatcaccatgtacggcgacggctccaagaaatccatcgtcaccggcagcaagaacatcgccgacggcgtcaggatgtggaagacagccaccttcggtacagtacgccaccgccattgacgactcacatccattcatgcattgatcgacatggacatggacattgacatggacggatggatgcagcggtggacggcgaccggttcacggcgatgaggctggggatacggaacacggcgggggaggagaagcagcaggcgctggcgctgcgggtgaaggcggacaagagcatcttcttcaactgccggatcgagggcaaccaggacacgctgttcgcgcaggcctaccgccagttctaccggagctgcgtcatctccggcaccgtcgacttcatcttcggcgacgcggccgccatgttccagcgctgcatcatcctcgtcaagccgccgctcccggggaagcccgccgtggtgaccgcgcacgggcggcgcgaccggcagcagaccacggggttcgtgctgcaccacagccaggtggtcgccgacgaggacttcgccggcgccggcggcgggagcagcaacacgtcgtcgtcgtcgggggcggcgccgaggctggcgtacctggggcggccgtggaaggagcacgcgaggacgatcgtgatggagtcggtgatcggagggttcgtgcacgcgcaggggtacatgccgtgggaggggaaggacaacctgggcgaggcgttctacggggagtacggcaacagcgggcaaggcgccaactcgacggggaggatggagatgcgggggttccacgtgctggacagggagaaggccatgcagttcacggtgggccgcttcctgcacggcgccgactggatcccggagaccggcacgcccgtcacgataggcctcttcggtggctagctcgctcatccatgcgtacgtgtgtatgttgatgcgtgctaggtggggggttgtggggttaaattcgtatgtacaaaatggttacatgtggagcaagcagaagagagagatgcatttttttttctttgagaaacatagtactatcgcaggagctcaccacgcgcggcactcaccctatctttatgagcacctctgaaaaactagcggcactcaccctatccttatgagcacctctgaaaaactaggtatacacctcaaaaagactggaccgacatatcttgagatgcacctcaaaaagattaggactgacatatcttgaaattgatgaaatcatcacagacgcatcgttgtcgagggatacacgtcgtctatcactaaaaaaataattagccgtaaatacgagtactcttgtcaagtttaggacttaaatccaggtatgttagttccaacacaaaaacctaaacagttaagctatgctcacttcgtgaagagagatacgcatttgatccaacgtgctcgtagtctgacgtcattacaaaatatacaaatataacattagtgctagtgctaattacaaaactagtgcgcgacagaacaacattacaaataaataaatatagagacgaaatatttgacaaagtgcttattgtttcgttttgcatgtcaccaatttgctcagccaaaatgctactagtaggtccaacggagaagcctcagaccggcggcagtcggtactcggcagggcaagagggctcgctggagtggaagaaacggccctgtaaactactatagtactagtgtgctgggcttctctcctggcgtggacgggcctcaggtcgatttgatggtcaaccaaccagaggacgaggaagtgaaaagtacaccgaaggtcccttaacttgttagcgagataaaaaacgtcctcgaaccgcaaaatatgcggggtcccttaactatacaaaaccggtcaccctcgacggttttgacgccggatttatcctacgtggcggctgagtcagcgtggaacccacgtgggtcccacatgtcaggatgccacgtcatctctctttcccccttctctcctttcctctctttctttcactttgctccttgtctggtggagcgatgacgggcgatgcggcgacgacgatggagaggcgggagaggagaagaggtccggcggccggcggccggcgaccggcaggggagaagaacagcggcgaggcgggagcaggctgggaagaagaatgacgacggccaggggagagtgggaggcgcatggggagtggcggcgctcggccggcaggggagatgccgcctcctgctcccgcatcgccgcgccgccatgtcctcctcccacgggacgccaccgcggatggagagtggcggcgctcggcctcgtcggcggcggcgcacccctccctcgatgaggcagcggcagcaacggacatggcggagaggtggcttgggcgcgggaggaaggcggcacggcggcgctggtggtgggaggacaggcggatgagcgccgccacgacgcgacagatgtggtcaccgccctccaccgccgcgatgcgccccagggaattcgccatcgccgacctcctcgtgtcctcgtgcagctcgccgcacgccgacgtggagggacgtgacggcgaagcagtgctccggcgagcaggccacctcgacactgccgccgccgactccccgctgctcggcctcgcccgtcggccggcggcgccagcctgcccaaagccagccgccgccatgccccgccatcgccatggctcgcctcctcctcctcctctcccactctagccgccaccacccccagccgcatcgtctcctctcgctcctccgcttctcctctaacgccagctccggctctagcccaacgccgccgcccatcaagcccttgtcctacacggggagagggggagcggatcgagatggacgccacgcgggccaggaggagcttcttcgggatgcaggtagagggacgcgatggcgaagcagcgctccggcgagcatgccaccttgacaccgccaccgccgactccccgccgctcggcctcgccccgtcggccggcagcgccgacctgcccaaagccgcagagagaagattgagagagagatagagaggaggaagggagagaagaggggaaagggagaggagggtgaggtgtacacgttgacatatggggcccacgtgggtcccacgctgactcagccgccgatgatcgtggtaaaagtgccacgtaggataaaaccgggatcaaaactgccgagaaatcttgggtgaccagttttacatagttaagagaccccgtatatctggttttgcggtttgaggacgattttgtaactcgatgacaaattgagggaccttcggtgtactttttccggacgaggaaccgtcctccgggctgccggagacagctcgcaggaacagccatagcccgctggaccatgttcaaggttcaagcacatactgctgcgttcgtttcagccacttcccaaccctctccctcgttttccgcacacacgtttttcaaattgctaaacgatactttttaaaaaaaaattctatacgaaagttactaaaacaattaaactaatacatttttttaaaaaaaaatagcaaatacttaattaatcatgcgctaatataatgccacgtttttcgtgcagaaaaaatgggttcccaaccgacttagagcaaggctaataatatagccgacctattggctataaggttatttgtagccttctatcagcctacccatataatagttagctcttcacaattaatatatagtccacttgtctctctcccagagtttattggttcttgcgttcaagccggctgtaagtttacaacccgcttctcctctctctcttctcttctctcctccacctcagcatttagccggcttatagcctactactatacttgctcttaaaggaacaaagctggaagtagatcaatactctctctctccctctcttatctagtcatctctatgagcatcagattgacgataaacaacgtgaaatctgtatcaagtctagcacttaaattcggctaagtcggtcagtgtcatcacgaggaattttaaccagtatagctaggtttcatcacttatttcacaagattcaccatgtttcttactccgtagagttcctacgaaatgtaatcctaacgactcgtgtcgctgccacttggaaagaaaaaaaaaagcgagtaaatttcacccatgcaaggatatttcgataagattattggtatatctgtctgaggcatgactgtgtaaaaatacatacgtatttgataatattgttggttatgaaattgcaaacttataaagctgaagttatgcctctaagacattaattgtacacatttgaaagtagcttttttagaaagaaaaaaaaaatccatttcactccctcataactattttgccccagcgtttaatatactacaatttacttattttatgccctaaactattttaaagcggttcacttcagctcctaacacgtagttctattttctgtttcttgctacataagtcatattttgttctaaaatttggtaggattggtatatgagttacaacttaccactaaacaatattttaaaaatttaatcattgcttggctttgaagcacttaagtttgattaaaacatcgagattttgaattaagctcaagcaaacaatcatcataaaatctgaaaatattttaaaacattgataatggtgtcatatatagttgtaaaaagtttcagcttaaaatactacctgcattttctaatatatgatgttgttatatatgatgttgttgatattttttacatcatgtttgattattcgtcttatttaaaaaatttaaataaatacttttttgtttgatttagcactaagggagctttaagcattacttctatttttaatacttgcacggttttttttaataaggcaaataatcaaatgttgtaataaaatttaacggtgtcatatattaaaaaaaataaaaatagagcgagcactaacataaaaaataaaagattaagataaatgtataaaatggtcagtggagcggttttaatagtttatcgagaaaatgtagggggaaaaaatccttaggcttaagtgatccgataaaaatagtaaaggacggatctcgtcgagagattctggtacgtcctgggctcctggcttttgtccaatggtcttctgtagcgacgattgggcacgacggacctcaccgtcagtcacccggtgaggcgtcgagcgaaagggaatgggcccaaagatagttcagcctgcgtacgtcttcctggcccatctctgctctgcggaacacaacgtaggcccgcggtcgccgtctgccgggctcacacaaccatctgtccaactcaactgctccactacgttttagaaaaggaaaaagtacatcgaaggtccctcaacttgtcatcgagttacaaaatcgtcctcgaaccatatatatgacatccctcaacttataaaaccgttccctttaggtcctctagtggttttgactccggttttatctgacgtggcggctgagtcagcatgggacccacgcaggtcccatatgtcagccccggcttcctcttccctctcctcttcctctcttccacgggcggtggcggcaaagagcagctgggcacaacaggccgatgcggcgggcgcgggtggcgcggggcatggcggcggggatgtgggcgacgggtggagctccgtgaggaggttcttcgccgcggcgacagagcggtggtgggcgacctcgtcggcgccatgacgcgctctacgcgccataccacctcaccggccattccccgccgcccgcatccagcacgcgaggtagggcttcctgcctccgggccggccgccgcgaggagccctgccctagctctccaagctcgccgctgtgttagtgacaatgcactggatcgaacacctcgcgtgcaaactgtgcacgtccggcacggcaacagacagagaaacaaagaaattcagagcgggattcagaacagagaaaagcagagtttcagagtagcgaaagtgagagaggaattgttgggcaattttctggtttctttcattgaaatgaactgtaaacttacaaaacggaaactgtagctactctcctaaatatactcaacagaaaaaaaacgaatcctatgtccaaaaatcgtgccatcccacgatccggttcttcaggactctggaacacacatgcacaccgcgcactccacgcaactctcgcaacctgcattgcgtctgttatttctgtttatttgatccgaagaaaatggcgtcctcctggcatctcgctccgctccatgtgcccatcacgacggagccaaacttctgaagcaagccaggactaacgtcaacaatctcccccttaggcctggcgttctccaagatcacgaactctaagcagaaaccttgccgtcactagctttgccgccggcaacccttttgtcagcgcatctgcacgctgttcttctgaacgaacaaattcgaccaaaatctgtcttctttcgatgcactcacgaatgaattgataccgagtatctatatgcttgctcctcccacgaaaaacaggattcttcatcaaagcaatagctgatttgttgtcaacaaacaactttaccaattttgcctcctcaccgagtagctctcccagcaatgcccttagccaaagtgcatgacaggcagctgcagtggctgccatgaattctgcttcacaagaagaaagagttactgtcttctgcttctgcgagctccatgccaccaaactgttgttgatatagaacgccatacctcctgtactccgacgatcatcaacatctccggctagatcgctgtcagtgtaccccgtgattgtgatctcaccaattcctgcggtatacacaaggccacagtcgattgtccccttcaaatacctgagaatttgcttcactgccttcaagtgcgtcatggtgggatgctccatgaatctgctcgccactccaacagcatatgacaggtccggtcttgtatgcagcaaataccgaaggcaaccgatcacacgccgatattcaatagcatcaacagggtgtccatctgcatccttttgaagctgtgtctttggatcaacaggaactgaggtcgaattgcagtccaacatcctgaactatgacagaaccttctttgcataggcagtttgtttaagtgtgattccattcacaccttgtccaacctcaattcccagataataactcaagagccctagatcattcatctcgaactcccccatcatttgtttcttgaatgcttctaccctggcaggattctcccctgtcacaattaaatcatcgacgtaaacgccaacaatcatagcttctgctcctctgcctcgagtgtatacggcttgttcttgcttgcaccgcataaacccaagttccttcagactcttgtccaagcaaatgttccaggcccgtggcgcctgcctcaagccatatagtgccttgctcaatttcagcacaaggtgctcttgtcccttcttaatgaacccctccagttgggcaacatacacctcttcttctagctccccgttgagaaaagctgacttgacatcaaggtgatgcacccgccaacctcggtccgctgcgacagcaagtatggtacgcaccgtatccaacctcgccaccggggcgaacacttcttcaaagtctacaccgtgcctctgcacatagccctttgcgaccagccatgccttgtgcttgattacttccccggtagtgtttttctttaactcgaacacccacttgagtccgattgctttgtggcccaccggcaatgtgcacagcgaccacgttgagttcttctcgatggcctccagctccttctgcattgcgtcgacccacgccggctcccctgcggcctcgcggtacgatgacggctcctccgtctctgcgagcaatgcttcaccatcctcttcatccaccaagtctacgcgtggcgcctctagcatgatgtccgccagactcctgtaccgcagcgggccgtcgtcgctgccggccgtgctcagtgacgcctccacctcggcagagtgtgttgatgttgagccaggcgtgggcgtgctgggcaatgtgggtgagaacctcaccgggcttgccggagaagttcctcgctattccgccacttctggctcattgccggctcgcctccctgccagcagcgcccggtacaacggtaccgtggtagactgttctgccagcgccggctgctgctcgccaacaggttcctctaccacaaactcggtggaattctcctctcctgcagcagcactccactgccaaggtgtgttttcatcaaatacaacgtcgcgacttacatggattccgcggcgtcatggatcaaacagccggtgagccttgctcccttcctcgacgccaaggtacacgaactgctcactccgatcatccaatttcttcagatttggagttgtcaccttggtgtgcgcagtacacccgaacacttgcaagtgtcctaagtgtggcttcttccccgtccatgcctcgaacggagtgtgttcacccatcgacttggttggcagccggttgagcaggaacacggcgtgccgcaccgcctccccccacatcctgccgggaacagacattcccttcaggagggagcgcgccatcgccatcaccgatctgttgcggtgttcaacaacgccgttctgctgcggtgagtacggcgccgtcagatgtcgctcgatgccggcctcatcgcacacccgcgcgaactcgccggacaagaactcgccactgtggtctgtccggagtgttttgatggagtgatcggccgtgttctcggccagcggcttgaattttgcgaacatctccagtgcttgatccttcgtcttgataacaaacacccacatccaacgcgaaaaatcatcaacaatcaacagaaaataacgattaacggcaaacgtcgacggtgtgattgggccacataggtccatgtgcagtagctcgagtggcgcttctgctcgataattcgccatcgcagggaatggctgcctgatctgcttcgccatgaggcaagcctggcaaagctggttgggatgatgtacttgaggaactcccgctgccatctccttgtccaccaagagtttcagcgtctggaagtttacatgtccgagccgcgcgtgccacagccacgccggatcgccgagactggtcagcaagcacacaggggacgctagttgcaactcaatccggtacaaacgattcgaggttctcctcacctttatcaccaggcgccagggatttttgtcgaacacctcaaggtcatcattatccatcacaactcggtggccagtttcagtgagttgccctaagctcaccatgttgcagcagaggctggggatgtagtagacgtcatcaagcagccactggtcaccattcttgcatgcgaaaaggattaaacccttccccataatctgtactgatgaggcgtcgccgaatctgaccacccctgtaacggtctcgtccagctcccggaacttccgtcgatccccagtcatatggttgctagcaccattatccaagtaccatagatcaccagcagctgctcccttctctgccagcatcaggcgaggccatacacgctcctcgtgcacgaccagcccacagtccatgccctgccccggcgcgttctgcaccgccttcgtcaccgcgaggagcagagctggaccggcatcgtccgtctgcacaagatgggcttcggctttctttttcttcggatgtgggcactgcgttgagtagtggccgaactcttcgtagttgaaacatttgatgtggctcttgtcgcggccaccgccgccggagccgccaccgctgctctgcgttccgccgcgtccgcgacccctgccacgactgcgcctggcctggccgcggttcgccccctcaccagagggcttgttcttttgtggcgacgaggtttctcccctgcctttcttgaagcgcgcttcccactcggccttagtaaggagcacctgaccgtcggcggtcactccgctagccgccgctttcttcttgcgcacccgctcatcgtacgccttgaggcggcccactgcctcctcgaacggcatgtcatcgacgttgtagaattgctcgatccctacgacgaggctgacgaacttctccgggacggtgtcgaacagcttcttcaccatggcggcgtcgttcaacgtcgcgccgagagcagagtgccggacccccatcatggtgatccggccagcgtactggtcaagcgactccccggcctccatcaccatgctggcgaattctcctttcagagtctgcaggcgcgcgtcgcgcaccttgtctgccccgacgaacctcgtcttgagacagtcccaaacctcctttgccgtccgcttctttgccacctgcatcaagagatcttccggcagtgactggagaagatgggatttcaccttcttgtccttcctcgggtcgacagccgctccggctgccggctcgatcgcctcccatacgccttgatcttccatcattgcctgcacccgtatcacccaactagtgtagttggttgatgtgagttgagggtaaaggaacgcgcttcccgagctccccctcgctggatccgccatcgccggaaccaacgccatagtgtcagatccgcccccccccccaacctgagaagctatgataccacttgttagtgacaatgcactggatcaaacacctcgcgtgcaaactgtgcgcgtccggcacggcaacagacaaagaaacaaagaaattcagagcgggattcagaacagagaaaagcagagtttcagagtagcgaaagtgagagaggaattgttgggcaattttctggtttctttcattgaactgatctgtaaacttacaaaacggaaactggagctactctcctaaatatactcaacagaaaaaaaacgaatcctatgcccaaaaatcgcgtcatcccacgatccggttcttcaggactctggaacacacacacaccgcgcactccacgcaactctcgcaacctgcattgcgtctgttatttctgtttatttgatccgaagaaaatggcgtcctcctggcatctcgctccgctccatgcgcccatcacgacggagccaaacttctgaagcaagccaggactaacgtcaacacgctgcttcagatgtagaaatctacaggcgcttcattctgcagtatgatatcctctcccggcgcgaagtactcggtattcatctctaaaaccttcacttaaattacaccacagaagatatcaactactcatgaacatccaacaagaattgaaaagaaacaaaaatcacatgatcacattgagatcaaatatgatcatgtgattaaaaccacgtacacacgccaagaaaccatcatgtgatgtgacttgtgagtactagagtatactgaaccaagctagaacaccaaagaattgctgctgatcaacaaatagcaagggatcaatcaaagaaagtgactactgacgaatttcctggtgcggctggtgccgtggacgacagggttggtcatgttgccgatgatgtaggcggtgaggccgaggttgaagagcatgtaggcggtggtgtagaccatctcgccggtgttctcggcgtgcatgtcgccgtagccgacggtggaaagggtggtgatgaaccagtacatggaggcgacgtagaactgcgaacatcgactaggccgcctcctgcgagcgatgagacggcccaaagtggcgacgaagaggatctacctacgcgctcaccgctggcttccttgtctcctctttctccacgcactctcgccgccggtcgccgtccttcccactccctccactcttccccttccccttccccacttccgcctccccccacctcgccggcggcgacgacgatgaccgcatcgatgcgagcacctctttccgcgtcgcccgtcgccgggtgcctctctcgcctcaccccaccggtcgcctcgccctgcggacctcctccccacctggccacccgccggccgggggttggtccacacagagaggagaggtgagagagataggaagagagagaagaggggaaagtgagaggaagggaaataacgttgttagcctgacatgtggggcccgcatggatcccacgctgactcagctgccacgtcagataaaactggtgtcaaaaccacggaaagaccaaaagtgaatggtttttgtaagttaagggatggcatatatctggttttgtggttgggggatgattttgcaactcgatgacaagttgaggaacctttagtgaaaaaggaaaaagtaacagaggagaggagtagtagcaggggcggacgcagaaaaaaaaatgactgggggcatgcatctataactcatagaacaatttgaaagccgagtgagactcacctcattgcaacttataaaaactctgagatattacattatcttaaatagtaatatatagatatgtcttccaaaatcctaaataatgttattttccaaaatcctaaataatgttattgcctgtaaaaacaacataagttattagttaacacaaaccaataaaaatattactgaaagtaatatatatatatatatatatatatatatatataaggaataaggtttagaacatacatggcatcctgtgtatccttttcacgacctatacatgattgaaccatctcttcttattcccaatcaacctataccgatattgaaaatcaccacgtggctgatatggtccccaaactaaatactttctcatcttcatgttgattgggatgataatttaccattctcttccttttactaggatcccgaggaagttgtccaaatcaattggttgcggcactgcagaattctcttggtattggtctagatgcatttgcactagaacttcctcttgtggtgttcatagctgttggatatctaataaaaaacttgtccattatctttcatataaaatcatgagaaggttgattagatagagcacatgaagagggagacctaggactagggatccatccactatatctattcacagggaagaggagtacttaccatgggaggcagagaggacagaccgagcaacagctgcagcaccgctgaggtgctgattatgaagagtgatcgcgaggaagggaggaagcagcgataggagcgaagatgaaccgatgcgggggaagcgtgatggatgggcggagtccgcagagaagaggagcggacgttcgacgacccctcgactcatgcgcgcgtgcgatggaaggaacgaaaacaagggggtgtggggtccttttttccaattggagtggggtccataggttatactactatgaatatagcgaggagcgtaaattttgactggggtccagggcccccatcgtgtgtacgctaaatccgcccctgagtagtagtagattacagttgaaacatcagctaatgctgtctcagctggcatttggcaggcgatcctcatcttctcccatatactcttttcagttccacagtctggatttcttacattctagcttatttattaaaaaaaaacttcttttacaaatatacctcctttgagaaaagcctaggggttttctgtttagctccacgaggtggtgggctaggcgacctaggttcaaagcctcactcttctaattatttgatattaggttattccctaatattcatgttttaatatacctcctgaaaaacttgtccaacaaaatttctcgggcagtaaccatggcattttcagggtgtgttcgaaccaaggtgttggaagcctctcctttcctgcatgaaaaaatgatgtaattatctagcgcataattaattaaatattagctaaaaataaattattattattttataaaataactttgctatagaatacttcatgtatctacttttgatagtcatatttcatcttggcacacagaccaaggataagtgattctacttatcacccatttaaacgtgctactagtcattcctcgtaaacaagcgattcattgatatttgcatttctcgatgctcatgtagacaatcttgtgtggaagaatgaagagtcacgcattaaatccaagaaaggcattaagatgataagttgttgtattgaaatatgcctatcaaaaataaattttttagatttggaaatatgactatcaaaagtagatggagggagtttttttttttttggaaaaaacacatcgtttactagtttgcactagtatagaaatgcacctatgtgtcgggtgggaaccaaccataagtaccgaatttcctgaccagtatcaagcaggcagcccctttgagtctcctcaaagatgtcggtttaggaaccgatacctttaaggttacttggataaaaaaaaaaagccagctccgagcacatccaccttgtgtcgcccccaaaatcaaccaagctttgccctccgaaatcaatcacaacgaactcccaacagtcaacatcaccatcacagatcctagtcatcgtcacaaaaccatactccctccgtcccattttaagtgcagccatggttttctctgcccaattttgattgtccgtcttatttgaaatttttttaaaaaaaattaaaaaataagtcccgagtaaagtactatttatgttttatcatctcataacaacaaaaatactaattataaaaaaaatttaaataagacggacgatcaaagttgagcgcggaaactcatggttgcacttaaaataggacggagggagtagattacaagtcacggtatcgacaccatggaacaataacaacaacaacaacaacaacaacaacaacaacaacaccatcttaaaaaaagatgaaagaagaacaacaacatcatca

SEQ ID NO: 18932 - DNA, 1835 bp, Oryza sativa
ctactgcaagtaatagtagatcactctttggctgctgcgctgcactgcaagtctgcaactactaaagcggtaagcacgctttaaataccttgtttgcactcgctaaagcggcatatgcatctgcaaagatcaaagcaaacaaattttaaagaaagaaagcaccacacgcgcatgctcgcacatacatctctctctctctctctctctcaaaggctcagagcacttgcaaataactagcttcaatttctctgtctcttcaccacaaatgcagcagcagcagcacaccatcacattagctttccctttcgactgcaggacagaagaagaagaagaagaagaaggtgaagaagaggaggaaggaagaagggtagtagagaggagcatgcagtacatggcatgattctgcctgtggcttttagtagagaagagtaattgagctcttctgcatctcctctctctgtctgtctctcctccatccaaagtctgcatgcaagaacatcttcttatgatggctctttccctcagtggaagccacactgcctccttccaaagcaaaggtcccaacttttgctgttgcatgggcaagctaaggagtactgtgtagcttagctatagctagctctgccttgcatttgcattgcattgcacttgtgggaaaagaaagggagaaagttatactccttcctagtacaatggtgctgtgtgtgtgtgtgtgttttctctctttattcctctccttttgtaattttgttttgctcttcttggatcagcctgaagcatgtatgcatgcacatgagatgtgtgagtgagatctactgctagtagtagcaaacaagatagagagaaagaacctcctgttccatgaagaatttttatcttcaaatgttggtgcacatttttgtaagatggtgctttgacaagtcttgccagtggctaaaaaacaaggggcttacataggtatactgcctgtgggattagatgctctgttccaccaaagcaatttttaatcaaaagaaagaagggggcatcttggtaaatgccatcctcaagaacaaaatcaagaatttgccaaaaatgccttgatgctctgttccttcccttcttgatgccctgatgcgacctcagtctcctggcttttcattgaaggcaatatgcattctttcccttttgtttctgaagagatggtcctcacttgttaattctctatattttcctcatataattcatgtttaatttgtagtataagattatactaatgtagttctccaagaagaataaaaagaagagagagagagagaacataaaaagaaaatccaaactaaccaaccatgcacagttgacagtacaaaaggactcaatttgatatccatgaaacaaatctgaaatcacataattggatcactcaaaaaagaaacagtgatcactagatgtctaatgcacatcaagtaatcaagcaagcaaacaaggagcaacacaaaacagagctccttaattaacacacaagaactaatcacacgcgcttaattagacgctaatctctagcctaggctcgaaggagaaagcggccaagaagtcgttgacctctccatcgccattgacgcacttggggagctcctcccactggttgctgccgacgtcgcacatgaagcagccgttggcctcgccggagctcacgcagaccatgaggcggccgccgtggccgacgcagttgatgtcggccttcttgccgtggaacgcgtgcgacatggccggcggcatggcggccacctgcctccacgcgccgcggcgaacccccacacccgcaggctcgccgtgtcgaggtactcccccagcac

SEQ ID NO: 18933 - DNA, 2237 bp, Oryza sativa
tcggacgacgcggcgaccaccaccgaggagtactgcttcgacgggctgcgctgcatgttggtggccaccacgtcgccggactgctgaggaagtagaccgtgtcgtcggcgccgccctgggacggcgcgtcgtcggggagcagcgcggcggcgtcgggcctccgggagagcgcgacagggccctcccacgagcccctggacgagtcgaacaccgacatggacaggtcggggagctcgtccgcgaagagcgccacgcggtagggggagccgtacatggcaatggcgtggagccgcggcgcgccgccgtgggcccccggcggcgaggggagggcacggctcgcgccggtgagcgggttcgcgacgaggagctcgcccgtgcccggcgcgcggtagaggacgaggccgccggacgacgccaccgggacggcggcgtcggcgccgccgtcgctgccgcccggcgcggcgcggcaagggatccaggagcggccggcggcgtcgaaggcgagcggcgggcgggggcgggcgccggagagcatgaggaaccacgggtcccgcgacgggacgcgggcgcaggcgcggaggaacgtgggcgacgcggcggcggcgctccagcggcggcagacggcgcggaggcggaagaaggtggccggcgggaggcgcgccaggacgcgctccagaacgtcgtcgtggaggtccccgagcccacgcggcggcgggctcctgcgcttcctgctacttctcgccgccatggacgccatggaggaggaggaggaagctgtttgtgtaggcgttgacacgcagacgcgaggagagagagagagtgtgtgtgtgtgtgtgtgtgaatctgtgaagtgaaaggcagcagcacggctggctccgctatttatatgacgacgactagtataatgatgcatgtatgcatgtcttaaaaaatatgtagtataatgatgtaaaatagtattatactatactccgtttcataatgtaacactttctagcattacttatattcatataaattttaataaacctaggtatatatatgtgtctagattcattaatatttatatgaatgtggataatgctagaaagtcttacattataaaatggagaaagtagttttttagataatgaatagtattatacttcatccgtttcataatgtaagtctttcaagtattgctcatatttatagagatattaatgaaagacttacatgaatatgagcaatgctagaaattcttatattatgaaacggagggagtagttaattattgtataatattacgttcgacgagtataagggtgcatgtatgcatgtccacccagctcaaaaaaatactactgcatttcagacagcagaaaatttaagtactccctccgtttcatattataagacggtagatttattaacttatatgtgaatataagcaatactagaaagtcttataaatatgaaacagaggaagtactccctccatatttttttttgtttgacattggttagctaaaaagaactaaccaacgtcatacatttgtacaaagaggtagtagtatttaagtatttcccggtattttagactgcaaaaaaattatgtgctcagttggatgtacaaatgtgcaatttacaggtccatattatttttagatgctttatcggattattgtcgcatattatttactgtgtaccattaaaaatattgttttttaaaaaattactgtattggttaaatcccttgttcccatgtaatcttttgttaaaaaatactgaatttcgaagaaccaaaaaggttttgaagagaaaaacaaaggtctcttttgggtattccggagttcactctttaaaaatgttgagaaaaatcactcgtcaaattaaattcaacattttttttggaacgtgagaagaaaattcaattgttcaaaccattgagttgtagacgtacggtagatcctgtttagaggggttctagcatctgtagtctaaattcttgtctacgttctacaaatacaatatacatagttatagaatctaaaaaggtaaactaaatatccatcaattgcagtcaaatacagtgacgtagatatggtcgttgtagcgcagcgtgcgcgagttttgatggaagaccgtgaaccgtttgcttaaaaatgcggggaggtgcacgcacattcgaacgcagcgtttggctcgtagcatgtctacgcatcgttccacgtggtgtgacctgccgcactgcactg

SEQ ID NO: 18934 - DNA, 7164 bp, Oryza sativa
ttattcctggccacgaatttaagcaggtatcagtaaatacgcaaatttctaaataactattcctgaagaaataacattatattttttccgatcgatttcatcgtatatgcagaaaatatccaggaaaatatatagtgtaaacccatcacgagagtgaaaatttagaacttaccgttggataaaaatgaacgttcgagattcgtctacgttccatgagttctagtaaaatttttactcatgaatgaatccgcgagtaaaattttatccgtgatgacgtagacgaatatcaaatgtctattttttgatttaacggtagttttcagatttatagatacgtgccccgtatatttttcccatatgttgtgtgctcgtaagcacagatggatagcaacaaggaaaagatgcaggatgatggagagggggtttgacctctgctgctgcaggaatctgcacgaattccaaggtgactaaaatacaagtgtcattggcatgtgaaaggtgaaaaaaaaaagcttggagagggagggaagaggaacacacatgctcgtcgtctccccatgcatgtcgctgctctgctaggagtagataatctaattagatagacgtactactatttttttttgttgggagtactactattttataaacctaatctctccggggggctcaggctagctggaacttttgcttttggcctagacgtgcaaccagctgctggtccctgtgtagtggtactagtatacgtacgagattttcctttagttaattaattactcagatcaattcaacgcaatagatgtgtaaagtttaattactggggtttagtactactggtctactgctgctatgaaagtgtcaactgggcgcgcgtgtgacgtagtactgttttactgctacagtggtaacgtacgtggagcctataatataattgcggggacaagcatgcgtacatcttgcttttcttaggaaaaaatacataacgcaatccacgtataataaatacttgagaattatcgttggatttaaaaatagacgtatgaaatttgttcacatcattttgagtaaacattttactcgcgaattcaatcatgtgtactcttgatgtggataaatctcgtgcgtttatttttaaatcaacgatagtttcaggttttccgctacatatttttctcttttttttctgcacgtatattcatctgcgaagtgaccaaaccgaccaccgaagcctgcagtgtgttgtgtaaaaaacaatttactcactgattgatgatctctcttttcgccggggatcgcatgcaggctgtacgtactcgatccctacaccccgtaactaccactaactcaaatactcaacgggattaggaattttgagggcgggtgatttaataaaatgaattaaagcggaggagaaggtgaaagttaattgcatgtatatatgcgtgcgcgccatgtactttctccgtttcatattataaaactttctagcattgccgacatatatatatatatatatatgtatatatatatatatatatatatgtatgttaacgaatctagatatatatgtgtgcctagatttattaacatctatatgaatatgggcaatgctaaaaaatcttatagtctgaaacggaggtactatagataacataaaaggaatggttgcatgttatattttagaatgtagagagtataactagtcaattattatattaattctcacgttcttatcaattatattattaaaaccacctttttaagacaatacatttgttgtggaaactagaaattctcacattaatcggagaaaattttttaagtagaaatacaatttagaaataactgaaattcgaaaaaaggaatattgaacaaacaatccatttataacacaattacataatacgagattgattaaaattagcaataaaagataaaataaattataaaattacaatgataaaaatacagagtttaagtaggtatacaatttagttttaactgaaattcaaaataaaaataagacatattgaaagaataatccacctagaacatatatagcatgaattaattaaatctcagaataaaagtaaaataaatgctgaaaattaaaaaaaataaaaataagagttgaagtaggaatataatttggaaataataaaaaataagaaacattgaaaaaacacacaatctatctagaacaaaatacgagattaattaaaaattagaattaaaaaaataaatgctgaaattaaaaaaaatgaaaatgagagctcaactaggaatacaatttagaaatactgaaattcagaataaaagaataagaattattaaaagaactgtttacatagagttctattaattgtttatattcatagtactggtaattatcatatcacatccaattttatgttcttatattttgaaacggatggagtagataagttgttgcagagctaacagcatggagaattgggacacttccaattttgcaaataagctcgtcgtgaatggacaaattacactttttcttaacattttgtagaaaagaacttagaaagaatagaaaaaaagcaatcgaagaaatctctttctttggccttcgtcaccaatggaaaagatttgaggctcactttcacgtggagggtgaaaccaggtgagcttcatgaggtggcaccattgctcaatccctaaaggggcctcccacacatggaggttgaggtgttggcgagcaaaatgaaattcaataacaccactctagatttccaccattgttcttgagaagaatcggtacaaagaccataactattccaaagatcacaactagatgtatttcatcggtgaagaaagtagaagaagcatggcgtgttgcataagaagccaagaggtgtacttaattggggcctcaatgagtgggatgttgaggcctccttggcacaacttgaaaacttcagccacctagtgaaaatttgtcgccggaaatatagcatgaggttgtctgccttggaaagacctcatgggagatgttgatgtaggccggcataaatttgtttgcccagatctagaggcaccctgatagcacccgggagaagaagcctagcaatggagtgaatcacctccagggagaaggccagtgctcacccaaacgctaggacgagaccgaccgacgccaacgaccacctcaagaaccaaaagggtaaagaccacggtaaaaacctgaaccaacgggagaatccgactactgctactactaatactggaggaacctgacccctcttccagccttcactagtagagccattggaggggagagagaggggtaggaaggaatacattttactgtagcgaatagccgtggttgctgtttctccccttggccttggttaattttgagcggtaatggcatcgtcatctttagtggagtagggtgtgtttagttcacaccaaaattagaagtttggttgaaattaaaacgatgtgacggaaaagttgaaagtttatgtgagtagaaaagtttaatgtgatgaaaaaagttagaagttcgaagaaaaagttaggatctaaacacggtgtaagttactagtactgaagaccgccttatctagaattaccaatctaaattacgcctgctcaattgcactccatagcctccaacatggaattgatcacagagggtatagcaacaccggtgttgtaaatcctctttcttttttttttcaagattttcccacgggacccatcggtagatcttgccatatggggagcaaaagagagaaaaaaaattacgtagagtagaaagcgagagaagggggaaaaaaatgcaggtgcagggtccgggcccggggtgacagctagcgcacgtagtgtagggcggggtggtgcaggtgcaggaacatggtgattcgcgcgtgcatcggatgtcaaaggcgagagagaatagacggagtagtgtccacggctgaccatcgcctactctagtagtagtagtccagaggggagtagtatacgcaccgcaaaggcaaaaggcaaaacaaaagcagcgagagagagagagagagaggagacgacacgcgctgcctgcctcgccgtgccggtccctttctctgtctcggatcggtctcaccatggagtccgtccgtccgtccgtcctcgtaggggaatctctcctcctcaatttctctctacaaacactagcagcagtagatcaggctatttttagttcttttttatcacatcaacacattaacaactaaaatctaaactttacgttgatctaaacacagcctagagtagtctctcctctctgccattgccagttgatcagtagagtgggttgcaaacggccaagcaactgtgggttgggttgtcgtggatggatggatggatgcttttgctttacgcaagtcaaatgggggacgacatcacatcgctgcccctgccctgtccgtcctgccacccggccggggacccctccctctgcacaacaacgacgactcgctcgcgttgcactccatccaaccacccacagccaccgtctcgtctcatgcatgctggagtggagtagtagcagcagcagcagcagtagatgcgaggagtactacgagacggctactgtactacagtgtgctattgctaccgcccacatctcatgctcgttgattggagggtactgtagcaaagtcaccgtctacagtccgtacatacctagtgtaccgtgtacgcgaccccttccgtcgcaacatgcccattcttgtgtcctccctctaccagtactcgcatttgcagatttgctagtatgctgtacctctagcacaaataccactcttactaagggcatgttaagttccccaaaaagaaaatttttaggtgccacatcgcatatttgaccgaatgttggaagagttttcgaatttcataactcgcctagaaaccaggagacgaatcttttgagcctaattaatccatcattagcacatgtgggctaccgtagcacttatagctaatcatggactaattaggctaaaaaagattcgtctcgcgattttctccctaactgtgcaattagttttttttaatctatatttaatgctctatgcatgtgtctaaagattcgatgtgatgtttttgagaaaaaaaatttagggaactaaaccaagcctaccaaattcacagctactcctatctatttttcatagtaatactatctatatgccctaatatatgatgctggttatatttttgctcgccatcatgtaaaaagaatcagagagtgtatttttgctcggcgttcgtatgctttttgttacaacttacttcacatgctttgctttggtgttattccatctcgcggggagttctgtttctttttttttcttttttaaaaagggctggaagccccacatttccattaccagaaattaggtaattttacaaaacaacatgaccttacatcaaacacaactatcacatgttttttggcattaacaaggtgccatcccacaatattctgccaaaattaaccttcagctaagaaaccacacgctgcacggcaaggactcagaaccaagattggcttaaggcaaggacatagaacacccaaggatcgattggaagcagaatttccaacaaggatatacaaactcttctgatcttcatcgtcttctattccagtcttcttgcacaagtcctccatccaaacctcaagttgaagatctcatttaccacatgtttcataagacccgtcccaacgattgcaaaatacgtacctagcattaagtgaaaacgtgggttgattagctttgatttattatgcaactttggttaatatacataggctacagtgaaatccactattttgttttttatttaattttttttaatgtgaggcctcattttgtgtttcacatcggggacttgaatttttaggtatatgactgtgggaaaatatacctaccaatctctttagacaaatctatctaaataatttagccttgtcccgtttgtcttttgtcttatcagctacaaccaaaaattgaattttaaaacccaatatttaagttgattgtgagattttttttcattatagtctattaattatattaatttttaaatcactaaaaacataaatataaaagttttacttataaattactatttttggttaattcattcgattttttttcatggcttatcagctgtagaggtatcgacgagttacttaatttctaaaatcaaacaacctattacatatctacataaacacccacaagtacatgtaaaaaaacatacgaggttatgcctcggtttgttccaaaaaaagcaggaactggaagcataggggtaagctctttatcttgcaccatctatatattgctggcaagaataaatgtatatatatttttactatttattgcatagtaaaaaaataaatttatagacaccacatatgtgcatttgcatgcatgcggtggctgctgcggttcgtcttcccttttgtttttctccgtcttttccttttgcagagtttcagtgcgagcaggagatgctactagtgcctgctgctgcaggctccatctatctttcttggtctcgggtaaatcctggccggatgcgtctgtcttcttccttcaccagatcgatcttcatcgcggtatattgtggtaatattgccgcctgctgcaactccccaaccaatggcgaagcctagtcaaatattactgtatacattactccatatttatatttcagtgggatcatttctctagctaacgatgttattactatgtatagaaaaaatatgccaattagtaccactataattttcttgataagatgaaataatactgtgttattattaataaataatgcatatatgaggaaatagatatcgtaccacagcgaaattcttgccaaatacatctgcaaacattgtaaccaacaatgcagggctctgcaatccccagaagcctcatggcccaagtgtgtttttttaagaaaatgatgccccaaacccaaatacagatttccatccgctgttcaatattttgacagtcccatccaaggtacgcgggaattacccaccataaaattatgttaaacatggataaacaagagggtaaaattttttttgcaccggcaaaaatggatgttctattttcttatacattg

SEQ ID NO: 18935 - DNA, 1611 bp, Oryza sativa
atatttaacaatcgaaagtagaaaactgtcaagatgaggcaccaccaactgtaagcaaacattgcatcaatgctgaccatttccttttttttatgcatagaattcatctgcataaaagaattgcgctgctggtacaaggcaagccccctatgttttagaaacggattgcattgggtccaacaggttctcatatttcatattgtgatcacatatttccaacaggttctctactagtgcttttcttctattttttcagtcaagaattcaagataatactagactcctttaccaacatgaagaatgtgtaattaattaataaaagcagagaagaagagtcttaaggagaaacaaaaacaagaggcacatttaaaatttgaatgagttggcgaatatcttgagctagattacaataatacttacacaagccagccgatctgttccaatatcaattgtatcctgatgcatacatagcattacctgccagagagtcacacctccctagcataatttggactatttttgttattatcataaactttatatgtttctcacaaaataattgtggttaatgttaaaaaggcatggtgtaatgggtatgattttctaagaatgtcaccttaaagggttacagcagaaacaaccttaacgagaactactaagttctatagtttctccatccaaaagagcctctttctactttaagctctatatttctagacattctggtagttcgaccgtgattttttttggtttcggtatctctggaatatgagtgggtgacttgttagaatttgctcctattgataatacatagaaagggcctgttatctctatcaagatgattctaattcgtcggatattatttattctagtatttggaacacgaaatagatagaatggatcaagaaaaaaaatgaaactatgattcatattaactattcagacctcacaaccagactgaaaaaaatcaagtagttcttaataaaaagaaaaaaagaaaaattcttccttccaattttgtttgcccaaaattgggattttgcatggatttgcttgatctagatgtaaactagaatgccttctcatggtaagtgcaaatcctcgaatgatgaatgtatatagtatctagaaaatacaaatgtcaacatgtaagcacttagcagtaaaagcccgatttatactcacagcaaggaatgcagtatcattccaaacggctctctctagcagccgctttgccttgttcccaacaaaaatgggggaggttggcatagcttcaagtaagttctgatcaagaagtactttattgctaccatttgagtcggggttatatcttgatcttgtagatccctttaaatcatacaatcttgtcacatgacgttcaaacagaagattttccatcactagaacatccatcttcatctcctttccacctttcaggctcttaacctatgtgacatcataggattagactcagtaaaaaaaatctcacaaaaggtactgaagattaaaacaaatgttatatacaaaatccaaaaacagcactttaacaagataactttaattctggatgcaatagtgagatgatgctttcaatcctttgaaatatatagg

SEQ ID NO: 18936 - DNA, 27850 bp, Oryza sativa
caaatgtgccatacctcatctcaataatcttttgtttggctctccaggcctttgcatagcttatggtgtacttgaatttgttctcgatgtgcctaataattgattttggttcaaagccaatgttaccaacaacactgttgtacatctcacttgccacaaaagctgaagtgatgtttcggtgatacttctccaccccttgtaagtagcacttgtgctcggtcacaatgctaactttccaataatcatttcatttacccttatatgcatggacacgccacggacaatcttccttcatgcacctcacttcatacacataatttgttgacttgaccaccctaaactctctctgcaaggaaactgcccaatgcttcaccgcctccttcatctcatccttatgagcataccttgcaccgtcaattacctcgttctccttatactcccagggtacatgatcaccctctgatataacaagtccagagaagtcctcatttgcccaatcagtggccattacatcacctttctcatcggatgatgcgtcgtcgtccgcttcctcattatccgaatcttccctctccatttcatcaacaattataccgactctctccccctcatccgccatgcccatggcctgctcctcccttggttgattttcctcattttgcatcgatggtccaacaacatcccctgcattaataggaccctctacatcttcggtttgcattgaaacatttatatctttctcttgtaccgacacaaatataacgaggggccatgaccgttcaaaagccatttccacataccgtctccaagcagcagtgctgtccatcggcattagttcccaaaaataaccttctgttgcacgactcactacaactgatactgacattgtgtagacttcttggtctattctaaatcctctcaacaaccaactataaattgactgaaatgttctctccgcaggcctatcgatgcccttagatgtcattacaaaatctgacagatcaacaccatctggaccaaatctaatatttccttcaccgtgaactatctgaaatgtgaccttatttgacattgtgcttgatgaaaacaataactgcgttaacctcgcatttctgtactacgccctaagttacattctctacaatattgttctccaaaattctaaaagtaggttacattctccagatcaaactaaactacatcttacaattaacactactgtctatgtctcaattcatactattatattctatgctctagatctacacatatgtgctgtgtgctacagatatgctaaaatatatggaactaaaactaaaacgcaacatatatactcaaacataacatattagtacaaatgcaaaagatgtatgggagcaaacctgtgatgaagtgagcgaaccagcagggcttcgccgctccccttctgctgccctcccctctctctctttcgttttttttggatttttagtgaatataatgaaatttcagagaggggggactgggctttatagggggaggcaaaaatcgccctcccccagggcggcaagggggccgcctgcaaatttcgttgacggccgtcgcccgagagcgaacggccgtctgccacgtcattttcgccgccctctgggatggcgatttttaaaaatcgccctcccagagggcggtaggcgaccacttccgtcaattttcaaaatggaaaattatttttgtaaaacttttaataaaaaaaattaaaaataaaaaaaattccgctctccgtgcccaagccacgccggtgacagccttcactcctacctcatcctcctccaatcaggcatgccaacgctctcaacttctccttcatggcagctagctaggcttcaagctggccactctagtcaccatggcgtcactcaccgagctcccctcctggccactgttcctcgaccccgagctcacggcctcaatggcgtcctgccatgctttgttcctgcacagttcttgtgggtccaatagctgctcactagcttcccattcgctcggccttggagcgcgtgtgtagtcggcgacaaattagtcgccggctcacactctctctcctctaatctttcttccagctcaccaaagaaatccaccgtggatgcattatcaccagtcagaatagcttattgtacctgctctaaagattcccacgaccagtccccacgatagttgaggcccaactgctccttctactgactctcacgcactaattactactccacttacatggttttctcctataccgaccgcaacgtacacaaacctccatgatgccgacgccgacgacgatcatctgcctcctcgccttcctcgccgtcctcgccgccgccacgggcgacggcacgacgacgacgacgcacctccacttctacatccacgagacgttcgcgggcgacaacgccaccacggcctccctggcgccgtccccgctcgccgtcgccggcagcaactcgtcgttcgggagcgtgggcgccctggacgacgagctccgggagggctcggacgcggcgtcgcggtacctgggccgggtggagggcctcgtcgtgcaggccgacctggggaacccggcggcggcgtggacgctgctgaccctcgccttcgccggcggggactacaacgggagcacgctggtgctggacggccgcgtcgacttcggcgccgccggcgacatggagcgcgccgtggtgggcggcacggggaggttccggcgggcgagggggtacagcctcatgaccaagttcggcaaccccacgcccaacaccggcgtcttcgagatggacgtctacgtcaccaccatggcctagctagctagcttagctgcattgcagcttaattactttattactcatcttgattgtaattaagtcgtcgttaagctcggccattctggcccgtcgatgctttcaactagttcgcaattgcattgcatgcgggctgtgaatttgtgatgtgttctgaggaaaaaataaaaattcgggattttgttttttgcgtccagtactcgtcttcgtcgaaagaataacgagaatgttgaagcaaaagtgtgtgaccatgcatggaaatttctttacatgatttcacctggttagtgtttgccgttggtggtcggaagcattttaagggcaacaggatatcgctagttagtgtttacatggaaatttctttacatgatttcacctggttaattagtgtggacgcctctcctcttatgtgaactgccactaaaatgtgggttcaagagctgtggagtccacatgtcagtcaccacgtccctctgactttacgtcaagggatcccaatccctctaacgtatacttcctcttcctctggttcgataattcttttaagttttaaatacggttgaagttaaagacactataacacggcaaaaaattatattataagactggctctgaaatcgatatcggtagctgaacacaaaataacaccatagaagatttaaacttgatgacgacaccagagtataatactaccatagtatttgttaatgaggttaagccaaatcttacgtccttgggaactgtttatgggtgttccttctcacctatctagcacagtgtattcaaatatcagacacacgacaaaaccattggccagctgtacccacacctatgctactatcaccatgctactacagtaggtgtgtctctctaagcaatggaaaatacagaataaaaattgagggtatgctagactgaaagtctaagtcggtaatgctaaaataagacacataacattatcaaatcaaatgtaacactttcatgattagatagaaaaacatatttaattataaaagacgtacgtaccttgactaaccagtagtcaagtacttcctccatctacttttgataggcatatttctaaatctgaaaaatttatttttgatagacatttcaatccaacaatctagatcttaatgactttctcggatttaatgtgtgactctctattcttccacacaaaattgtctacatgggcattgagaaatataaatattaatgaatcgcttgtttacgaggaataactagtaggatgtttaaatggatgataagtagaattgcttattcttagtctgtgtgccaagatgaaatattactatcaaaagtagatggagggagtaagatgctaattttcttagatctttggtaaagagcaaagtgaacagccacctggatatattaatgagcacatttagtaacgcatgaatggtagaagtaaacacacattaactaaaagaagcaacgtgtcattgcaatttattcttcaggtcgacaaagatactttgcgggttttcaaggcttagaattgcttcatgattgcatcataatcgatacttttgaatatctctagctcagtactcactcattcctaaattgatcatcatataataaaattttaaatttctcaaattgattatcatataaccacatgtacatggatttcattataatacaactaatgcagcacgtgagaatatgtgcatgctaacgtgtgattgatatggtgttttaatcgatacatatattgtgggagaatgtgtacatggtgtcttaattgatgtaatttaaattattcttagtcttggtatataaacatatatgatgatcaatttgggaaggagggagtatattatactttcaaactattaagccaattatctgatatcttatttgcgcagatctgcagtcttgataattttcattgctgaaaatatgcactcaacagagatacaccaatgggcaatggaagctcaatgaaacgatgcaccaatggaaattaatgttctatgcttagtggtcttaagtcttaaccgtcagctgagcaaggcttgagatattagtacattcattaaattcatcagttctcctaacattaataagaatgaaggtttgaagctgacttcttagcaataatcagtcagatgttgtgaaatctccagaatatatctttgcaagtggaacaagcttattaacattgaattttgaggaggagtttcttggatcaaggcaagacatgcataccacaagctcggaggagacttcattgaagtgatgattcatttcatgcaaagttgcatctaagcctgctaatggactgggtttaagtggatatagtgggttggatttcagtgtgggttagctttgggcgggtggaaatgggttgctgcacctgatggactggactggtttggatggagatgggaaatggtttggattggtttagttttggctgcaaaagtttggtcccagattggattcaacccatgggtatccactggattggccccaatcccatcgtctccttgagaagtcgacaaccacatcgccgccatcgctagctcgacttcgtcgccggtggcttgctaccttcctctccctcctctggcaaaccttctcccttcacaaagtccccaaaaaatcaaccctggctccggatcttctggctgcccgcggcaacagcgacggcatcgaaggccgtggccgcggccgccatcatgggggagaagggcggggcaacgtggggcttgtggcggacaatggtggtgcggtggtgcggacttgggggagaagtcctacggcggtgcagccgcggtggtcgcggctgtagtgctcacgagcctcgcgacggtgagtcggtgaacgcgctcgcggtggtcgcggcatcccagcgctggtgaggctccttccctgcggcggcgacgacgacgtggcgcacgggagcgccagatgctcccacgaccctgtacgagctctgcaagctgctcatcctccattgatgccctctgcaagctgctcatcctcccggagctgaccgaaggagggaggaggaagaagatgacgatgcctgttggtgttcagagtaatattgtgcatttcctttgggttggaaatgggttgagaatgggttgaatccatttgtctgcacttggtttggattggtttgggcttgctctgtgagtggattggattggtttggtttctgcaaactatgaattgaattggattggtttagaagtgtactatagatacaagtgaactggggcggttttggtctggatctcagtccattagcaggcttagttgcatcaataacgacatagaaaatgttaacattgtaataatgatattgagtcacttactcaccttgtactttctctgaacagagattaacccataactcaataagatcatccatgcatatttggcacatcaatcccatatcttgcaaacgctctttcacatccaagttcaaacccatagcttcaacggtatcatgatccttccgttgcatagcttttgatatagctcatttgtgatgctgaggtcttgttagggaaaaatttttagatttggttgtcacatagaacatacggacacacatttaaaataataaatatagtttaataaaaaaacaaactatagattttgctaggaaactacaagataaatttactaagcttaattaatccctcattagcaaatgtttactgtagcaccatattgtcaaatcatgacgcaattaggcttaaaagatccgtctcgcaatttacacgcaatatgtgtaattggttttttttactacatttaatacttcatatatgtgtccaaacattcgatatgatagcatgaaaatttttcttctggaagctaaacatgacctgagtaaagatattaagaaatgcatgatgaatataatacaaattcaaagcgctccatcttctttaccaaacctgcagctccaccatgatttgagtgctcacgagcatatccacttacagttaccagaacatccaccattgcctcccacaacattgttaaatttaactcgatgagttgtaccgtatgtccctaaaataccgatcaggtataatctgtctgtacatccctctttcttattgtcttgacagttttttttcataactcttctatttaataatcaatcctattttaaaaaataaaacaaatatattttgacgaggataccttgaaatattttaattggagagcactttatatgctaaaaataaatattctctcccttccaaactaaaactatttgtaccactcaagctttgtttcaaataagtggagctaactctctacacacctaccatttgatctcaccaattacaactatattcttcatttaatttcttaacatacatttctctctcaactaatcacaacttctcataattatttttacctactttgttaataaatacatccacatactctagctagtattttaggatggttggagtatatcaggccaatcccaacccaatgactagaatggtatccatagcattaaataagccgtcacttagaatgaaaaatgatgtggcaaatgaatgaatgaggaaagggaaggaaaccggttcttgcgtgagacatggtttcaacacaacatccaaaacattacgtgagataagtagtattaaatttaagtatggaacaagggtgtttgcattgaaagagtagtgtctaatacttcctcggtttcacgatgtaagactttctagcattgtccacattcatttagatgttaatgaatctagacatatgtatatttttagattcattaacatctatatgtacgtgggcaatgctaaaaagtcttacattgtgaaacagagggagtactagtttcttcgtgacatggagtttatgaaaactatgtatagtgtcttggcttgggactggcctgagaataattgtagcttgtgttgactctgtatgattggcatttgactggtaccgaggttggtacatattccaaagtttccaacaatccaacaactacaaccacaattcaacccaacaaaatatatactggctggctgacggtgtgcagagtacagagactaacaagacgatgaccacggcgacgccgaagatgaccctctgcctcctcgccatcctcgccgccatggtgacggaggcggtggcggcggccgcgggcgatggcaccacgacgacgcacctccatttctacatccacgagactgtcagaaaaaactcacgcgaattggctctcagtctctctgaaacacacacactgacgcttgtaggtgcagctacagctaactgaagaagttcagaaaaacagagtcgaacagaacaactgacgaacagagttggcgctgcgtaatacagtgcagcttttccggttttatcttctatttattcatctccacacggagtttgttgcatgtataacggaaaaaatcacgacaatctcggatcaaccatactgaccgcgccatccctcgatccgagccgagtcatcgcagctaattaaagaaggaagcaaatatgctagaacagaaaatgctattctaccggccagaattcagactccaacggaactctaaatgcaacaaaacaaaagagaatataaatgctccgggagggctccagcgcggagtcccagtacctcggccgcgcggagggcctcctcgtgcaggccgacctcgggaacctggcggcgctgtggaccatgctgaccctcgccttctctctcggtctctccgacgacggggactacaaggggagcacgctggtgttggacggccgcgtcgatttcggcggcggcggcgcggcggagcgcgccgtggtgggcggcacggggaggttccggcgggcgagggggtacagcctgatgaccaagtttggcaaccccacgcccagcaccggcgtcttcgagatggacacgtctacgtcaccgccatggcctagagctagcttaattagtttaggtctgtttgattcagcttagaattattataatctatattattagaagtaagctgaaaaaaacaagtataaattattatgctagattattataatctacaaaccagattactataatccaataatctcctctagagaagctttttctagattattgagtggctaaagacctactacccttaaatgcctcaaataatccagagaaacaaacaactcgtagattattttatgtcagtttattataattcagtttagagtaatctgatttaataatctagattataataattttaaactgaaacaaatagagcctatcttattgaatgaattgcactcgggttgtgaatttgtgatccgttcatcgtaggggggaaaatgaatgtcaactagaggtgaacacgcgcttcgcgcactgcaccagtggtgccaggagagggaaatcattgattacatctgttggttctggtaggtaactgaaacaaatgctatttgcaaggtctgtgaaggtcaagtataagctaacgacatggtgtgagatttaggtttagtgtagtgcaaaaaatgaagttctgtgacgtgagcatttatattgatagttgtcatagaggctaaaagctaatcacaacatatatgcagattgtggacagtcctaaatagcaaaatgtgccacatgttcgatggcaggatagacagtacatagtagttttatagtggtagcattgaaatagttctgctagatgagcacataggagtataggactataaaactatattacacatggctaaattctactaatatggtttggatgccttcaccgaattcacacaggggcccttttgttgatgtgcaaatggaagtggcacaaaaaggtaccaaccaaaagcaaagtaatgatcatccatactaaaaaaacaaacaggtaaacaatccaaactgttttcagtaattttctaataatcaggtatgtgaaccaaataatgcacacagcagcatatttattcaacaaagaaagttggaatggacggtattgtaggattgtaaaggtcaatctgtcaagttaacctattggtttctggttgtacatcttttacatagattataaaaggtatgtgattttaatacctaaatcatagcaagcacaataattttatgagcagatactatcagtatgtttaaaggaagagggtgaaagtgcaagctagtcaaataatacataacttagttaaaatgggattttaacctacagggcaacgctcatcgtcctaaactgaagctttatcatcccaaaccaatagttatattatcaagagtcctgaaaaaccacttctatggcaagagcaaataataacattagtcgtttcaaagaaaacttcaattttagaaccctaatcaagccaatcttttatatgctagtctaagcattacctaatcatcacatattaaataaaaaagggcataaatattagaagcattaggtagaagattcaaagtgagctgcaataaaaactggatgcatccaatgtagaacatgagaagcatctgaaggacaagtcagttacatttgtaaaatatcataggcattactgaatgcaaattagaaaacaatgtaacatcatatattttttatatcaagttaaattctgttgcacatcgtggggatgtcatgataatttaatatgttcagagttaatgtctattatgtcatgataattaattttttttatagagttaccaatcttcagctataacttgcaacagaattcttgttcacaaacaaccaaattatagaactaatatatgcctatttggtaaacaaataatcaactaaattttcacttccgtaaagaacatgtcaaatataatttaaacagtgaactcaaggtaggcaacaaacaacgatcagccaaactggttgccagtggtgccatttctcctcctggaggatggcaccaatgcaggcatcctttgttctgatctactatgttgtgtgcacctggagtcttggcgtgttaaggcaggcatcagcctatcatagcctagttttgctactgaaaccattgcaccagctaaagcctacaagaataagagaagtggacagctatgccagtcctttgatcttgcaccaatccatcatgttttctttggttcttctaatattattcgcaaagcaataatgtaatccattgtaatgcagcagctgattggcgttgggaagattagatagcttagaatagaattgaagctatagatggattgtgcaacaaattgagataaattgattttctatagtgcaaaagagcagacacatagcgagctttagtaatcacatccaaaaataatacagagaaaattacagttcattaatttatttttggtgcaacagtaatatacagttctgattcagacctgtacaacctttatcaaatgcacttgtatatttttggtacaacagtaatatatagcagcagtagtagtgattagtgtgattagtgtataagtttagtctcagattctgcatgtaaaaggtcatctaatgtcaagttacaaacatgctcgttataaattaattttatagaagtcactaccttcaaggggcataattagtaatgaacaaactaaaaatgcaaagccacaatctattttgatgaagatgcatgactacgtttggatggagcattatcaaattatccacaaaaaatattgtacattgctatattttgctggaacaaatcagcatactcatacttcaacaaaagatatatcaatttcttatacttggaaacaaagaatcttatgcattaactaatttgtaatttaaagtcatcagcatgctacaatggatcgtagatgaaccccttaaagaaatgcacagccaaattgacagcaacactaccaaagcaaagctcgccgccatcaaagtggggccacattcggtggagatgcaacctggttgtggtggcagatgaccttagatgctgtgccagaggaccagcagggcagcacggccgtgacgcaaggggatggaggtggcagcatcctctaggaaccccgcaccgatgcccttcactgctttgcgtaagctcaacaaagcttcactacaagctgcattcacacgctcacattcatagtgttacactgatttaaacttgcaaagaaaaattcaatacacatatcttcatcggtccaaattaatcacagtatcacactaagaccaccaacttggcaaagatataacatgcagtatgaaattccagaggaaactttcctctcctcacctccttccaaaaaggcagaagaagaggtaggatggagctgacgaggagccctccatgcggcagatccagcagcacccgccgtactggagaccgccgctgtccggaacgggacaccaatgccacagatcatgcagctccctctccaaatcggttcaccgacctcctggatccagtgattccccgtctcctcgacgtcccacacgcacgtccgtggccgcctaatcgcaggcatccgctgatccggaaatgaacaggatggagagggagagggagagggagagaggggcagtgccgggcatagaggtagaagagtagaaggcggctcctggcttcccctcgcttcagggcggccggatctgccggcgaggaggccggagtcaccggatccgacagtcccggcctcctcgatggcggatgcggcgcgggagcgagaggatggcgatggcaggacgacggcgcggcgacagcaacagctcgcagtagggagtgcgcgggggaggtcgccaactgcgggaagaagaggatgaggggacggcacgcggcggcggcggcggccgtcgctagggcaggagagagagcggagcgagaggagaggaggcagaggaatggtggcggctagggtttggggaaaggggtgagggttgtttttgttttgcaaaaacacccctaaacttctagttttcagagcgcggttcaattttccgttttttcgcttcttcatatagaatattgttttcttaagaggtcctctaagtaagaacgcacaacattagaactaaggaccagggatctataattatcaagtaaatgaagggtgtttttgcaaaatcactaacgacgacacgggtgtgcgagagctcacgaaaaccacccgccatccagcgcctcgctgacgcgtcggcacgcgcaggtggccacgccagctcaaaaatctccaggagtcgcaaatctcggcaggtttgtatataagcgatatttcaagtggtaaataagaaaaccgtcctggttacagtggtatatatataaagaattctctcctaatattaataatagtaggcctgatcatattttctcttttgaataccccggtacttggtttagcattggattctttgctagcagtcgtgctaatttgtgtatacaacgtactctaaagtctaaacatgaggaattcgactcatgcagttactagtgtgaccgtaagttaagcagtgctagtatattcttcttggcactataactgtatcattgtagcagccgatttgaacctttgactgagaaatggatggtgtaaattgtgcgcagttacaatagtaactgaaagggattgaaagaagatcgatggaaatggagatttctctgaaccaaatgactgtggtctagagaaaaactatcagtttacgtactgtatttcagttcccgctgttattattggagtatgatcccatcagttcaggatgcaaatgatgtaatgtagagtttattttttctaatcaagcctttggtactgctctttaagttcacttggcacgggcagcctggattggtctggtctccagccacatttgtacgccagtgtgggctgggcaaggattgtaacggggcaacgggcctctatgttcacctgcgatgggttttaacattaacaccactctcgggcccatcgaagcatttccacagacatgcggatgttgttacgcgaacaatatatatggagataagattcttttatgtggtccaatccgaatcagttttagagataaatccgttttaagtatctctctacctataaataaagcaacagaaatatccattgtacaaaaaatcattgataataaagataaaacttcactcctacatctgagttcattgtctcatgtgatgtgattgttcgagaagagatacgggtttctacatcctctcagcgccttattttttgcaagagagaagggagcggatcttcacagggcctcatgttttttaaggctatgtttggttaatccccaatagggagggggattggaggggatttattcaacaactattgtagtatgaaattattccccctagaacccctccaatccccttcaaccccctctaaactgaataaggcctaagagagaagagagcggatcttctcgacgccttattttctacaagagagaagggagcggatctgaggatctatcgatgtagctattctacaacatgttatcaacatgattctagttctactactggtactatgaaagtcctactgaaattgccggagtatctcggcaggatggtgagggttgcattcattgtagctcaaagaagcattggacatgcgactgcgtacatagaacctcacctcatcgagatgtaccaggagaaatatcataagacttctacttttagattcaccttaagaaatatctcataacatataattcacatgttattaatttacatgattttttagaaattatatatatctatataaaaactttggacaaatctaaacggcgggagtataatgagaagaggggaggtaataaaatgaaaacaatatttaagaaaaaaagacttaaaatacatattcatatatttatgctaataaaatttataaaaacaataaataatgaccgtttgaataaaacttactagaattaaatattcacaatatatgaaagtaatagatgcccacaagttataacacagatggcccccgaatagtgctagacaaagatgaaaaccaggaaaacgaaatcttgagacatgtacaataacttataaattatatattcgacacttactgtaatagtgtaagtaaaatagtgctaacaagaaaaataggcttcaaatattagaactggtacgctgtacgtttctaacctacccttagaatattatatagtgtgcctaaatatgtgattacttgtaggggtaaacttggaaaacttacttgcaatgcaccccaattcccttaattatcgatattcttgcatttcagatgacaaattaatagacggcaaaagaatacaatcgatcgaagaagtcccttccatgaatcataatcgaaagcaataatataaattaaaaaggaaaaccacagatccacagctactgaaattgggatgccgcggaccgatcgattggaatttggaaatcgaatcgaaagatggatatgatgctgcgtgttcgtcctggatcagaactcaaaatggatggacgtagatgccgatggactcgaggtagggccccgcgcgggcgaagaagccgacgacgctgccgttgttgaggacggggacggcgaagggcgtgccggcgccgttgccgaacggcccgatggtgcgttggctggtgacgagcttgagcgaggtgacgacgtgggtgtagtccccgatgggccccacgagccgtgcacctccttcacgtactccgatggctcgaacgtgatctgcgtcacgttaatcgagttaaggttgctatattttaaaacggatctgcagatactcttttcgttaaaaaaagaatcttaggttccatattgattcttttttgaacctagagtgtagttacgtacggtctactcggagaggccgccttggccgccccaggggccgatggtgtggaggttcttgtccttgtcgaggtaggagaagagatgcagtcgatgaccttgccgtagcggagccagaagccctccagccgctgcggcgccaccgtcacgtcgtactccttcccgccgtggtcgccgccccacgcacccagcttcaccagcgagccggcctgcgcatgcaaagatatatacaaatcgatcagacagtacagatcagctacaactgtacaaatagctgtgtattatttggccatggatgcaaatgcagaagagatcaggatcatgctgagcaagcatggaccgaccatttctcgtttgcagctgcaacccaacccccaaccacgacacaaagatggatatatagatcgattggcggctggtttaattagcttggttgctttgggtcgtcgtgtccaactgcgaggtggagagagctatatagcctccaatttatacaacactctagagctagtatgtttaactgctagcttcaaattatttatttaaattatttatagttaatctaatagctaattcatataataagttaactataaatatatactacattattaataataaaacctttagcgttttagagtacgtactgctggctataaatatgtagcacgtttctcttctctcttctcttttatctcctccacatatgtttatggctgatttatagtatattcttgtacctgctcttcttggttgcagtgggccgtgcaaacaaaagtgagatttgtgtgcaaactattggttgcatatccgtgcaaatttatctagactcgatcgtgtgcgaggaccgacggcctaacctttgcatcaggggtagctgcgttccgtggccagcgtgacgccacgccggtgcggcacgccgtgactcgtccatcaatgcctgcacggccgtactgcaggccccggctactgatttttattttctttcttttcttttcttttcttgctacaagtagtgaacatattttgatgctttggtcgactggagtggatgaaaacggtaggaaatggtcggaaacagtattatattattttattattttttcgaaaacaaatggaaatagtcagaaaatttctatatttatgaatttatctatttagtatcaacttcaatgccacgccgacagaaattaaaaaaactaaattttaaaaacggtaaccatcggtaaaaatattattattatattagttttgtggaaacggtatcggtacggttgggaaatttccataccgttttcacccctagactggacactgtcgattctgtggagtaaatttcagaaaatacaaatgatcgaatctatcactttgtgctacagtttttactaggttcataaaactgcttcatatcaaaaaaaaatacgggttggttcactttatcatcactttcaaccttattaaattttggtggtacttttggtagttccgaaacttccacccatgcatactaccaaattttataaagacgtcaactaaatatatctaacaatataaaaaatttgataatatcaaaacttaaaaaaaatagatcaaattggcaacaaagtgaacaagcactacaactccatcactattggttctaaccaaaccgacagtaatgagctgagagtggttgctctttgtgggttagtgaagggagctagagtatgggcgtacgatttggaggataaaaggtcgaaaaacgtagaaacatgattcccataaaaatgaacactattcatccatgtaatttgtaggattttagcataagaaattttcatatgtctatgattcctaagaaatttcataggacaatttacatccactcaggctatgttcttttggggatgttgagaacctttccttcctatacataaaacggagtagtggattagtgtttgattaaaaaagaattaactatataaatagattaatattttataaaaaacaacattcaaagttctgcataaaatggaccgtttagcaattcagtaagcatgcatgcatgcgaaaaatgaaggaggagaagttgagaaaagtgaagtataaaacacaactttaaagctcttttttctattcctacacttaggttcgagacaaagcctcacgaggtcataaaaatacttcctccgttttattataatattgagtaaatttcacaaaaccacatatactttggtcaaattatcacaaaactacaaatttaagatgatgtaaaaaaaccacatatttaataataaaattattataaaacaacagattttagggttgaagtctttagcactgatattatgtttgagttataatatttatgttttgtgattaaattgatctaaaacatgtagttctgtgataactttgttactaaatttatagttttgcgatagtgcaccctatatgtgtagttctatggtaaatttactgttaaatatgttgttttgtgatacatcatgttaaatatatagttttgtgataatttgactaaagtacatgtagttttgtggaatttactctataatattactcaagtcactttgtttttttaattaaatttttttaagcttggccaagcttatataataatataacaatacttttaatacaaaacaaacatattatcaaaatatattaaatattagttttagtaaaatattataaatgttgctaaatttttctttagaattagtcgaacttaaaaaaattgacgatgaaaaaaaatcaaagccacctatgatatgaaaataaagggagtatgaaacagttcagaacattcaagcatggcgaagcggctggctagccgtgtgcgtgtagcaattgatttgtaatactagcatatgtcacatcatatgctaagttggtttatctcaagatagtgggagtataatcctacctccatcgtaaaatgttgctacctagtacatagtagaacatcatctaatactgcgaatctgaaaagtctagattcgtaatactataatatatcacattcgattaaaattttctatactttagaacggaagaaacaataatttagaacggatatagtactctctctatttaaagatgcgaaggtaggagctcccgtgccactattttcatggcagcatccacaggttatatatgtactagccatcagcccatcatttccttgtttctccgtactagccataatgagtacagcacttggtggttgatccagatgacactcaacctaccgttattccaaactactccatccatccaagaaataaataaatttagtttaagataggttaggatattatattacgtagatcaacaaatcttaacataagataatactccctcgtctcataatataagaagtttaatttagagttggacacgattattaagaaagtgggtaaaagtgaatggtggagagttgtaattgaatgagcagtggagcaatgtgggaaaagtgaatggtagagggttatgattagttgagaagagaatgttggtggagaagttgttatattttaggacaaatcttgagggctaaaagttgttatattttaggacggaggaagtgtcttattttattttagatttatttattttgaaacagaaggagcttggatcaatgaatacttaatttatttgttgaagcatggtgaacagatgaagtgatgacacctagctagttaaatgtaaaaccaaattgctgagaacatatgccgtggtttttctttcgtgtggttttcatttgtggacaagaacttagtgcatcgtgctagattgattcatcggcttaattccttcgttaccacgcaccggcaaggagagtgagcgcgccctgggcagtatacaagccacattgcttatgattatgattataaatcaaactttaaattttaaaattaattttgtgtttttattattttataatacttgcttctaaactgttattccataaactatttttattgttaataaatcgtacacataagcatgaggataattaaaatgagtctttgtcaccacactattgctgttgtggaaacttgcatggcgcagtaataatgtttttgggagagtgtttgtgcggccgcttatacggctgcgtttagaaattcttccctccacacgtaaaacgggatgactcattagcacataattaattaaaatattagctctaaaaacttaaaaactgaattaatatgattttttaaataactttcatatagacttttttaaagaaaaaacacacaccgtctagcaattcagaaggcatgggtgcggaaaaagagggaatagaagttgagaaactaggggggaagaacacaaccatctatcgtttctcaattatgtgttttgcaatgaatctacaacatttttaaggctacatatttgtcaccaagcctaaagtaggatatgttaaaaatggatttcatgttaatttgctgctgctaatacattgatctgctatttcctagtaataaaaggaagaaccggtgatgtggtagggtccgcccaccataatttaaattacgatgcctataaatatttcacacatgctgatttgtttttaatagaaaattagtgagacttgtaagttgccgctatttttcaccatctctttggattatatgttagggagggtacattcgcgaatcgccactgtatgtatgcttgggtgtcttcctaaaatcttacggaattactccattagtcatccaaattaataatatttaagtaaaatatggtgattactactagaaaagaaactattgtcaatgacaaggggatgcagcaaaagagccctttaattctgtgagcacataatactgcactgttattattcttgaatgcaccatagtttgagaaacattaggccataaatcaaaaaaaatatgaaacagttgagaacacattcaaattaagcacggccgggtggtaactggatggatcatatcatatcggtggtgttgatcaaattcaattcaattcatttctcggaggggatgcacgggttgacgtagacgccgatggcctccaggtaggcgccggcgcggacgaagaagccgacgacgccgccgtcgccgcgcacggggacgctgaagggcgtcccggcgccgtagccgaagggcccgatggtgcggcggtcggtgacgagcttgagcgaggtgacgaggctgtcccggtcgccgaacggccccaccgtgccgtgcacctccgtgacgcgctcgccggcgtcgaacgtgaactccgccaccgtggcgccggggggccgctccccggcggcgagcttcctcgccaccgcctcggggagctcggcgccgtcgccgccccacggcccgacggagtggagctcgccgtcgccgtcgccgccgtcgtaggtgaaggcgatggagtcgatgatcttgccgtggcggagggacacgctccgcagccgccgcggcgccaccgtcacgtcgtggtcgcggccgccgtagtcgccgccccacggcccgatcttcgccaccgtcgacccggcctgcagttgcacccacacaaattgtaattcattagttgctgccgccattgacgccgatcgatcgagcaaacattgcattgcttgtgtaatcacagaccatttcgtcgatgaagctagctagcagaacgagaaaaaccaagaagagggcgagatgagatgggatgggctcgcggagtacacgcacgaaatcgggctcgatttatagggtgcaaaatctgaaaattatctcgtgctcgtcacctgcgcagctgcacctaacggaatcgagagaccatcgcgtagcatacacgggagtacgggacaggacaaggggcaggggtagatgagttccatggctagttttggtgccacgttatgtggttctgcgtcacctcctgccataacatactgcaatcatcacgtcgtacattcggtatactctaacaatgggccattagtgctgggaagaacgatattgccttcatccttagaacgtaaaatggttttaagctggaatatggatattaagaaaaatcgtgaaattaaatataagaatgttataattggttgcgaatagtgtagaatttaaatggtacaagttttgtgggtgattgggaatagaaatgtaggtaaagaaattgttatatctatctcttatatactatctcttatatactataagtccataaaactttctacaaatgctcctataccgccacgtggacttttaaaagtactccaaaacagccatgtggcactctaattaaccagtggacctactattttagattttcatctattagatttacacttatatggtggacccgacattatatgtcattagatccatttttcaaaaaaaaaaaaatcacatcccctcccgtgtcgcttatgtacgtctccgtgtacgccctccccccttttttttttgaccgggtgtacgccctcccctttgttcattttctctcctatttttatgctattttagttagatggaaatcacaattatttataatatgtttttagaaaataaaactaaatcattgtcctatacacgtacatatagtacgtcctcttccccatgttccttggccggtgtccaccctccttttttaattatattatttaaattcaaattagaccaaacatttttgaccattaaattattagttttcactattagttcttatcttcgagaaaagaaatatgtatgtttccctctccctgtgcacgtatttctatacctaattaaaaaataagcaaagcttccggtaaaaaaaatttcatccgtcctttcctttttcaccgttttcctctttttttccgatccgtttgcttttcgttttccccttttttttttggttttccgttttttcctttccttccgtctactttttttcccatttgttctcgccccttttttccttttttttctctgcctgcttttttttccgtttctctccgtccgtctattttttccttccattttttttacattttccctcttttttcgtttttttatccgttattttatttttactttttttttggtaggatttttttatctgccatattttttcgtcattggatcaaaccctagcgctgtcgtcacgtcgacaaaaatcaattagtttcccatgctttccctcattcaattagttgcaaaaatcaattccccactactctctcatcattttctcatgattttccacattcaattctactttaattcaccgaatttaatctctaattgaaagtcattttttatcaagttttgcggattcactccgattttgataaaaacaaaaagaggagatcgagtgtatcaaaagtcctcaaccaattttagaagatcgagacagattcgaccgaatttgatggggaggatcggttttggcatcgtatggacacaagactgtcttctagaggttgaagacggcagttgactatgtgagctggaattgcagctacacttgtgggttaggtcttagagaggcaggagaggtaggcccagcagagggaggtagaggactgggctaggactataaaggaaataaggaatgagtatttgtccaaaaccaaagaaaaatgtacagcgatccaaaaataattttacccgttgcaacgcacgggtattttttctagtaagtttcaaaaagacaaaaaaaaaaaaagcatcccttccgtctgaggggggatcccatctccctgctgtctctcctatttctcttctattctttagctatcaaccaaatatataaaaaaaatactccctccatattatgacgccgttgtctttttatcaatgtttgactattcgtcttattcaaaatttttgtacaaatataaaattatttatgtcatgcttaaagaacatttgatgataaatcaaatcacaataaaataaatgataattacataaactttttgaataagacgaatggtcaaacgttggtcaaagagttaacggctttatacattaaaatacagagggagtaataattagatagataaacaatcataactctcgagtacatatccaatttttaatttgtttaaactattatttatttaaatgttatcatatgtttctcttaaaaaattataatacgtcacctggatacggcgaacccaagaaagaattattagggcatcgcatagatatataccctttctttcagtggcgaggctagcaaaaaattatcagggtactacacatataaattatgcaattgttgattgatatatattgattaatatgaaatgaatatagctagaatcgaataatctacgcaggaaggtgaatgtagttaggccgatgtatcttttgcatatcaatcaaacaaaaacaagctattataaaaaaatgtacatatattttgtcatcttaaaccatttaacgaacatacgccgtgaataaattttcaaataaaagaaacattaaaaataaaataaacatgtattatgtgatcttaagttattccacaaaattgcatagctatatcagattgacggtgttaaaataaaaattataaatgcaaccatgaaaataaatttatgcataaatttaatttatctagggaccacactcctacactttgaatgtcatccaaattgtcataaaaaattgtaaaataatttaacaacatatattacatcatcatacattactttgcaagcatgcatagaaaaaatagatatataatatgtaagtgaaaagaacaaatttaactatgaataacataaaaattataaaaaaaaattgtacctttagttggatgcaataatatctaattaattatgtcttttgaaatatgctcaaccgacgagataaattaaatcggctgatttgtacgtaagtgttctaaaatatagtatacattaccatttaatggacttagaggtaaaaaacaaaagaatattactatggcttccatatcttttagatataaagataaattagtctattttatatgcatagaccattaaaaatgtgaatactcctatatatgaatattaataggctacgagcatgtccgttgtttgtacgcacgcataaccaactttaaaattcatttcgattttctgatatattttactatgtatgaatattaatattatttagattgactatagtttttcttttaactattatacgggtctcacgtatcatagagaaacaatgtttacggtaagtatatttcttccatatttactaattcacatgcaagcatataacaaattatatgcatatgaaccaattaaagtgatgacgatggtacaaataatatacatttgtcagtagtaaatgtttcgcgaggtttcttaagaaaatagaaacaatggatcgaacatccattattatatattaaaagcacattaaatttcctacaaacgctctcaaaccgccacatgtgactcctataaacgttcctaagtcaccacgtggcgctctaataaattagaggaatttctaataattcttagaaaaagaaaaacatctaaccattgattttactttaaactcagttgtcggtgatatgggcccgggggtatcacgttgagagggaggaggccgcccccaatcccacgtggcaccccccgaggggggtcgagcccggggtggagcggcagctgccccctcccagcttggggttgggccgccccgaaccccatgtggctcccctcgagggggtcgagcctgggccgcagcggcagctgccccctcatagcttggggtcgggccgttcccgaacccacgtggctccccccgaggggggtcgagcctggggtggagcggcggctgccccctcccagcttggggtcgggctgccccgaccccctccacgtatcagcccacgtgtacagggttaggtgggcgtgcctaacgcccaccttgctacatttaaagcggtccatgcagccgcgccaagctgcatttaatgcggcgtgctgcgcatcagaccggtctgtgactggtcgaatgaccgatgggactacgactgtatacccctgccctgtcagtgtgtcaagcggcgtgcggcgtgctccgtcccatcccatcataatgatgaggggcttcacagcctcttatcccggtcagagctggtccaaccactctgaactgatccgggttcccgtttcctggtacgaacgggaacccggaagtcctcatccattaaacggtgaatgacaagggcgccccgcatgatttgatgggccccgcgcagcagccgacgtgcagatagcttctgggctaaggcacaagacatgtaattaatatagagaatattttttcttctccctaggtagcactcacagcacatgtggtatccccttagaatataaaaggaggaccatgcctagcgggaaagggggatcgaactctggatccctaagccaaagcttgtctagccctagcttgtacaccaaggattcagagactttctaagcacagaagaatcatgatacacacaggagtagggtgttacgcttcatagcggcccgaacctgtataatccctctctcactttctctctgatctccatcttgtgggcctagctcccgcaaattcaccgcagttgcgtcgaaagagacttcttaggatttcacccgctcccccggtcgaactcacaaaggggggcctcacagcctcccgctagagaggatcacccctcgacattagtagacccactattttcgaccattaaatttgctaacaaaaagtaaaagcccctaaggcccataggggctgtccatatcgtttacgcgtatggtgcacgtacatacgctacatcatcccctcttatatattcaagctcccctccactgtatagaaaatatattttgtgataatctaaatcatagagctaatattttatgtacatcattagattatttattacaaaatttataattcaagacccaaaccattggatttatctcaaaggaaactgaattcctcccctcctcatgtcgcacgtacatgtgcatgtctcccggaagaaaaatcaggatatatctactctatattcattgatgcatatgtaaatatgtataacaaattaatatgaacccattaaaaggagggctagcttgatggtacattattaacaataatagtttttcgagatttattaaaaaaaagccccaaaacattcaattaaaaaagaaaaaacatattaccttttaatttgaacttaatttgttacacatgttttctaaacgaactaagtctatctccattttaaatggtgaagaagaaaatgataattacgtatacggatgcattaaatattacatagtagaaagttaacagatacctaacaaaagttatttaagcaaagtcggcaaataaatttatgaagaaaacatatttctgaagtttggcaagtatggttgatattcattcctggtaagtttttcaaatatagcctacgatatacatgcccgcgcaaatacgcgggctaccatcctagttttgaaataaattttgaaggttagaaattgttatatatttgaacgtctccgtctcgcagtttttaaaaacctgacagcgactactagttacttttaaatttgatcatttagctcttttttttaaaaaaaaatgcaaacgtcaaaaatatttttttgttattaaattactagaaaaaatgctcatgcgttgcaacgggtaaagacatttttttcgtgatgcctcaactattggaagccgaacaataaattgaaatattgggatcactatacattataattgaaaaaagccgaaacgttattttcgatacctccctacgctcggcttgaatctctacagcccagcacacaaaagggcccaagccacgagcacaagtagagttgcaggcccaactcacatagcctgcttcccttcattttcagccctagtctagttcaatacctccctacgctcggcctgtatctctgcagcacagcacacaaacgggcccaatccataagcacaagtggataaaaaaagcctaatcgaacataaaaaaacggtgaaaaaaaatagacgggccaaaaaatcatattcagttaaaactgattcttcaattaaaaccgaaaactgattcaaatatggatgacgtaccaaaataccagcaaaaacatgagaagtctggtgcctctgaagctagaataagatttggatgctttaaaggagtcaatgca

SEQ ID NO: 18937 - DNA, 1529 bp, Oryza sativa
ttgtcagagtgctgatgtaaagcccgtgatatttcatcaaagagaacctttgcacggtcaataacctgccaagatttggtgaaaaatgaaaatctcagcaatctaggaataacaaggagcagttttgccataaggaccaacttttggaccaagaatttgaaaagaagttcagctaacttaggaactttagatttattttccaaacctactattgctgcatgctacgcacctcatttgcttctttttgtatccaatccaaaggctggtgactgaaatcaagtttataaggcggtacatgaatagaatgaacattaattggcgcatatcggaagcatgccaccatttttccaaacctgcaagcataagtatgtgagaaaccaagtgctcacaacattgaattccagatgagattttaagccactcttcaataaactaactgagtttaatcaagaaaactatatgtagaccacttacccatagaaccgaaggcagtccctatggagagagtgaccacaactggctaccctacttgcagctgcatgatttgaaaagctaagttccaaaaatttaccaagtgacagaccccaagcagcatcagacatgacaatccttagagttgctggtggaaatccattgctccaagggcactttagacatctgtgccacatccaaatcttcccatccctttcccctggcaaaacgaattctgtatgttttctaactgatatcgttagacttccctgctgatgtgtgtagcaatggacatgagcttcaggtggtttgtcgcaggaaatgcactgataaccctgtatatatccatactaagtactgtaagacacgtgcagtacagtaagcaagaagttagaacaacaagtataagaaagaaaaaagggggaaacctgattaaataggcagtcacgcaaaaaccttccaagaggcttgtcaaagttaccataatactttatgcgtaacatatgtgaacgctcacaaatagttcctttccagacacatcgtatggataatgcgactaagatgctctgatgatcagaagccataatttcttccttatttgatgtgctctcatgtccttgattagtttctcattttgtacagcagtactaggcactggttgcaccatcaccacattgctgtttgtgacattttccacattagccaaatcaattgaaccatcaaaaggctcctttagattagcaaaattagtgatgttggtgctggcctcagatgtgccatgatgacaactaccatttgagttggctaaaactgtcgtcattgtgttaacatctgacatggttgaaccatactcatgataatcaccacaataccaatttttctctagagtagaatatgtgtatgaatgatccataagtacaccagatgttgtagctgaagttgcagttgccttctctattctatcaactgtcttgctgttcgaactaccgccgtagcagaccaagttccagaagaatgagagaaggtagttcgagtttgagtagtgcattcattggaca

SEQ ID NO: 18938 - DNA, 10777 bp, Oryza sativa
aatgaccaagcttctgagacggtaggagatcaatagaaggaacgatatgagcatttgtgcaacgagctattcgatccaaaaggggcctctttatatttaaaacgagtgatatgttcttttctagtagcaaatcctgagcatagcgagaaactgtatgttcaaccaaaagcaagttaggcttttgagcaacaatcttcgcgactgccattttaagatgatccgtttcctgtatattggagaaaacaagcataaggtcattgaaagcttgatattgtatacaaaaaatatgaaaaaggttcatgaacctgctggagcaacgtgtcaatgcttgatagctgattcgtgactcgctggtactcaagagcacctgctagtaggaggagacgaggcttctctattctggatgtcatgcgcctatgtgcaacattcttcttacagactactccttttacaacagtgctgaaaaagcaattggatgcaggcttcagataataagtaaactgattaaatgttacatgaagataaggaatttattgatcaaactaatactacctgatggtcaaacaatatgaagggaattatatgtaagtaggattaagataccaatagggatcaaacatttacattatgaactgtgaaaagacattcacctttcactacggtgcccacacgctaagcatttgaccttaacatatccaccaggatccatgccaccaccttggcttgtgtctggtctgagaaagtttgcagcttcccatgatactgaagtaacaatctccaaccaacctgtttcatcaccctcgtgtaatgaaatattctccacctgcaacagttgtgaaatcaaagccctgaaatgcccatcgacaacattcttcattactttcttatgttcttcacttgaccgatctctgtttcggaattcaccactaccaaagctactggatgatcgaatgcgacgctgctcactatcagctacaggctcatcgtcatcgtcatcatcaaacaatccaacttccatctcatcttcttcatcttctggttcaggaggaaaccaaaaaagttcattcttctcaaaatccaatggatttgtatcagtactttcaagagcataaatggacgaagcagccccacactcagaactattgtcaggatcaggttcatcatccatttttgtgacaggcaatgtgctggggaatccttggtcagtcgcatgagaggatacttctttagaaattacattttcttcaactgtcggagatattgttggattataggatgattcaagctcatcgaactcatctggaccataataatggtcattatgctgttgatgttgtacctgcctatcagagcagtaagcagaacactcttcttcttcatcatcactcctgaagaagactatcacacgatcagaaatccttgtaacttgccaattcatcaagtaacacataaggtaaaaaatcaatgaatattcagtgtcaaactcctgtgaagtaacaaagtaaataaaatatttttagccttctcaaccttctctaatataggtcatcatagaagatcgatacacttgtctcttgttttcgggtcatttgtccttgctgcttaaatgcgactatgctcatgaataatcaactcattttctcaatgttagtctaaataatttaactactttctcaattcttgtacacaaatctaaaacaacctatattttgagccgcaataagtattctttgaaggaagcaaagcatattctacaattcaaaatgggtttcatcatacatgtcatttcatagtaatacctgtttgtgtaatagccaaaatgaactgaagaagtctcatctttgtttgaaacagcggacatacttttctcaggcacatgggtgtctagcatatcatgacacactttgtcttgggaacttttgggtggactaatgctggaagcacgagccacatgttgatagtgtccagtagagtaagatccagctgttgtactaacactatttatggtgatagctgacttggtgctaaacagacttgcctcagacaaggaaggactaagcaatggcatcatctgcttgttagcagcggctctctcttgctcccattgcttaaagcaaaagttgcagacacgaattttgtccccttcatcgatatttctgtcagggccacttgaagctgggatggaatttgtggtgcacttgccacaaaaaatgcgaccacaacgccgacagtgatgcctgcggttgaatatggtgaactgtgtgtcacaatcataacagactctgcaactgtgatcaggcatccagaagtccctagagacattgtctgggtttgaccgacgtggcaaccacgacgtcaaaagctttactacatcagcaaaagttttatcagaggcatccatgggttgctgcaatggtaccacctaaaagagcaattcatacttgcatcctcatctgctgcaacaaaaatctaagaaattaagacgtacattagaacgtattaatgcaaaaactatccagaatttaatgcattacatacaagattatagacccacaagaaagcagttttgctatttatcagttgcctggcttttcttatctatcagtcatctaaacttgtgcaatatttttttttgttgttgtttgatactggtaacaaccaacatcaaagcttttttttttggtaaaatttagattagaaattcactacaataaaaaaacacataaatttgatttgttggatattaatctagtgttgaaaagtgttattgatagataagaaaaagccagacacttgacaaataaatagatggcccataaaattattattaataataatgaaaaagttagcaggagcataatggaactctaacaaatgtaagttttatatatactgacaaatctaacaaggtaatcgcctagactattactgtacacaaatatatctctccatgtttgcaagaaagcaacatatatctttctgtgtaaatgaagaacaaaatggaaaacggattaatgagcattcaagagccattgtgacatgacaatacctaaaagtgataatgaacaacaacacaacaatccctaaacaatctacaaacttaattcctgagttacgtgattccatcaggaaaggcgatagaaaaaaccgtgaattacatatttacacacactccttcagtgtggcaacatggcaacagcccgacggaatcaaataatgccaagcaatatacctaagaaatatcaggagatcgatcaggccaaccaccatctacagacctcgcccccacattgcgtcgggttccgcgggagcgggagatcgagcgagaagatggccgccaccgatggccaacacacacacaccccaccttacggaggcgacgcgagagctcccctcccctcccgaacacacccaaggcaccgtctcagcgtcctgtaccgccccccgcgcccgtgtcgcagcgaggcggcgggggcggggcggcggctcggagcgtgccgctgggcattcgtcgtcgtcggcggcggcggcgccaacacgcccgcgcgcgcggcctacgcggtgcagcgcgccgcgaccgccggcgggagaatcttccgggggggatcgaaattccgcgccgcgaatccggcgagaggaggagagcgacgaacttggaggagagagggaggagttttggtttctgttttgatttttttttggggggttaaattaaatgttttgttttggtgggcgtgggggcgcgagggtgacatgtggggccagggaggcgagcaagtcgcggaggggcccacaatgcgcgcccttttggaagcaaatgaggagctgcggttctcctcttcctcattttataacacaaggaatatttttaagatacttcgaggaggtggtaagtatacttaattagtcaaatggtgtgggtttaataatgctcgaggagcgagagacatgccagaatcctggaacatgcaattttgtttttattataactcttctgtcagtaatcatgttatgtacccattttagtaattctttttttctaacatacttcttccttcccaaaataagtgcagtcatggttttccgcgcccaactttgaccgttcgttttatttgaaaattttttgaaaaatttaaaaacataagttatgagtaaaatactattcatattttatcatctcataacaacaaaaatgctaattataaaaaaaatttaaataagacggacgattaaaattgggcgcggaaacttatggctgcacttattatgggacggaggcagtagattgcatgacaatttttgttgacacaaatcctacgggaaaaaaaagagatgttttaccttgaaccagaagacagcatggattacggtttaatgctactcctaattgcattgcataggagaggcgtgcgcaatggtggtggtgaggtgattgcgaatgcgatggggccgcagcgcgctacctcagcggcggctgtgggctcgtgtggtggggaagggagatagctcaagttgtgggcccgacaacgcgtgcgccgcggccgggctgagttgggaataagtccattttggctcccttacctagtgaccggatctaaatcgtatcgttaatccgtaataccggatatctcgacccctaactatatgaatttaaccggtgtaatttgactttctcggtggttttagagggcagttttgctaactggacacctacatgacggtgttgacccggttttcgtcccacatggcgttttttttaattctaatgccacgtaagcgtcacgtcaacactacgtgggatgaataccaagtcgacaccgccatgtaggtgccatatcaacgaaaccgtcctccaaaaccgttgagggattcaaagcgggcttattcccgctgagttgttggtcgggaagggcatcaatatgggccggtcaaagggagaaggatggtgatgggccattagtccatgaaggaagaggttggcccgtcaggctacactcatgggccagaagaaatggaggaggacagcctgattttggattctctggattttcatatgtggtaagtcagaggctaacagttaggggtggcaatttcttccgtgggccgggtcccctgcccccacctgcccctataggggtgggtgcgggtgacgatttaaccgtgggtgcgccagggccagggccctgcatttgtgtgggtgagggacggggggcggggggacataccacctgcgggcccggggggtatattacctcttaaaacatagcccattagaggctcaaaaaacacatctcagtgaaagtcatatataaccaaccagcagacctaaccctagccgacacacggaagctgagagcttgagatgcacgtcgagcggaggattcacgcgctaagactctgagaggtatttcttgatctatatttgtggaatgatggatcatgaaaatatttctgtttttgctgaattttgatgatgctattcaagtattcatgtattcatgctcttttcgatgatgtgtcacatgtgtgaagtatgtacaatttttttccttgctaaattgacgatcgtcttactttttcgtagatttgatagagtagctactcactgcagggtattggtcaggttgcggggccacgcaggggccgggttcgggggtggggcagggccgttccagcccaacctgccccgttgccatccctacaaacttagcacaaagcagaaaacacagtgagagaaagagagacgcaactatgaactgctcctctggtagtctggtacacttcgcttctaccgtagcgagcaaatcagtctttatctttcgtcatgtagtttggacagcacgatttatatatagtgatattcccgcgttttcttaatgagttggtagtttggtacacacattttctgtttatatccgtatcacatagtacatactccctcggtccctaaatatttgatgccgttgacttttttaaacatgtttgaccgttcgttttattaaaaaacttttgtgaaatatataaaactctatgtatacataaaagtatatttaacaatgaatccaatgataaaaaaatgtcggtgatatgggcccgggggtacgcacagtagagggaagtcgccttcccgtttggccacgtggctgcgcggcttggccttcccccgccccctcggggggcgatcaggtagcgctgaggtggccagggggcctcggggtgccgcgtcacggcccttgggccctcggcgcgcgctgccctgaggccctcacccagccaccacgtggcagggagagtgggtggagcaggaggctctgctccgcgccttcaatgcgcagcaccccaaccgtcccacgccgcatttaatgtggcgtgggcggacgtgcggcgccgctcgattgatctatgtcaatcgagcttgacctgtctgtgaccggtcaaaagcgattggacgggtggcagtgccctcacgttccgccctgtgtcaggcggagtgggggcaggtatgccccatcccatcggcacactgccaggagcgcccccgcgcatggtgagccgccaaagtctccatacaattaatggggaatgacaagggcgtcccccgtgtcatgcggaggacggtgctggccttacctagagacgcacaaccaccttgcttccggttgaaggcacggatggaggtctgatccaggcttggtggatccccctcccatggaggggtaggtatagacggtgcatgtggtatccccttgaactataaaaggaggacttcgcccaccgagaaaagggacgactctcagtaactcgagctctagaggaagaacagttaggtttccccaggagctcaagaccccttgtaagaactcatcataatcccacgcacaggagtagggtgttacacttcccagcggcccgaacctatataatcccctgttctcgtacacaaattcgcagcgatctaatagttagaccgcaagcgaaagtacgctcttgatcatcacgccatctcctccggccgaactcacaaaggggggtcttacgaccacccgctagagagggttactcctcgacagaaaataattcataattacttaaattttttaaataagataaatggtcgaacatgtttaaaaaagtcaatggcgtcaaatatttagggacagagggagtatatcatttctcaatttattatttataggagtgtagttattaacccttttcatattgatgcttgtgtagtttatttatttatcaagttgtttttttagataaaagtttttacgctcagctttactaaaagcatctaccctataattcactcagtattacacctacatactcattcatcaaatttaacggacgagaatcatccaccgcttcagatccaacgaaccatacctccctcacctcccaccgcacaccgctcccacccacgaaaaccgcatggcgctatcattgccggctcgccgctccctcgctctccccgcgccgcgccatcatcgctgccgcccacgattcgccaccgtccccgcaccacgccgccgcccctcgcctctccaccgcgccgcccctccaccagcagccgtccctcacaaatcgtcaccgccgtcatcagcgccgcctcgccgatctcctctgcgccgccgcccacgattcgccgccgtccccacaccgcgccgccgccgtccacgattagccgcctctccaccgcgccgccgcccctccaccagcagccgtccctgacaaatcgtcgccgccgtccccacaccgcgccggcgcccctcgcctctccaccgcgccgccgccgtccccactgcgccgcatcggcctccaagtctccgccgactccaccgagcacgacgagctcaacacgaagagctccaagagaggcccctctccttcctgctcgggtcggccggatctaggaggagcagaggcttcaccgtgggcttggtagggataccggtgagctctcccccgtgactcctgcctcctctggtacagcgaaatcagttcttcctcctctagggcttagcttgttccttctattctgattacatgattaggttagggcgaattttgtgagggctttgctgtctaagattatgcgagtaaccaagaaccgatggtgattcaaaataagaaaaacgatggatgctttgttttttttatcttcgacttggggacttggggttgctattactcgtgagcttgccctaaaataattgaattcaactaatctacactttagagcatctcaaatatcatgtcttttgtcaatccaaatagcacatatactgcaatggttgagaacaaattggatggtgctggtataatttaaatgtttagaaaaaaaaagtaatgcagtaaacacaatgattcatggaataaaatcaacaaatggcgacgatcgccatctctgaatcaatggtagtttacccctgctatggatatatttcctgtatagaaaatggtttattggataatgtattggatgtcatattgccaattctccattgattttatagtaattagaacttcacataaaaatgctgatgtcatgcaatttcaattttgtatacaactagcaaattgcctcgaatatcattggagtagtgggtatggtggcactgattgcattgatggtctcttgaagactttcttttttcatcacttagctgtccatgttcattgatatttttttttggcagtagtaatcatattaagactatagtgcagtttccagttaatcagaagcaatcaattgagggaaattgagactcccaagacttccattttcagtcaatcaaaaggttattttttgttctcattgacaatttctaactcaaattctggacagtccagcacgacctcggccaagaaggcagcaggtctacgccaccttcttcccgtgctgatgccgtgtctgagccctacctcaccacaagtactgctccatttctctttttgaatcaccaccggttcttgatttctttgtgatctaaatattaaagatgtttattccattgattaaagatgcttgccattaggaaatatatatatattagctgcacgttgtgtagaactcaagaatgcttagaggcactccatgcatgggttgttttagctgcacatgtactgtccggctgttcaaatttgagctattttccagttaattatttaattaactcttaattatctgattcctcaaatattttccaatatagttattccttcaacaaaataattgacatatcagttacttcttgcgggtaacaaacccaccgccggagagcaccttttgttttcttattttcttatttgtctgccctatcaagtagcacgccatttcaatactctttattcttccagcagtgcacattattgtgccatttcatatgttagctctaaattcacatgtgttagctctaaattgacattattatacaacttccagcagtatatgtcttgctctgaatttgcatgtgttagctctaaatttaagatgcttgatatagattgtccttatgatgctagctgcaatgaccccattatttcaatgtaaaggggggggggggggcactttactattattgttttttgatgtatttaagacgatcaaatcctgtgcactgaatgttagggtcattcagtattattctttatcttggtgataatctgaaattccgaactgtgatcttctcccaaacaatatgcttacatgttccctcactttcatttggcactatgcttaaattattatatcgtctcaaacatgatctaataaatcattgcatttagcattcgatcagaatgaaagttcttgattaacttgcatgtttgatcgatgaagccaacaagctggtgaacaatttgatccttcgtcaaattgatgcgagggcccaaccaataaacccactaaagctaactctccgattgtgtaagagacttacaaagaaacttatggagcgtatgtgttcccagtaaacaccataaacttatggagcgtatgcgagggccacagcttacagcacccccaccacattaggattatcaccattgaaaacacaatcattatggtgtttccaaatctcctaggctactaaaataatcaaagaattcaatctcatccataccccttttggagcaaccttagtgactttgctccaccatcctaaaaacatgttgtagaagactaaggtgcagccaaaaccaaacccaattttgtgaagattaaagtccatacttgtcggatcatgtactttttgctggcttgagttaccagattgatatccatctggaggcaatccacatgattgggaggattcttgtcttatctaatctttggtttggtcctgaaaaccaactatttataaggaattcttgaagaaatttctgacaaatctttcagaagtaagaattgctacaattaatgcagaaaaaatctgttacatggctgtgtcttctggtagtgaaacgaaaggtattattagcaagactgctacttttatctgttcttttattcagagttttgtattaccatctttttcacactaatatttggttttatttggcatcatcacttaaggggatgttgtttgattttgatgacaaaattaggatccaagctatttctgcgatttagcctaatcaaatttaagaccatgcctttctgagttgatatttcaagcagcagacatgctatgcgataaaggtcagcacattgctatttttcattgctgaagggtctataaggggcttcgtgtaaatttacgccatg

SEQ ID NO: 18939 - DNA, 4272 bp, Oryza sativa
ataggtaaaagcaattaagaaacaatccaaaacgccaaaataaagaagggtcaaaatcaaaccacatttttgcatcatctgctactgttaacatcctagagatgagttacaacttacaagattgagcaggtttacctaatgccgagcaactaattaaaactagatattgttggtaaaacttctatatacaggtcattaacgatttaaaaggtaatcttaaaaataaactgtaataaaaaattaataatcagcttcaaaagtagatttcaaaatttaaattttgacagcgatggaagcgttagtctagaaatctcgtgaacgacaggtgcacattacgtttgcaatcgcaagaggaaggaggagaagaagacgaactcgttctcatccgcggtcaaaatatattttggcatagcaagaacagaagaagcgcccccatcgtctcaaggaataagccaaacggcatatttaaacgaaagataatttgtgaataaaacttttatatacgtgtttttagcgatttgaaaacaaagattaaaaaaacttcgataaaaaaccccaaaatattaacttcaaattaaaaatttaaagttaactaataataaatataagtataaacgaaaatatacggttagagaagagagcaggttgaggaagagaggggaagcaaaccgagctgaaccatgcggcgatggcgattgctctctgctcggaccccgcgtagagagggcgatatttatttaattaatgagtaatcatccggacagcgatggatttgtagccttgtgattatggggggcttatggcgatgaggaggatgacacggccaatgcctatccaaatccaatccataacgcatttccggttcagattcagaatttcagacacaaacagcgatccatcgtccatgtagtattatacccttttgatttgattactcattcctccttaatccttgccacgtgtgcagtccggccaactaactacccggagtgtccagtcagcctgctttgtttgttcaaacttgatccaatctgattggatctgattaacatgcactgctcgtactaggagcaatataattattacaccagaccccctctcctgcttggttcagttcagttcagttgctactaactgctttcttcagttgtgtttgttacaacagtgcttcaaattattcactcgagcacctaactttgaatttgctcagatcgtcctaccagtgagctctaacaatctcattcgtggaatgcggcctaagctttgtacgtactcccaatcttaataaaatttggtcggtctaatagcatgtcacagaaccgtgtcaatgttcaaaatcttaatgaaatttggtcggcctaacagcgtatcgatgttcagaacgacgagcgtcggtcggagtcactgtacagttgcggagagcaaggggaagtaactcgcattggctgacaggattggtcatttggtccatgggagaagaagatgccaaggaggaggtgagagctaggacaaagagtagtacataagctgatgcatttactgcattagggtaaagtacaggttttacttaagctgagcttagcagagacagagcagctgttgttggtttctgtaacagggccggcagggtttagtgttagtgtactcagatatttgtcaggtaggactggagtagtagttagtaggagtaactggtttttgcttttagtcaaatcttttgctttcgtgtccaacatgaccacatgtgcctacacaggacacagatgatgctgctctcaacagagagatgattgagatcacgaatttgacattttgcactaatatatactactgggttaaagatgtgtttttttttttacttcttccactcaaaaaaagaagtgatttttactcttccaagcactggagatgagtagatattttattatgcaaaatagtagcaggagtaattggatcatccataagctatggcaatcaacagcaagaagagatttgacaaaattcatccaaatcttgtaactatattatagatttatatatagttggttatacatattggggatctgtacacttgcttcctttcgatgcctcaatggctcaaaaggagaagagtggaacaagaagaagaagaggaggaggattgggagttgatggaggagaaatctcgcaatcaagaacctggctgcggcttcgtcgccggccgcgacgcgctgctctcgccgccggggaggcccatctccacgtcgcggtcgccctgcgccggcgccggcgggggcgggggagtcgcgccgccgcagcccagcagccgccgcagggccgctatcctcgccgcttccaccacggcggcgactccggcgatgggtcccgccgacggctgcggcgggaaggccggttgctgctgatgatgggacgacggaggcggcggcggcggcgttgccgcggcggcgccgcctgtcctgacggcgtcctgggagccgaagaagagcacgttggtggggaagttgggcgactccgcgtcagcctccggcgggcgcacggcgggcggcggcggcagcgcctcgtcgatgacggcgcagcggcagagcgggcaggtggagtttgaccggagccacatgtcgacgcactcgacgtggaacccgtggccgcaccgcggcagcacgcgggcggactccccggcggcgagctccgtgatgcagacggcgcagtccgccgcggggtcgccgccgtcgcccccctcggccgccgccgccaccaccttcgtcggcagcgccgcgatggccgcctcgtcaagcccctcccgcctccgcacccgccgtccccggggcccccgaacacgaaccgcgcgcgtcccctccctcccccaccgctgtcgccgccgatcgtgggcgcggcgccgcggtacctcttggcgcagaggaagaggtagaagcacacgacgaacgtgatgaagatcgccgccgccgccgccagcatcgtcgccgcggccgccaccgacgtccccgtcaccgccatcgatccctcgtcgccaccgagtccgcccctctcctcgcgttcttggccgccgccgccgccgcaagaagaaatctgagtgtgaattggggagtggaaatggaatggaatcgagccgctgtgtacaggagagggggtgttatatacgggcaagtggtgaaggatttggaattggaatttggaatttggggagaggataagaagaggatttgagttgagttgaggtgaattaaatttggacggggaggtgggtttagagggagggagggaggaggggaaagtgagtgagggagggagggagggaggtgaggagacaaggggaagggatatagtggtgtgagtgccgactggtcaatgttggagggatagagacacatcaaaaacaaatttaaaaggtttttttgaaactgagtattagtaaaaagaaaatctatgtattttgggattaagaatatgtgaattgtggggtgatatgagtcactgagcgagggtgatggactacggaaccattcgaatttcttgtgtcatgatttggagggaaaagtttgttttactcgcacaattgattctgtttgatcacttttagtctcctaagactatttctaactcattttatgtctaaactattaaagttgctaattgtttttagttacatgtaagatctcatatatccacagttccataccgccatacatttcatatctgatttaatacaaaaaaattgcaacatcatatctctcggaggttataatcaagacaatggccaaccacatcaagtgcctacaagctacaacataaacacccactactagaaatcaaacatgaacataacatccaaatgcactcaactttattcaggttaaggctgtgtttggagcattgggttcctaaccgctccctatcgtattccacgcgcacgctttttaaactgctaaacggtgcgttttttttaagggttaattggatctatgccacgtgaattgtggcaaatcaaaaaaatgccacacctattccggaatccggtgcatgtcactactatttcgtcaaattggaaccataccacaatgtacgccccgcgcgcgctttgccaccgttttagggtaccatattttcgtatggacgtttctgccctcgtgttcacgtgtgcttagaccagctccggtccggctcgaacagcccggtcaccattcgttccccacaccaaaaccctagcttcttggaggcggcgcaggcgacggcgccggcgcaatcgacggcggcgga

SEQ ID NO: 18940 - DNA, 15822 bp, Oryza sativa
caaccattggcaattagcaaaatacttagagaggaggtagctggcattacagtcgaagataggtggataggctcctaactactctagttggtggtgcacttgaggatgctaggtctttcctcttctggggagtcttcttcttttttggtgtcttttttttcctaggtgtttttttcttctttggtgcagagcagcttgcttcacttgttgacactcctggatcatttccttgcctgcacacttgtctcttcctacaaaaaagtgagaatttttagaccatatggcaagcatacaagcctgaatcttagtgactacaacatagcacaatatatcaggagtgtaactaacaataattatcaagttgggtttttttatcaagttggagttaaagaatacaaaccgcttgcacaaagactaattaagaatagaagcacaatgacagcaatataccgtttttggggggtgcagtggctgctcatatcatctgcatctgcaggttcagccagcttgcatgttttctcaaaatgtccaaatcttttacatctcttgcatttcactctctttcttccaggctcaagaaatccccttattctctgtactctaggcctcccagcacctctcttctgcttagggacatgcaccttgaagcccaaatcaactactggccactgtgtcctgtcagtcataggtggtactctgcctgcataagctatcctgaacatttgcacactataatatgggctcacaaaatcttgtatccttcctccactgctgcatatccaggccaatgcatgcctgcatggcttccctgttatttgccaagccctacaagagcatttttggttgtctaggtcaacaatatgccttcttgtcttgttgtcagtatccacaagtgtgacctctgcaaacccatcatcacttctggcaatcttcaccactttaagaagagatgtggcatcattagctgtttcataacacctggaatgattccatcatccattttcttgccaacatctcttctagtggccatcttctccattattaactctcgtatgctgtcaacaagttcatgaggaagcagtcctttcagatttctgatctgagcattaaagctctcagaaacattgtttgtcagatagtcacatttgctgctttctccaaagccacatctgtaccaaattcttgaatgatgttgctcaagaaactctattgcatctggtttcactgcatatatttgctgcatatgttacttgaaaccctcctcggtgtagctcctagcagctggatacaaatgctcagtgataacagaaccatggtacttttttaagaagttaacatagaggtgcctaatgcattctctatgctcaaccaggatcactaaatgcagcactaacagccttttctaaccccttgcatgccatcggtgaaataacctacccttcaggacaaccaatagctctattcaattgtttcataaaccacaaccaattgtcctgagttgccaaatcaaaaattgcatatgatacataaaacagccagttgtgaccatctacagaggtggctgaagctaactgtccagtgtattttccagtcaacttagttgagtctacaccaacatatggcctacacccttgcaaaaagccatctatacatggttatagagctacaaaaaaatgcttgaagcacattttatttcctaacttctccaattcaatttcaactatactacctggacacttcctctcaatttcagccttccagttgaaaagcaactgaaaactttccttatatttaccatgtatctgttctagtgctaacttcatacctgaccatgcctttgaatacttcaacttgatctcatactgttcttgcagcttcccccttgcatccttagcacccttctttggattgttcttcaaccaatcaccaagcctatcagcaacccagccctgtgtagccatcttgccctctcttagtttggtagatgcacatttgtgttcaaagggaagaactgtaatctgcatgacatgacatggtgataaaaagttactaaaactaacactactttcaggagatgaaaaaataaattaactaaaataatacatttataccttaattgttttcttatcatggattagggaagcacgtattctccatggacagccttcagcgcgacaggttgcaatgaatcttgttttagctgtcttcaaatcagcaaactcaaaacctttcttaattgcataatgcctaactgcttttctaaaagatatcatgtcagggaatagagcattcttcactatatttggattctctggatcatgcaacactcgaacaacctgagggtcttcatcagtgacttctacctcaggagcttcaacccctgtggcagcagtctgagaggattggccaccaacccctatggcagcaggctgagaggattggccagaggtgtcaggtggctaagtaggttttggaggcagatacaactgctcatcattaacaccaacatattcttcctcattatcaaacatgtcaggctctctaacatctgcttccactgttgtaggctgtgcagaacctccaacattagtagcagcttgtccagaaccatcattgtgggaagggttctcaggtgggatgatagcaatgggctcatgcacacaacacacagaagcaacatccatgctttcctcaagaactgctacaagtaggtggaaactggcctcggttgcatacatctcgaaaatatctggcaaatcagtgtcccctatgagcctaacatcctcacccaaatttttgttaaaataccacactaagggagattggttcgagccccacttaaactcaaccctcaaactttccattaggaaatcaaacgaaaaactctctgaatcgattacccaatgcccagtgcctcctttactgatgattttcctaccatcagcatctactgtcgcatagggttgcaccctaacatcgactgaaaaccaatgcctaccaacgaatgacaaaacaataactcaaatcgcacatacaaagttcaaatcgaaactcaaatcgcaattttatctgcataaagagttcatgggggaaggtactcacggtttggaagcaacccgtacaagggatttgcctaaatacattgccaacgcggtgggggatgcaggcgtaggcccctgcgcactcatcctcccattggcagaggtcctccccttcggctgtcgtagcctccgccaccggcctgctccgccgccgccttgctccgccgccttcgcctgcgccgccgccctgctccggcgccgaagcctgcgccgccgcctgcgacgccgccctccatcgccgttgcctgcgtcgccgccctgctccgccgccttccgccgccgtcgattgcgccggcgccgttgcctgcgccgcctccaagaagctagggtttcggtgtggggaacgaatggcgaccgggctgttcgagccagaccggagctggtctaagcacacgtgaacacgagggcaaaaacgtccatacgaaaatacggtaccctaaaacggtggcaaagcgcgcgcggggcgtacattgtggcatggttccaatttgacgaaatagtagtggcatgcacccggattccagaataggtgtggcatttttttgatttgccacaattcgcgtggcatggatccaattaaccttttttttaaagtttctatacgaaagttgcttaaaaaaatcatattgatccatttttttaaaaaatagctaatacttaattaatcacgcactaatgaaccgctccattttccgtgcacaccgtgcatgttgggaacggatgattccatgtgtatatgctcgcacacatgcctatgagtactcaccctctaataaacttatcatgaagaagataaaaacacacccacaaaacataattatagttatcgaaatttaaactctaataaatggagtcatatacacactactttgtcacattgaaagagttatgtaattatttatcacattgaaatgtaagaaactaatgggagtgctggtacgcactaaaatataataattattacaatatcaagataattgatgcatggtgtgcacactacactgatgtctttacgtgaattaaaaatatcatggagaggttttagtaaatggccagtggtaaagaaaagaaatgattagaaggagaacgtacacacctacatctaacatgcttgtacacacatcacaacgtatgcactcacgaatatacacttttacacttgtttaaaccgagaagagactcgtatcacattcggaatatttgtaagcactgagatttaaattaaacccttaatagtgaatacaacttcactgtctacttatgtcactcctatggtaagagtttcattcacattaaatagcatgacatgtcaacatttttattgatgtgataagaaattaataaagtgagagatgaaaaatcatgtctattcccagtacagtttatcttttatatgttacttatgagtatgtgtgagagcatgaaataaatacatggaaaaattacaaaatcatcccagaagtcatctgaggtttaacattacactccataagtcatcttgttgcaaatgctcatcactatactcggttttgttgcaaaaactaccccagtgcacacgtgcttaaccatcatcagcgattctatttatgcaatctccaaaaactgttaagattatattcttagaagtatttaattttgttaaataccacgtagacgcatcacaatttatgaaaacatatcgattcggttaagcacacatatactaggacgattttttaacaaaattaagtaggggtggggatttacaataaaaataacttatgttgtggaatgccaaacttcaattgaattataggatatatttttaattttcccaaaatacattgtataagctaatttaattatcaattaaataccaattacttatgggacaattgcttatttctaccccgttttgaacccctaagtaccaatttgaccctactttttggtgtttgcttatttgaccctcatttttaaaaaggaagctcccgtataaccctgttctgttaagggcaactaacggtgttaactaaagcacaaaatatctcttctgccttactcatttgacctattacatgtgggacccacccatcagttctctcttctccacccctcctctcctctctactctcttatcttctcttctccatggatcggcaagacgacgagccggcaccggtcctggtgacgacgaggagtggcggcggtgagtctgggtggtggagctcgagctgcggtcagtggatctggagccgccgccttcgtctcctccctccttccgcgcgcctgcgcctttgccaccgccacctccgtcattacgcgccgaagccaccttcttctttcctccacgcaccggctgcgctgccgctccctccctccacgaggcgctggcagcgtgggtcttctccctcagctgctaccgccgtcgctccctccctccctcaacgagccggcgaggccgctcaccccctccatgcgccgccgccgcaaggagagagagagagagaaatgtggatagggttgggtggatggatagggttttctaagggtattctgggtattatgaatattagttgcatttcttttttttatttaaatcaaaacttaacgggctagtggaaacagggttagacgggagtttcgttttttaaaaaaagggtcaaataagcaaacactaaaaaatagaatcaaattggtagttaggattcaaaacatggttaaataagcaattgcccccttacttatttgtcaccattaggacacacacctcaaatggagtggccttaacaaaaaaaatattggccttaatgcatgtcaaattttttatttaaattctataggatatatatactcggagagcgtgccataataaaagatgttttctcaaggcaccgtacataatagccattgatgagttaagtgtagggcctagatgggccgtatctatggcaaatgaatgccctagatgaggagcaataatggaaggatggggggcactgccttctctgttcgcgataattaaaagcctatgtgtccaaattcataatccgttctgtcattttgctgtagttacaggaccaggtacagtgtctcctttgcaccgttcgatcgacaagctttgtttccaagctgaggtgacccattttatttgctcctcagcgcgtatgtacaaacaatatgattatatacaggtactactcgtaattaataatcgacgaccacggttggtgcttaattgtgcgtgaattcgtaaacataaagcttgttcccgccgtagtagatatcgagtgatactctctctctctcttaactttttatttacacagtttgactattcgtcttattcaaaaaaatttaaaattattatttattttatttgtgacttatttttattatccaaagtactttaatcacaaatttttatttttttatatttatacaattttttttaataaaacgagtggttaaagagtgcaaataaaaaatcaaaatcctttatattgtaaggatggagggagtagatagcatgattggttgtggtaacttggttcgtacctacacacacaatgtgaccagttcctaaccagaagtactgactggtgtgaagctttgttaaaaagaatatactgaaaaatgccaaattttatagtaaaaaatggtaagtatgtccttaaaattcgattttcaaaagaagtaaaagaaagtttgttctaaaaatatctcccactagagtttagtttggtaaggttaaaaatgtcaataaatcaaacatgatttgttatgttttgcagtatctggactgcagaggctggagatgtatttcctatctttcatcgtcttaaagagaaaaacgatatgttcatttttgcctatgataagatttgtttaagctatactagcaaattcattcagtgggatttgcctaatttggaacctggtggtgcacaattaattaattaattaattaaaatccggcggaggcagatcggaatctccggcgggacggacgcctggagtcgcgcggtgggccgtacggaggcaggcatacaggagcttttcccggtctcctccctttcatttcactgattaggttctgttgattgtcctaataagttaaaacagattaaaaattgaattttcaaagttatttctcgagttgattttaaaatattttcaacgcagtttttttttcaagttatttttaggtttctaagaacagatatataaaaatcttatctacaaattaaattttattctataataaactgatgacaccggttcacaccacaaagatagaaaatattcgtctcatgagtacgtcttttaaactactaaacactatatttttattaaaaaatagagaaaaaaacattttaaaaatgtattattaatcagcttattaaatttaaataattaagacttaattatgtgttaatgacccatcatttaacatatttcttcatttttttcttctcccagacacagatcagcaggaggacgaaccaaagacgaaagaaaaggccaggcagcgagtgggccgccgctagctgctcgtctcgccgccgattgctgccggaaacttattcatttccccactttaattagttgtccatggtggatggatggactcgtccctgtggggctctgcttgctgccttttgctgctcatctttttctcattccaaacagccgaacctgccgactatatggcgattaattctactaccttttcttttcttttttggccggttttcctctgggggataatggggccaagatatgtgaaaccaaaccaacccagtgttattgctctcagatttgtgccactattatctttaatttcttgtttttttctttacaccttaattatgtatttaccgactatcgcgatctcgctaccaaccggtggcacccaacttccttcttgaccacgtacttcctccatactcataaaggaagttgtttaggataatgtttaagttaaaccttgggaatataaatcataaataactcttaaattaatgagtttgaaaacgtaaaaattatatgaatagatttgtcttgaaaaatatttttataaaagtaagtatatatatatatcactttacaataattttttttatagaaacaagaagttaaaattgtgttttggagaacgtgtcgctgcaggtccaaaacggttttctttacgagtacggagggagtacgtatctactgttggcaatctttgtctatacatagcgatggcactgtttcaaatgtactgactgggtttgtatttgttttgtcacgtacgttgttttggctgtataacagtgtactagtaaaaggctagtttctcggagagaaatacatgagcaataatttgcggttagtgactagtaactctgagacaactcaatttattgataagataagtgtcatttgcacatactattagagcaggtacaatagcaggctataaactagttataaacatatttcgagaagataaagggctattttggtttgatgccaaaatatgccctacaaaattgttggcattttaaatagtagtttggctagtgtttggtttgatatcaaaatatactactaagagacataagttgtcaaaaacatttggaactatcaaaatttgcctatggtttggtattgctagtattttggcatgatagcaaaccaaacaagcccaaaagagaagagagaaaaacagcgggctagagatgatttgtagccagctgcagtacggactctaagatgcaatgtgtgtacaacaggtgagaccaaatattaatagtgtattatatgcttatactccctccgtccccatatgtagcaacctaggatgggattcgaatgtgtgtagtccccatatgtctattctcatcctagattgctacgtctatatcagctattaaattgactatagatgatttggagctagttgttggctatattattaaatttgcccttagcaataaaaagagagagagagagaaaaaaaagtagtgctaatgtttaaccctcaggtgatgtgcagcatgtgctagcgtagcatgtacaaagtttttaaccggtactgaagggagtatatgacaagctgtagttgatgtgattttcttttccaaaacacagcgtgaacgtatacgctgatcatatacgaccacgcgaaatgatcaaccctgtttgcgcacgcgtatatggacgctctatccttacgagcactttcgagtgattgagtttttacattgataaagttaccacattctcccttcgtttcatattactataagttatttaacttttttcttagcctaacaaattaagtttgataaattttatataaaaatttagtaacatctaaaatagattatagtttaattaaatataacattgaatgtattttgataatatatttgttttgcgttgaaaatactactatattttttttttataaatttgattaatctttaaaaaatttgactaagaaaagattcaaactgacttatagtatagaacgaattacatatgagtatatctttctagttacccgtaaatcaaagcattcatattaaatttagaacttaaaactcgcgcgaatatgttctatcacaggaaatctaaaagttagctttcgctcgatcgattcgagaaatttgacctgccgaccaaacagggcgatatgtactcccgcaccatatgtgattggcagcttggcacattgtacagtacttctgcctcactgcctcaggatcttcactctctggcaactgcaactgcaaagcaacaacacaggcacagcctcctctgatatgtagcctgcaactactctctccgtttcataatgtaagtcattttagcatttttcacattcatatttaactataaaaaaatatgaatgtggcgcgcagttaaatatgaatgtggaaaataccaaaataacttatattgtgaaacggaggaagtaatatttaactgcgtggctatcctttcacgacaagggcgagccacatatttgcatgggctttatcaccgacatttgctccaattatgagcggaccaaaggtcggtcgtggagctctcacggctacaccatccaatttcatcgctgtagtgcacgaggcccaccgtacaggcaaacatggtaggccaggtttatatcaagttcaataatatagttaattaactgatatcacataatttaccaccaatctaatagtcctttgctgttgatatacactagaatatcattaatatatatagctcacctctctagctctcacaaaagtactccatctgttttagaatattggatgtatttattttgtaggggaaaagtcttaggccctctttatttaggcttataagccaacttataagtcgaaaaatttaagccaaaacaaacaagcagctttttcatttggcttttttgaagccataagccactctaacactattaagccaaaagctaggttggagaagcttttttggcttatatgagacagatgtatgactccaccactaaacttaggacattaaatccactgccttataaatcatataagctaataagctaacttaaaagtctaggccaataaaactaagcctaaacaaagagggcctttagaccaacaattactttacgaggatataatttttgttacacaaaaataaataaataaaattcatatttaagaatacttagttatgattatatttttatattatctaaaaaatgattatatttttatattaaataaaagatatcttattaaataattgttggttgaagtcttatcctaacaaaacaaaatgtgtaatatattttgaaatggagtgagtagtttattagagcttatgatacaactgactataaatgctcactttttatctctcttcttcatataattacaaatataatgttaaaacttacatcttaactttcgaattaactattgttacgatcttcacttttggactacttacgtcagaatgtaaagtcttaccgtaaaacatgataaaaagaagtcttaccataaaactatattccattacattggtagtatatctgtggcttataagctgtaactaataataaatacagtcttgatcctaaaataaacaaacttagtatgagatatcacacagtgtgttttgttctgggactaggtgagatggaatgaaaccatccctgatttttggggttgggatgattccacgcgcgtgtttggtttgtaggataagctaatttggtttcacttggctccacaatgggccgaactgaagcaacgtatatttggtgggaataagttcacttaggtttcttaatttgtcgcaaagtctaaaattcttccttgaaccgaaataccagcccatccgccaacctataataccgtgtcaattttgctcccttggcagtacagtggccggtttttgcaaatgtggtaagtgggacccatgtgggccccacatgttaatggccctctctctcccccgcgtgagccttggagaggggcagctgacccgagggggcgggggagggggggtgcactgatgggagggcgcatgacgaggacacacaacctgctggtgatcttcatcaaacaccacaagttgaggagatccccgacgtctccgacatggtgacgctctacggcgcgccggagctcttgtaccggtccttctacttcgactcggaccgcctggagcacatccgcgcgctcgccatcgctaacaatgacaacgagaatctcctcagtaggcggcgcaccacatttgaggcactgtctgggctttggaccttgcgtcggagcaacagatgaagctacggttcatcatggacaggcgacgttgccgctcccgagggcggtactccggtacgagtacatgaggtcagtagtggactacttcaacgtgatgcgggcgtggccatcgctggcgtcgacactgttgatcatgatgtggtcctagcttgtcttccatgatgccgacttcaggtggggggagccaatgatatccgaccccgtcacgctgttggagaaggaggtgatccctcttcctaatgcacggcaaggagagaaagagcatcaatgtcttgcttggccttccaacatctttcatggatgtcttccaagtgctcatggacgggggagggcgcgtgacacgggggagggggagggggatggggaggggggagaggagggagaagagttggccgctagcatgcatatgcatgtctcacatgagtccaactcatcacgtcagccaaacctggccactatgctgctgaaagattaaagttgatacagtattgtgagttaggggatggtctaaacctggtatttcagtttagaggtgaattttagactcggcgacaaaatggatgacctaaagtcaacttattcctatctggtggagcaatggcttttgtctgtttcaacgtttatagtgctaatgtggtgacaattgtgaagacatattcagttaattaaacacttgaatctagaacgactttgctactagaggaccggccaggccagctgaccatgccttttagggtttattcggttcgtggaatttccaaattaaaggaaaaggaaaaaaaaataaagaaataggatgtgcactttatttcttaggaattttttcaagaggtctcacctcgagctaagaatcatatgaaaataataagcttgtaatactacaagtctacaacccttaacaatttggtaagaggtctcacatcgtgctaagattccaaaatttgtccgttgaaattctttttgagatacctgctatccgttgaataaaatgcaaaatatttttgttgataacgtataatatgctattgctgagaaatgtgcatatgtacatgagtgttttgttataaatttctgttagcgtactgtttgccttcaagattactattactatactttaataataggtaaaatataatttagaaatgtcgttgcgttatcaactgatgaatgataaattacaaacctagacctaggatagtcactctcccagaagaataatagataataattcaattaacagtaaataaggaagaaatgacgttatgctccaatgaaaaataaacaaaaaccaaggaagaacatccaaaacacaggattttacacttcaatggagatttgccagtacttccggcaaaaacaacaaacaaacgtatttttcaatcacggaccaattaatgaaaagctgaagaatttagggctttaaagttacaaatgaaagctctatatattttaacaaggcactggagcgtatatgtaagcatcagatgtgtacagctagaaagcagcaagaactaaaaaggacctatctgtaagatgttgcaaagtaagaggatgcaaaaaagagaggcggtggggcgtatatgtaatggagaaactgcgagggaaaaactgcaaagatgtaagggcctggatgtaagaaataagaataggcgagggcgcataaagaaggcccaggggcatatctgtaacaaaatgtatggcctccagggacctggacagaattctcaaaaaaatttggaccatttctcgatttgtgcgtgtcatccttgcgcaggggccatgctaatcttctctgtatcgttccaattttatcggatgtctccgaagagacgccagggcagttggcgcgcgggtttataagttggtctcatcgtccctaggattctgatgtggtactaacctctctcgcagcgccaccgcacaagccatcggatctccatccaacggtccagagtggccagcgccacccgcgcggtaggatgcgcgtgggctgcaccttccgccgcggcccaaatcagcgtacggaccatggtatttcgattctccccctcccggcccacatcacatgcatgctgtaatcaagtttgagcattatccgcccgaactgatcgtcaatttcaacacgtttaggttaattaagaatttgagccactgatttgatttggttaatggtttaaatttgattatttcatctagtgatttcggtgttcagtgttgccctgtatataatatcttgccatgtaatactgctaattgctatctgaacaattttggcagaagaatttgtagctttacgttaatactgcagtagttttgctcctcgataattcagtcgtaatccttgacagccaaaacttgacgttattgctaatcaattgccaaatgaatattatgaattactccatatgctcaacctcaattgattactgaactttattcttgtaattagaaaacctgctctcttcattagaaatttatgaacagaaaattcttgccaggccggaaaaaaagtcggaaactgatattatttgcagatattgcaggaactgcaaagccctctgaacttgccaacaaaagtttgtgcgtataattaagtagtagaaacagagccatttattaaacggttttgctatacttccggcgacataattttcacaagattacagaccatttttagctctttgattttagtctagcaagaatcgtgccgctaaattacttcctccgtttcatattataagactttgtagtattgcccacattcatatagcaacatgcatgaccatttaattacccatcctatcaagctttggccatcatgagcaagaaaagagtgatatacgcgtagagtaaatactgctagctcattttggttaaaattacattttagttacatactacttacactataactttacataattgcattatagttacacactactttaactagaaatttggataattacaatgaaattacagtaactgttgtaatttttaaatcttttgtaagcatttaaaatttatctggaacacattcatatgaattttttgaagttcgttggtcatacactcatacataagggcatgcaacatattttgtggcccaactggaaaccaagccagaccatgatcgtgcggaggttgtatgggcctgtcgatcatggtgaaatttgattgtattttgcctctgttttgtgacaacattattatagatattataatagtccctttatcaagaccgtgtttagttttctccatattcctaactttctatcacatcatatcacatcaaaaactttcctacacacataaatttccaactttatttccaaactcctaactttcttcaaacttccaacttttttcagaaactaaacacatcccaaattatgctccgattctagtctccgagaagaccggatgctccgtcacctgctccgcccgcaacatttgttgcctctcctccccaaccgaaatcgatggtgatggagacgaaggattcctggcaatctgtaatagatagagccaagagctacctaatcgaggcttccaccatagtggaggttgaagtttccatggcagcacaagtgaaatagaattttcccttgatgattcgctatcgatgcataaggagaaggccataatctcatagatttgcttgctacaggtgtgaaaggcggtttgcgcagactctgtgcacagatctagagcgctcctacctactctttgtgcactaactcatgcaaaaccgagaaaagttcgattaataactaacctgaaagaacccctagaaaagacccgacaaaaaaaaacccaactaaaagctaaaacctattgaaagaaagtgacgactcccttcaattgttagggttgaacagctagaatcatgtagcaggacgagcgattgagaggga

SEQ ID NO: 18941 - DNA, 707 bp, Oryza sativa
ctgatgggcagcatattctcctcaaagcatcaaattgttttgcatagtaacaaattacagtatacttcacttgtcctaaaggaccttcatctccaaaattcacctttatgtgacttgcttttctgtatgcgagtggatctgaaggggatggattcttgcctcctgacaaatagaggatattgtcctctgtagaaacaaaacttcttagaagttcagaagcagtttcatccactgattcagttaatgaagcacctctcaaatcagttactgagagtgaattatctgttgtgtcgctttccagttcatctgatagctgaagatgatattcatgggaagcaagcgcataggagatgatgctagtaggttcatcatcataaatcccaacaacagtgtcattaacaccaattggaaagagaaatttgggcccaacctggcgctccaccgtcctaagaaaagaaacatgaacaggagtatattcattgagagcatcaaacctgtttgagcgacaccactgcttgtttagagcacggtaaagttgtaagaaaggcatcccaagccagttggactggtcctctgcactatcgcctagcttgttcaggaagacagaggcatatgaaggtgtatcagtcacatgttcttctgaatcctctgaggatgccacacaatctggtactatcgcactgctagggacaggatcattttacctg

SEQ ID NO: 18942 - DNA, 1735 bp, Oryza sativa
ttagtccctcccaaggtggatcttaggacatcaaaagatgcttggagacccctacaacattcattcaaagcggatttgaagctccaaggtcaataggatagtttaatttttgaaatcgagttttaggaaaaaccgtactattaagaggggttccaagtgttgttctgagatataaaaagtgctcttagtgggttccttgtggtagaatatttttgggagccatttttgcaaatgggtccagaccggatagagaaggctggccggaagttccggtccctggacccggaacttccgaaccttgcgacatgtgaaattttcctaagtgttgtctggaagttccgaatgtcaggaacttccggacctcttccagttcaaaaatgtgagtaacggctagatgtcgtcacctagccgttatatatatccagatcgcaccttttggccattttcacttcagttctttcatgccctaggttgttctagactctcccaagatccctttgcttcctccactcaaatctagagccattcttgtgagattgagagaatagatgagagtgtaggagtgatttggagaaggtttgaagactaggtgtgtttgagcacttggatatcttgtgggctgttacttgggcttattactcttggagatcttctcctaaacggttaggtgccacctgagagcttccaaagatcatgtggatgtctcgagaaagtttgtgaaggttttccttacctccgcaaggaaacgaggtaagtgagtaaagattcttgtgctgagatttcagaggttctcctaggtagagcaacttgcacttgtggtcttttctagaaggatttgtgagttagatcttggtggtcactcaaattctagaaaatgacctagaaatgttgagttgaaggcctcggacttcttcgaggttctttgcacgggtgaggcaagaggttaatcgagacccagctctttggagcacctcaacggagagtaggattgcaagattcgaacttcgggaaaaaatcgcctttgtcttctctgtgatgattctatgcatgttgctgtgattgtgtatttgctctttcttcctgtagtttaattcgtgcaaattagtttaagtctctgctagatcttcaattttttctgttgcccggaagttccggtggttagaacaccggaagttccggacagtctgagcagatcggaagttccggtgttccacacccggaggttccgaacctgctgaattttaccgctgtgatttgtttgtgaatttcaggaaaacctatttaccccccccccctctaggctacatctttgcgcgttcaagcaccacctacgcgctcaagatcggctcgcaccaccgctgttgccctgcctcgggcaatagtaggtacaatatcatgcaattacatttcaaatcacatgtgagacctccacgtccaagagactgatgaagcaatctccgcggcggagtcagtgttgagaccgtcctagctccggccggatggagtagttcaccatgactcttgaaaacaaaaggaaaaaaaggtcatgatgagattcacgtggcctctggtccgcgaaccaatttccttggccaagtcatgtgagacctccgcgtccaagagacctgtgaagcaatctccgtgccggagtcagcgttgagaccatcttggctccagccggacggagtagttctccacgactcttcaaaacaaaaagaaaaaaaggttatgatga

SEQ ID NO: 18943 - DNA, 625 bp, Oryza sativa
tgcatctagacgggtcgccacgtagttatcccaccaggcagaagcggaccttgcaactggtgtgtagcaaaagcaactttctcttggtcgttgcattgcagtaggttcagcttcttctcaatagcacggagccagtcgttggcctccattgggttggtggtgtttgagaaagtgggtggctggatacagagaaagtctaacagtttggacacgtgtgatggtggaggaccaaactgctggttctgttgcgcctgctgcaacatctgatggtaatgttgctgcatctgttgcatcatcattgtcatcatttgagtgactgttgggttttcgggcggtggagatgatctgctgccagatgcaccactgacatgagctccatcggtctgctcttcgctgccactggcgtcgttggagtcacggggatcattccttgtcttcaccatctggaggaggataggtagaaataagagaaaggaagaaaacagacggctcggaaactaatctttcttataagattaagtgcaattatcttaatcttgattaaaacactgaaaaagaggcacacaactcctaataaaggctgtcataccactcacacatgatatcgaccgccgactaacccaca

SEQ ID NO: 18944 - DNA, 955 bp, Oryza sativa
gattggttgcatgccgtggggaaaaagctagacacggtgcagtgcagcgatgaggagaaagtcatcttcgccgcccaccagctgcaggggcccgcatctctatggtgggaccatttccaggctacgcagccagaggggcaacctattacttgggcccgcttcaccgccgctttccggagaacccatgtgcccgccggagtcatggcccttaagaaaagggaattccgagagttgaagcaaggcaaccgcttcgtgatggagtatttgcatgagttcaacaatctggcccgttacgccccggaggatgtgcgggaagatgaggagaagcaagagaagttcttggcaggaatggaccccgagctgtccgtccgtctagtctctggggactatccggatttccaacgtctggtggacaagagcatccgcttggaagccaagcacaaggaactggagtcgcacaagcgccgcttggcgaatttccgcaatcaacagggtgctaaccaaagggtccgctacaccaatccctatcccgggggatcctcttcgcagcagcaacaacagcagcagcaaccccgctccgcgccccgacctcaattcgtggtgcgcgtctcacagccgcagcaacagcagagtcagcaagggactcgtgcgccccgtcctcctacgccagccgtgcagcctggacaaggccgcagggatgctcaaggacaacaacgtctgtgcttcaattgctttgagcccgggcactttgcggataaatgcccaaagccgaggcgccagcaaggccaagcgcctccccgccccaacaacggtggtaaggatgtcattccgggtcgtgtgaaccacgtgactgccgaggatgtgctgacgactccggacgtcatcgtgagtacgttcctcattcattctattcctgctaccattttgttcgactctggagcttcccactcgttta

SEQ ID NO: 18945 - DNA, 1777 bp, Oryza sativa
tagggtgcgtgctcatgcaggacggtcacgtggtagcctatgcctcacgtcagctatggcctcatgaaggcaactaccctacccatgacttggagttagccgcggtggttcatgctctaaaaatctggcggcactatctcattgggaatcgctgtgaaatatataccgatcataagagtttgaaatacatcttcacccagtcggatctgaatcttcggcaaaggagatggttagaactcatcaaggattatgatgtgggaattcactatcatcctggtaaggccaacgtggttgccgacgctctaagtcgaaagagccattgcaacactcttaacgtccgtggcattccacccgaacttaatcaacagatggaagccctgaacctaagcatagttggtcgtggattcttagctgcgttagaagccaagcctaccttgctcgatcaaatccgcgaggctcagaagaatgatccggacatgcatggactcctcaagaatatgaaacagggtaaagccgctggtttcacagaggatgaacacggaaccctatgaaacggaaagcgggtatgcgttccagataacagagaacttaaacagctgatacttcaggaagctcatgaaagtccttattccatccaccctggcagtacgaagatgtacttagacttgaaggagaaatactggtgggttagcatgaagcgggaaattgcagagtttgtggccctatgtgatgtgtgccagcgtgtcaaggcagagcaccaacgaccggccggacttctccaacctctccaagtaccagaatggaaatgggatgaaattgggatggatttcatcaccggacttccaaaaacccaaggtggatatgattctatatgggtagttgtggatcgattaaccaaggtagctcgatttattcctgtgaagaccacctatggagggaacaagctagccgagctctacttcgctaggatcgtgagtctccatggcgttcccaagaaaatcgtatctgataggggaagccaattcacctctcacttttggaagaagctccaagaagagctgggtacccgattaaatttcagcaccgcctatcacccgcagacagatggacagaccgagcgtctaaatcagatcctagaagatatgctccgcgcatgtgtcctagatattgggaagacctgggataaaagtctcccctatgccgagttctcctacaataacagttaacaagccagcatacaaatggcaccttatgaagcgttgtagaggcagcaaatgccggacaccgctcttgtgggaccaagttggagaaagccaagtgttcgggactgatatcctgagagaagctgaagctaaagtcagaatcattcgggataatctaaaggtggcacagtcccggcagaaaagttatgcagataaccgtcgccgtgacctggaattcgcagtgggtgattttgtataccttcgggtcacgccattgcgaggtgtgcacaggtttcagacaaaagggaagctcgcacctcggtatgtgggtcctttccgtatcaatgctcggcgcggagaagtcgcttaccagctggagctgcccgcctccttgggcaacatgcatgatgtgtttcatgtgtcgcaacacaagaaatgccttcgagtgccatccgagcaggccgactcagagcaaattgaagttcgcgaagatttgacctacgtggagaggccagtgaaaatcctggacaccatggagcgcaggaccaggaaccgggtaattcgtttttgcaagg

SEQ ID NO: 18946 - DNA, 507 bp, Oryza sativa
taaattccaatataaaatggggcaagataaaatttcgttaaatactttgcttaattctataattcctagatttttctggggtttatttgagctaagaaagtatttttaataaatggaattgcatttaagaaataatttaaattgaaaaaggttttaaaaagtcttcttttggctttgggccgaaagtcggcccaaaacctctcttctctctcctcggcccagccggcccagtccgccgcccgcgcgcgcgccctcgctcgctgacaggtggggcccacctgtcagtcgtcgtctaccttcggccgccgccgccgaaaccctagtttcgcgccgccgccgtttcctttccaaatccggccgttcctttccttctccggccgaattgttagaggggaaacaatctccgggatctcctctaccttttctcctttggaatcatcggctaattcgtttcggaagttcgtggaatcgagttcgattcggatcggcctcttttcttcaagcccg

SEQ ID NO: 18947 - DNA, 5591 bp, Oryza sativa
attgactcttcagtcacctttggtatggctatgcacttctataatctataacatcgaggggcccagagatatctctccataggaggggaaaatcccatctttattattcatatcccactacatgtttcgtagcatacccgaagaatacttttataactacccaattacggagcatgctgcgtttagcagttactaagtaagctactacacatgttgggagtcatgataatctaagatctaaggactcaacaccaatactaaatgaaatcattgatgacacggcacatatggctcttgcactgtctcatgttggggctatccaataacatattccccaacatgtgtccatattattaatttaatatctcaataccatgatccatgagacatgatcatcaattaatacatgtgttgatcatttaaacatatttgttccatatatgatatttgatcagcgatcctttataaatagtaacatacaacataaagattctcatgaaagaatcacatattcattaaccaataatgaattatctatttcaaaaaacaatgtcggataaatatgtaaacatagtatgtcatacaatcacttttctccatggtaatgcgcatgactagtaaaaagaaagaaacattatacctacccgcacaatggttgttagagtagtgtgtagaattaataaatgattggctggagtgtccatgtactactaatcaaaagtctacttcgaaggagagatttaattggtttctagttatctaatttaatttaataattcactaatacactgcgtcacatatgtaacgtccttatacatgcatgttcgcttaaaaccagacatcatatattaaaaaaaaataaagcctaaaattgcacactcctaagtctaaaattgtacttggtatgcgtgtgtatgtttaccttttttaacagtacttatgatgttagatatggctttactttatttttatctaagattgaactttttgtaactagttttgtaaaggttatgagctgtaatttttgttattatttctatatgttaaaatatattgttcatccttttcgataagaaaaaaaagatgaagcaattgaaatcattgaatgtcatgtgtgagaatcacctagacagtcctaaaactaaaaacactactttacattgtgaaatggagcgagcatatataattaattggatctatgaacaatataattagatctgccttttgacgttaccttgtcacaaattatggtgcaaatatacggatcgagctacaaagcactactgtccgtctgccatccctgaccatttctttattgtccttagccggctggtgacatatttggtgacgcctaacaacaaattcaggtgatcaccctactgttcatcaagacactttagcagcacacactacagtgcaatggcgctgcatcttctctcactacgggagaaaccatctttggtcggtcaatcaaattccacaatagttccggatgcaataaaaaccgggactaacgatattctttagtctcgatcaaaaggttagagctactttttttataccaatcaagactaaagatcaatttttagtcccggttaaaaaacggtaggcggtgtcagacccctctattatctttagtccactaaagatctatttctagtctcggttgctaaacaaccagaaaaaaagattggcatgcgcggagaggaccaggcatgcgcgcgtgatcgaggaggaggcgcatgggatcagttaataagttagtctccttctcctccctcacatttatctcctcctctcctcactcaccccatcttttcctcttcctcctccggatccgccccctcccctctcctccccctcctcctcacatatcaggcggccgggcggtgatggcggtggcctcgcgtggcagcggccgggcggcggcggaggcagcctcgcgcggtggatccaggaggggaggcggccagaccacccccggcagctgcaggcggcggccggcacggaggcgcgcggcggcaagcggtggaggccggcgcggctacacggatttttttcttttttccttcttaaagtgtgattcgatctgtgttgagaatgaactatattgttctgaatgatttatgttgaactatgttgctgtgaatgatttgatataatgggcgtgagatatacaaaatagcaaaaaaaaaaaaagaaaaaaaacttggtcccaggtatttgaacttcgtagtccaggggttaccaaccgggactaaagatcgatctttagtgtcaagtatttaaaccttcgtagtctcgattggaaaaccgggactacagggggttaccaactgggaatacaaagcatttctccaccagtgtatgagaatgatcttttcttccgtggaattgctgtatatctgtcgacagatttcgatttcttcaccgtcaaaatgttctgaacactaaaattaatatatcttcctggcccatgcacatggataggatgtaaaagcacaaaaaaatgagtttgaaaagaaagtataatatatactcgctccacttttttaatgttggaccttaatttgtatatatatttaaccatttatctttttagaaactcacataattattatttattttgatatgatctagtttatttttaaaggtgctttaagcttggcttacaatttttacgtaattgtataaaagttttaaataaaatagcagttaaatgaatgaacaacagtcaaactgaagggagtatatcacagtccgcataggcagaaacaagtgctcaagttttcaacaaacttggatgtgttaatatgcagatgggggagctgaagaaactggttgaagagggaaagataaagtacattggactgtctgaagcgtcggcatcaacaatcagaagagcacacgcagtgcatcccatcacagctgtccagcttgagtggtctctgtggtcaagagatgctgaagaagacataatcccaacttgcaggtcaacataacaaacaatatatattaatctgcccagagtgaattttcataatattttcaattggacatatgtttctgaacatttcagggaactcggcattggaattgtcggctttttgtccagtggcccaaaaatagtaggcacaatgtccgaactagagatgaaaacggatcgaatacgctcggaaactagctctatcatattcgttttcatattttttctcgaaatcaaaatcggaatcggaaacccggatacgaaaacagaatcgaatattatcgaatacaaatacgaagcgaatatgaatcgaaacgaatacggtaatgtataattatcaaaatatcaagacccctcaaaataagcttcttaaaacgaggaagagatgtagccattagttttcaaaaacaaaacatcagtattctcaaattttatcagtattcttaaatgttatgtttattttccatacaaatttatgttatcatgaaacaaataaattaatgtgtatagctgaaattttcgtaagcacattgaaatttttgaaaattggttgaatattttaaattttgggttgaacatttcaattgaaagtttttaaaaatttgagtggttctttttcagaattgaatttttttatttgtttgtttgtggaccatttaaggacccgcatggaaaaatcaatttttccatacggatgacttaagaagccgtatgcaaaaataaaatttgaaaatttgaaactaatttatctcactcatatgaactccaaattggatgatttttttttcctaaatgtttttaaaatcatgctctatcatgttattgtgttcttactgctattattttggcaatttttttcttgtgactttattttatcaattaaaattttgaatttcaaaacttcaaataatattttgaagctgtaattaatttcagctgaaaaagtcatgaacataaaagttatagagctcatcaagacatacaacttttattttggtcatttcttcatccgataaagtgatagtagtattattcaaaaagtttacacatctctcttatagtttatagaaacaaatgagatagatgtaaattttatgaacaatgttactatcactttgtcggatgaaaaaatgaccaaaataaaagttatagatcttgatgagttatacaactttattgttgatgactttttcagttgaaatcatttagtatttcaaaatattgtttgaagttgtcatattttgaaattcaaattcaaacggttcaaacaaagtcatatagaaaaatgaccaaaacaaaagttgtagatgttgatgcgttatacaactttattgttgaaaattttttcatttgaaatcatttactacccgaaaaattatttgaatttcttatatttttaaattcaaattttatatggtttaatcaaactcggatggagaaatgaccaaaataaaaatgatagatctcaataagttatacaactttgtttttaacaacttttttcatatgagttgatttagtgcctttaaattcgttttaaagagccacatgtaaaatgaaaattgatttttacattaaaaaaatccaccattttcttcaccccaaccttatcctcttgactcttcctctcctctctctcacacacacactttctactctctctctctcacttcctctcatccacagggcgcaggtcgggtcgggcggcggccggccgagagcggtgcggagcggggcaggcggccggccgaatcggaaaattggtccggacagacggaaagtatccgaaccactttcatccctagtccgaacaagattaccggaaggtttcttttgcccatatatattttctctccgtgtttttaatagatgacgccgttgacttttatacatatatttgactattcattttatttaaaaattttatgtaaatgtataagatataaataaaactttaagcaaatgtataagatataaattatgcttaaatactttgtgtgataaaacaactcacaacaaaataaagtataatcagttaaattttttgaataagacaaatgaacaaacgtatgataaaaagttaacggcatcatgtattaaaacacggaggtagtatataacaatccatttgaccaccgtcatctctcttaaatcaatcatgacactatccaaaatttgcaaactcaatgaatggccattttctgtttcttccaggatctaccaagattccagccggagaacatggagaagaacacggtgatcttcgagcgggtgagcgtgatggcgacgaggaagggctgcacggcgtcgcagctggcgctggcgtgggtgcatcatcaggggagcgacgtctgcccgatcccgggcaccagcaccaccaagggtggccaacttcgaccagaacgtggcggcgctgggcgtgcgcctcgcggcggaggagatggccgagctcgagtcgttggcggcggcggacgtgctgcgcggggacaggtaccacgccagcttcctcaccacctagagggactccgagacaccgccattgtcgtcctggaaggaataagattgaatgataactacacaagtgtggctatgcctccattatcct

SEQ ID NO: 18948 - DNA, 2216 bp, Oryza sativa
ttggcatacacaagaagatattacgttttagattgcttcagcatgaaagagtaatatgatctagttattttgttgacagatatgtcgaacaaacaaatattccaagtttaccatggaccaggaaacgtccgttacgggccaactggggtagatctgtcagattttattgtattagaaaggggaattgatagaccggctgagagaagtgtaccttctataaaaggatggttaatgaggggcttgagagttgatccacagacaagtgacatatcaatcaatattatagtaagtcgggcaactgagggtttttattgggaactaatgccagttcaaaactctcgagtgtggaaatggtatgtggaaaatgcattgcaacgcgggtggcctttagctatggttccgtttgttcacccgaaggatccaggtgtgcagatgaacatggatgatggcgagggaccaagtgctgaagtaaatgagacttctgtggaggaggtcaacgcacgagaggatgggggcgtagtagctccagtaggcattcaaccaggtggagtggccgacgagggggagactgtcggtgccattgtggatgaaatagacagggaggattctgacaacgagcgtgtagagaaaggtgattcgtcagatgatgagacggatattaatccagcagaatgggctagtgaggatttttctgagatggtcgtctctgaagaggatagtgtgagatgggagtacaaagaaaatgaggttattcagggagcgatttatagtagagcagaagatatgaaggaggcggtaaaacattttgcagtgtcaattcatagagagttttgggttgccaagtccaaccggtcgcaatatgaagttcggtgtgttaaggaaaaagatggttgtccctggagagtgcacgcgtataaggggaaatggaaggattattggacagtgtcagtcgttaccaagcatacatgttttctacctggtgtttagaaataccacaggaacattacatgtgcatttgttgcaactgagatgtatgcgcatgtcatcgataatctcacatatgaaccaaggtcaataatccgacacatcgaagagacatacaagtatactattagctatgccaaggcctggagggccaaacagaaaataatagagatgagatttggaacttacgaagcctcgtatgacaatttgccacgcctgcttggtgttatcgaggaaagaaaccctgggagctcttacgaagtgaagaaattcccctcaattgaacatcctggcaagagtgtgctgcaaagggcgttcttagctctacatgcatgcaaggtggcattcatgaactgtcgtcctgttctctgcattgatgggacattcttgacaggaaagtattggggccagatactaacagcaataggggtagatgggaacaatcaggtattgcccttggcatttgcttttgttgagagtgagaataccgacagctggtactgattcctgaaattagttaaaacaaaagttgttggtatgaggccaaatgtgtgcctgatacatgataggcacgctagcattctacgagcgatagaagagttgcagtttgggagtatggaacgaggataccctggtgtttgggaagatgtacagagtaggtggtgcatgcgtcatatgggagctaatttgttcaagcaattcaagaacaaggagcccatgaacatgttcaagaggctatgcaatcagaaccaggagaaaaaattcaatgagctttggaagagattagatgagttgacagccaaatgtagtgatcagcgtgcaacggctccatcgaccgccgttgctgaccctcctgaagctcttggacctctcccaatgaatagtccaacattggttagaagaactggattggagattcggaaattttctcagtggattcttgtaacgccccgattttcgttcgggattaaaaatcatttaatgatgcatttcctagaaattgaataaaaagttaagcaatttaatcaagtgaaataatgggagaattaaaattttcccttaaaaatcattggccgggaatattttgtaatattctttgtgccctaatgtactctccggaattttccgtgaattttcggagctcgagaaatagttttaaagtcacgaagatcatttaaccaattaaaataaaaagaaaacaaataaaaacctccctcctctctttgggcccc

SEQ ID NO: 18949 - DNA, 6935 bp, Oryza sativa
atggaccgatgaagtttcagtcttcaaagtcagggcatctgtaaatccgagaaatgttggtcatttttttcaaggacaatagttcaaaagttctcagtcaggcgaaagtaagactacccactgtaaggggggtaggtctcagagatgagttttggtttacctcgtcggcatttcacttgaatgttcaacccagtgcagcaatttggttagtaattaaaggagtccgttgcgagccactagcagagtctcccaatctcaagtcaacaggttcaattctaatgtacacccttgaggccaggtcaacagttcagcttagagaagtagcatcgaggatggttgcagttcagacgaaagacaggtcaagcaggttttcctggaattacttgttatttgaattgggaccagtcgaagcggacatagggtaaatgatttataaatgccagattccattttcatcctcttatagccagcgtggtgaattctcaggttaccaaaattgctaacctcaacagttcagtccaaactaagtaagtttcaggagcatccgcagtcctagactgggtcagttcaagcagaaccagtcggtccagttttggcaaagcaaaggaacagaaaggtcgaatccagccagttcaatcgtgcaggtttgatcaaccagtcaatcaatcagttcgaagcagaatgtggcagttcaaggtgcagatcagtcagaccgcccatctgcaccggctttctttctagccatcccagaatctcgggacgagattcctgtaaggggggtagatttgtaacgccccgattttcgttcgggattaaaaatcatttaatgatgcatttcctagaaattgaataaaaagttaagcaatttaatcaagtgaaataatgggagaattaaaattttcccttaaaaatcattggccgggaatattttgtaatattctttgtgccctaatgtactctccggaattttccgtgaattttcggagctcgagaaatagttttaaagtcacgaagatcatttaaccaattaaaataaaaagaaaacaaataaaaacctccctcctctctttgggcccctttcggcccaattccccccccctctctccctctcgggccggccttctccctcggcccgctcggctctctctctccctcaagtctgctttgcctccccgtcaacccgaggccccacctgtcatcttctcccccaaccgtctcctcctctctccttccccccgagccaccgacaggtgggccccaccagtcagggccatccctaacctccggctccctcagccgaaaccgccgccacggcctccccacgtcgccgccgattccgcctcctcctccacccgcgcgctcgccccgaccgcgggaccgcgtcaccccacctcctccactctcctcccccacttttccccccctccaaaaccggcgccgaaccaccccactcgcccacgtcgccggcgcctcttcccccttcaaatccgcctctcccggccacgttctccccctccaggacctatataaacgactcacgtgcctcccttcatccgttttcccctctccccgagcaccccgcgccccctagacacctccccaccgtgctccctctagccgccgctcgccggcgatctccagccgcccgccaccgccgctcccgtcgctgccgcgctgcgccgcagccacctatagcatcacagcgccccaccgcaccccggcattcactccatctccctcctccaccgccggaaccaccctcccatcgcgaggccgagccactaccgccacacaccgccttcagccggccgttgccgccgcgttagtcgtcgctgcacctcgccgcttgcgccgtcggcaacgccgtgccaagctctaccccggcctccgctccgttttcccaaatcgccaccgtaaccacacctcccccgtcaacccgagccaccaccaccactggccgactccagccgcgtcgcaccgctgctacagtcattgcagacccacgccgttgcctccctcggctccacaaggacgaggagaacctcggccatctcttcccatcgccggaaactcactggacgtccagattcccgtgcgccggtgagcccttcctcccttcccttcctctccagccggccatgtcgccgctccgtcctccctaacacctcccctcccatcctagggtgcagctgccgctcatccgcctcttcccgagcgccgcccgtcgtcggagcgtcgttgtttccgtccgtcccgagctctgccgtcaccgcctcgcgttgccatctcgccgccggccacctccttccgtcgtatgctactcggtgagctccccctcccttttcccgccgcactccgccgctccccggtcggccggtcggcgagccggctcgcgcccgcctgaggccgcccgatgcacctcgagtgaatctgggccgtccacgtggccgttcggcgccgcccgcgtcggtgccctcgtggcgccacgtcggcgccacctctgccgcatgtccgccgtggccgccacgtggccgtccacgtggtgcgcccgcgcctgtgccgcggtggaccgagtccaccgtgggccgcccccttggctcgctgacgtgtggggcccgcctgtcggcgccggccctttgctgacgtcagcacttgtcatttcctttgagaaattaattattaattgcgcaataattcggtttaattctagaaattcatttaaatggctcaaaatttctaaaatccatatctaattcattcgaactccgaattgagccattcaacttgcaaaattcatctaaaattgagctctacatgtttgtttagtttttatgtcctgtttccttggtttttattagagttttttctcgttttgcgtgccagcgtgtagtttccgtcgtttcggaagtccgcggtcgcgaggaaaagagttcggaagatcaaagtgaagaagcaaggcaagtcacacattccccttgagcatgttgatcccaatttacaaatgttttactgtttgcaaacaaatatgcatgttttgctaattacatggggtcagggttttacctatctgctcgcttgtgccatgtttacttgatatctgttctttgtcaaccttgggtaatgaatcgactagctcatgttacttatgtgacctagctagaactatatgcttagccatgcttaattaccactagctcagttgatgggataactgcagtattagacctttttagtatcagagtgagctgcgtgctcgagacacctggccatgcttcatggtcgtaattatccaactaaaatgcgactgaatggtgggctgtgggtgcatggttttgctggtcgcacccatggcagttaaggaccggttcgcgggatgccctggaagaatttatcgtacttaccacaagccagcgtgggcaacggctgggcttgtagtgtagcttttctctagccgacgtacccaggcgagggtgggcgtgatggagttgggtcggccggggtgtccggttgatcggcttccggattcaccgcggcacgaaaggggggctgcccgttgcctgctggggacgggggcgaaccctaaggtgtggtgcgatcggttagagggggttatgcgaagggtcctgtcacggcctctttccggtatgtcgtggtggcatgtcggcgcacgggaacgtgtcgtggggctgtgtcttgtgggtacagttgtacacctctgatcagagtaaaactattcgaatagccgtgcccacggttatgggcggtcgaccagattcaccgtgattagtctcacacttaataaatcgacctaatacactgtagtttaggtgggttggttgggcctgttcaacgtggtgtagcgttgatcagtggagatttaatgttactttaattactcaacagttttactgttttgctcaataaaatgttttacaaccgtctttatgcaaatagccacaaaccgtccttgtgttccccttgcacgtctgcatcgttggtgtggcttgctgagtacggtggttgtactcagtcttgctattattcccccttttcagaagtgtagtgcttctgagctgaagacgaagttagaggaccaaggctcagaccccagttgagttttgcctgtggagtggagctgaagccccgctaggatcgcctttttccgctgcggttgatcggcttccggattcaccgcggcacgaaagggggctgcccgttgcctgctggggacgggggcgaaccctaaggtgtggtgcgatcggttagagggggttatgcgaagggtcctgtcacggcctctttccggtatgtcgtggtggcatgtcggcgcacgggaacgtgtcgtggggctgtgtcttgtgggtacagttgtacacctctgatcagagtaaaactattcgaatagccgtgcccacggttatgggcggtcgaccagattcaccgtgattagtctcacacttaataaatcgacctaatacactgtagtttagtttaggtgggttggttgggcctgttcaacgtggtgtagcgttgatcagtggagatttaatgttactttaattactcaacagttttactgttttgctcaataaaatgttttacaaccgcctttatgcaaatagccacaaaccgtccttgtgttccccttgcacgtctgcatcgttggtgtggcttgctgagtacggtggttgtactcagtcttgctattattcccccttttcagaagtgtagtgcttctgagctgaagacgaagttagaggaccaaggctcagaccccagttgagttttgcctgtggagtggagctgaagccccgctaggatcgcctttttccgctgctgctgttttcgtttcggtgcgaggactaagtgcctcttttgtaagtattttacgctttatttacgtttggaactgtatattacttgtcgttttgtgtaccctggctggtcctggacagggatttaatacacaaaatagtctggaaatttgggctaaatttctgggcgtgacaattctgcatgaaccaaaagagaaatgggccaaggcgtatgacacaggtggtgcatcatatggaataatgacaacaaatttggcagaagtttacaactgggtgatgcacggtgttcgtggactgccactagttggcatagtggagttcattttacatgggacatgcagatattttagggatcggttccaggcaattcttccctctatgccgaacaacagcattttgtttggaactttcatgcagaaaaagctagaggagttgcgtaaaaaggccatgaaacatcgagctctagtgcaaggtactcaacaacaaaggtttgagatactttgtcaagataaggcaggcaggggtatctaccgcaagagagtgaagcaggagtgtgttctcaaagccaacggcacatgtcattgctcttgtgcaaagccgaagctgctccacaggccatgcacccatgtcattgctgccgcagcggagtgtggcataccagatgcagtatatgtgtcacagtacttcagtaagcaagcaatatatcatacatggagcagcgagatttatgggttcggcatagctggggagttcacagagactaacgatgaagtactcaatattcctgacccatcgaagctccgaggcaaggctagaaggaggaggactcgtcgcatccgcaacgatatggatgagtcggatgctggtagggtgaagcattgcagcaaatgcgatgaacgtgggcacacctacaagcattgtcctaaagacaaggagaaaccaaatgcggcggaggcaggactatcaggatcagcagtagatggagctcgccctacgggtgaagacactacctacactcgaccacgtcctaggcgtcgtcgtgccacatctggctacgtggtgtagttcttatgttctatgttggcatgtggctttgcttgtaatttgtttcgaacttattgatgtgtttatgtttcgtcatgtaatgtcagacttcggcatgtcatgtctttaggtctcgtgatgtaacgtcagactaaggcacctagtgtgtttaggtatgctgatgtaatgtcggacttcgatacgtaatgctatgttatgttatgttatattatcgaactctacatatatgttaaattgcacgtcatcgttatgtacccttagtaacgtttgctatatttaaatagcctgtactcttgttgtacataattattctcatgattttattactatttcataattttacaacttatcttttgttttacattactactttttgaattgttctaacacgaaacactatatttttcagagatggcacgtcaggatacacctcagttgttggacccggcgatagatcaccgacaccggtctcaccttactgcggtacagggggctcagattgggacgttccgggcacggacgtgcggtgagctacttacggttcacgactcctttgtcgagaggtacaaacagtgtattactataaattagttgcgctgtaataattattataatgacatgttaatttgttattgcaggttgcgtgaggccggcctcctaccgatgtgtcggctggtggaggctgccgccggcgacgtggacccggccagacgatggactgtggaccggtccctcctagcagctttggtcgaccgatggaggccagagacgcacacttttcacttgccgtgcggtgaggtagcccctaccctacaggacatatcgtacttgttggggctaccgctcgcgggagacgctgttaggccagtgaccacgggtgtggactggcaggacgatcttacggcacgtttcgcactagtacagcgcgcaccgcatctcccgctcgagccgttggcacaccaccgcaacaccggacctacgaagaggtggctgcttcagttcaccgtgagtgtttttgtaccgaaatgacaaccg

SEQ ID NO: 18950 - DNA, 1932 bp, Oryza sativa
tattccatttctccactctagtttggtagtagttgagcaacatcccctgaagatcaacagatgataaccaaacagataatgatttaggatcacaaataactagattgctttccttgctatcaagtgatgtcaaactgacctggaaagtcagatcccaaaacttctgcattttttgctcaaagcaagtgcaagtttcagtaatcatcattttcttttgctcattccaaggaattatacttgcagcagaatcagtagtgcaacatttcccttctctaacttccagcaaacaaactaatggcagccaaggtggcatgacaaatagtctgagcttgtcaacatgttttcctttgaaggaaaagttcacagaaccaaattgcccagtactgctcagctccacaaccatcactcttgcaagaagtaagtgactccaacttaagtagcagttgccctttctttccatttcaacaaaagatagccccaaaagtaaatattcaggttcaccagcagcatagataccttccttgctagtggctgctataaggttgatcaaaaaggacaactcacttttcactccaacattgaatttcagcttattgctccacaaaatttacctccaatgaaaataatgttgtgggaaccaatcatccatccatattaatattttgcgaaggtggacctttccatcacctggatcccactctagtggcccaaacatgacatgtataatgttcagcgagtttaccaatgaaaattgcttgcccacaaagagttgaaaccatttcgcttcggttggagggggccaaggtggcagtatatgtactttacaacagctgcagttgaatgccagccatgacattaactgtgactccaatatgatcaactcttgatcccttgatgttatgggtggccatggatcaacctcaaagtgttgcaacagcagttgccatggaactaacaaatgtccttcaactgattccactaacactggggtgcttaagaaggacaaataagacacaacttgagagttgttagacccagaacatttcgctgaatacctggtgggcatcaatgtgtaatgcttgatgtcggcgatcatccttggtgagaaggcgctcaatgatgcaatggatgctggaacggtctcaagtacaaccgtcttggtcaggaacgcgatgtcggctttgttggcgtcccacttgacatcgaagcccaacatcgaacacttggcgtgcgtctccttggaatagtcagtggtgggaattttggtggtgctggttgcaccattatcagctaccaacttcatggaggccatggcagtggcggcacatttgaccatcgcaaccagtgtgagtttgggctcgatgtcgggactagagcatttcgtcaaacatgtggtgggcgtcacctttgactgctctttcttaattgacgctggcaagtcttttgccttcttcccaacttccggtgtgcatgcttcaaccacatctatgagagaccgtatatcagctctagttctccgatcagcctcctctcgcctcagctcgtactcctctatccgcctcaacagcaagtccaatttgtcttctattgccatggcaccctacttgatgagaactttctcaactagaccaagagctagatgggggaaaccaggctggctctgataccagattgttaggaacccactacttccagctcaacaactagcatccaccatagaagcaacaactgctttggggacaagagaagacgacggcgacattttggcaatcttcggcgaaggaaaaccgatggccgggcttcagcttggcgctgcgatgctgaggaagacgacggcgaaaaccgaccaccacggagtcatcgacagggctcgaccggaggtggagtagatcggcttcacgtcgatgaggggattccaatgggtttcagctt

SEQ ID NO: 18951 - DNA, 999 bp, Oryza sativa
ctactttggtttgagggttatgacaggttgtcataagaaactcgtcaacccagggtaactttgcgatgcatcatatcgggagggcatagctgtcacgccctgaagtacccctcccttgctctaaattcataaaataaatcgttcgaagaaattgtttaatttaacctagagagaaaccctaaattaataaatgcaaataataatcggaatcggcatgtggaatttttcttgggttctacatgtcaaaatacgctaacaggatttttagtggaattttcagagcattggaaataattttaaccaattaaaataagcaaagtgcaatattaaatccctgggaaaatcctttttcctttttatccttcctttttccccctcttttcctcctttgggccgccggcccatctctcccgccccctcccgaagtccaggtcgcctccccctcactccctcgggcgctgacaggtggggcccacctgtcagcaccttccccaacctccagccggagggacggcctccctcctccctaccgccccgcgctccctgccgccccgggccacgtcgcccactcccccgcgcgcccgcactccccgcgcccacgccccactcccgctcaccccgcgcccgcgagatggccgggattcaaatttgaatcccgcctctctctctctcctcctccacctcctccactactccggcgaaattgcgccattcccggccacgactcgccgcctcccctcctatttaagcacgcccgcaccttcctctctctttttcctttctcggccgagccctcccgagccctccatcactcccgcaccgctacacccgccgccgccgccttttccactcctccggtcgccgctcgccgccgctggagccgccgccgagccaatctgccgccgccattagcttcgccgccgccaaagctaccccggccgccgcatccccatccaatcccgccgtcgggacccgcttctccccgcgcgccggtgagta

SEQ ID NO: 18952 - DNA, 936 bp, Oryza sativa
cgagaaagaacacacgcgcaagcctactaactgctcgtctaccgctgcgacgggccaggacggaaggtgagcaacagcgcatcctccgtgctaccaacgccggaggcttccccctcctgaggaaccacgggcgcgggctcggcacgaggggtctgaacgaagcaagtccacgccagggactgacgaacaagctcgggcctggaggtgctcttgcgggcggtgatcttctggctgcggcagacgcggcgacgcttggggcgacagacctctccctgggcgatcttgagctgatgcagctgcgcctccactgcgtctaggtccttcttcagctgcagattctcctgacgcggctccaggatcttcatgttgttctcgaccatcccacggcgcaccatctgatggaagtcgatacaagtcgcgtcgtacgcctccaccatgcgcgccaggtgcatgatggtagcgtcatcctccgagctagcatcccggaaggtggcgaagtcgcgggctcctccgtggcgagggtggtagcggtagggcgagtgctgcaactcgtccgggtagcgctggtgaagagtgacgatggcgaggagagcgtcgttctggcaagcggcggggaaggaatccccacccgcggtgactgccagcgaagtccgctcgggatagccagagaggatcactgcagtgacctcccaaccagcgtggggctccgcgtcgtcaccctcctgctccggaagcggcctggcctggtagtccactccatgtgggtaccccaagaccacgcatatgccccgcagctccaagacgaagccagtcatgtccaaaccacgacgggtgacgctgccggccatctacaaacaaaaacaaaaagaaaaacaacattttaaaggtcagattttggcgataaatgaagcagcaagacagagagagactagacag

SEQ ID NO: 18953 - DNA, 704 bp, Oryza sativa
atcatgtgtaccttcgtgtcacgcctcttcggggagttcatcgttttcacaccaaaggaaaattggcaccgcattttgtgggacctaataagattgtcagtagaagaggagaggtcgcctatcagttggagttacctcaatccttggcagatgttcataatgtgtttcatatgtcacagttgaaaaggtgtttaagggtacccactgaagaagccaatcttgagtagatagaaatccaagaggatctgacatatgttgagaaaccaatccgtatcctggagacagatgagagaagaaccaggaatcgagttatccgtttttgcaaggtccaatggagtaatcactcagaagaagaagctacttggaaacgagaagatgaattaaagtcagctcataagcatcttttcgccagctcttccgaatctcgagaacgagattctgtttaaggggggtaggtttgtcacactctaaaaatcctgaatttataaattgttgtttaaatggaattattagaaatgatttaaaaagcctagaagaaaagatctaattttaaataataaattccaatataaaagtgggctagataaaattttattaaatacttctatagttcctagatttttctggaatttatttgggccaaggaaatatttttaataaatggaattgcatttcatgaataatttaaaaaagaaaaaggtttt

SEQ ID NO: 18954 - DNA, 3064 bp, Oryza sativa
ccagactttaagaaatggcttggagccatgaaatccgaaatacaatgaatggatgacaatcaagtttggaacttggttgatccacctaatggtgtaaaagccattgagtgcaaatgggtctttaagaaaaagacagacgtagatggaaatgttcacatctacaaggcacgattggtggctgtcacaccctaaaaatcctgaatttataaattgttgtttaaatagaattattagaaatgatttaaaagcctagaagaaaagatctaattttaaataataaattccaatataaaagtgggccagataaaattttattaaatacttctatagttccaagatttttcaggaatttatttgagtcaaggaagtatttttaataaatggaattgcatttcatgaataatttaaaaaagaaaaaggttttaaaaatcctcttttcgctttgggccgaaagtcggcccaattctctccctctctctcctcggcctgcttgcacccggcccaaccagcccaccgagtcgagccgccgctcactctcctctctcccgctgacaggtggggccgtgatcttcctcgcgccgcccagccgcgccctagccgcgcaagccggcgccgcccccttccaaaattcgcccgcatctttccatctccgatcaaatcaatagaggggaaatgatcctcgggatcccctcttccttttctcttttggaatcttcggctaatttcgtttggaaatcgttggattcgagctcgattcggattcgttttttcctcctaaccctagaccttccatcgccgttgttggccgccgtgggcctacatcgccgctcctagcccctatataaggacactcgggacctcctcttttcgtcgccaccctcgcctcagctcgccgccgcttgtagcgccgcctccacgacaacccgtgcgccgctgtcgccgccgcgagtccagccgtgcgccgccgccgctctggtcgtcgtcgtcgctcgggaaggccactgttgggttcgccaagtcgtcgccgtcctcgtcctaccctccgtttccaccgaggatcgccggagcaccgccgtcgtcgtcgacccgaacgcctccgcagcttcgacctcgtcgccgtcgctgtccgttgccgtccgccgtcgtccaagccctcagtgagttcgccgcgtcgccctctacgtgtaggtgccctccgtttgcgccgccgcgccatcgttcgccggcgagcgtgagttgccgagccgccgccggtgatgacgtcatcgctgacgtcagcgccgtgtcatccgtagacccgtggtggattagatcgatctcggccgttcgttttgtctagattagatctcggccgttcgttccgtacaccgtccccgtgcacccggtccaccatgaacccgagcccgctgacgcaataaatcatttttccttttcaaaaataattctttattccgtcataattcaattaaaatctaaataattgatttaatccgatttaatctttaaaaactcataactaattcatcttagctcggatttagttggttcaagtctctaaatttttctaaaattgagatctacaggttaaaagtatccacatgtactgttcatgattgtttatgtgctgttttggtgattttgctcttttatgcttcgattccgacgttcctggagagtccgattttgcaggagaagactttgaagagttccaaggccaacaaggcaagtcacacatatcccaaacaatcctttgagcatgttgatcccgtttaaagctattgtttctattcaactactgcatttattttcgaatgtcattgggtgggaataacctattgcctttgttatactttgtcgtttgattaataattggattagctagaacattatatagttttagctaaaagtgcataggatgcttagccatgcttagagacattagctcatataaatgggataacttatgattcactattatttaatgatggcttaatgatagctcacgatggttaatcgtgattggttaattaattaatttgccaactaaaacttgataatggtgggttgtgagcgcatggttttgatggtcgtgctcatgacaattaaggaccggttcacgattttcggttgtgaaacattaaccgtgccaaccacaagccagcgtgggcaacggctttactttttatatagtatggttcattctggagcaccagactgtgaagtggcggagataagcacacgggggtttctggggagtctatgccttgtttataagggggtgattatgatccaggaatagtaaactgctttgaattgtgttatgcagagggtattgtcacaatctctattcgggtacttgttaagtatcgcgacgcatggttgacatgatgttgaggttgtgtcttgtgggtacagtggtacacctctgacctgtcacgtcctgataaattcatcccaaaataaaaatcattttataaaaggaataatagaattaattacaattcgaaaagaaattggcaaacactaaaatacgtataagaaaaattcgaatgtggcccagaaaatttttgttaaattctccttggtctaaaaggagctctcaaattttacttgaattttcagagcaccggaattatatattaagcaacaacaacaattaactaaaaagaaaaactaaaaataatcctcctccctcctttgggccgagtccagcccaaagtccttcaatcctccctctgttttccctgtttctcccgggccgcccctccctcctcccctcccttcggcccagctccctcctcttctcctcctgggccgcctcggctttgcccggcccaagccgagccgcgcctcccacccgtgccgcgcatgtgcgcgcgcgtgcgcgccgttgccgcgcgttgactgcgcgcctctcgcatgggtcccgcctgccaggcgcgtccccgacctccagccgccggcctccttcctctctctctctcccgtgaaccctagcgttgttcctcctccaaatccaccccattcaagccggctttttccaaattaaatagggggaattaat

SEQ ID NO: 18955 - DNA, 2014 bp, Oryza sativa
tgagcgcatgattttgatggtcgtgctcatgacaattaaggaccggttcacgattttcagttgttaaacattaacggtgccaaccacaagccaacgtggacaacggctttactttttgtatagtatggttcattgtggagcaccagattgtgaagtggcggagataagcccacgggggtcactggggagtccatgccttgtttataagggagtgattatgatccaggaacggtgcactactttgaattgtgttatgcaaagggtattgtcacaatctctattcgggtacttgttaagtatcgcgacgcatggttgacatgatgttgaggttgtgtcttgtgagtacagtggtacacctctggccagagtaaaactattcgaatagccgtgcccgcagttatgggtgggtctaacaatgtctttcgtgattagtttcatgcctcttaccatattaaatgacgatgataataatttgtttagctcctggtttagaatggtatattcctggtttggaggtagaactgtgcagccgggtttggttgttcagaatggttgggcctatgcaacgggtatgttgtatagcgttggattaatattgtttaattaaatactttgcaattttattaaattctggagtatttattaaatgccatttatgcaaatgagactatattatgccattctttgttattccctgcatttgcatatttgctgcgtggcttgttgggtatgtcatatactcaccttttaattattcatcaaaggaagagttctacagtgatgctgaaggtgtgaaggattaggcgtagccctggtcaagctgcttgtgggatagagtcgtctgcgccgttcatcttatttttccactgcttggatttttattgtttgagaggaactatctacctctgtaatgactttatattcgcttattaattagagtaatgattgcactctattatcaatttgttattgtgtgcctcggctgattcctggacgagggtttacacacatgtaagcgtttggaattttggatagaaattccgggcgtgacaagttggtatcagagcctccttgaccctaggttatgccaaacggttacctatagaagccctctaaaaatattgaaaaagtagaactgttctcctctctttctcttttaattaaaccaagctaatggcatatgcagtttatagtccctttatttgttctcattcaaaatttactcattattttgtgttgttagtactgtacatctattactgtactaatggcccattttttatctttcttttcagcagaaattttacaacctttctttttatcatgttgcaacataatttagcatgttgattttataactctctcttttattttattttgaaacctgttattcagaagtgcaaaaaaaaatttgtgatcccgttttatactgtttcaacttatcttgcaaagattggtttactttatttatttaccttttactttgattgtctagctttattcaaattaatccaaaaacttgtgctattaattggataaatgtcttaactccctcctttcacttgtctttagatgccgcgcttcaagcctgagtacttgttcggtactgagggatttgtccaggaattgcgtacgatgtccttcgccataggatttgggactgcccctttgatgcccagattcctcacgatcgtgatgaagagaagtgccgtgtcatggtcaccttgaacagtaatcgtgaagacatcccatcggtgatgttcgaggctggagagggaaactatcctcatgcttgtcaggagatggcaaggatcgctacagtgatcagttggccgacactgagtatcgctaccatcctcgccaaccccaaggaagtgaccgtggcagctatcttgaacctgcatggattgacaatgatgctaccacatggcatttggatgagatgctgtgcgccatggatgagtcccgcgctgaggtcgtattacctgctcaagatcgtgaagactggaatcgt

SEQ ID NO: 18956 - DNA, 1821 bp, Oryza sativa
gatatggatgataaataatgacagaatatttagctttgttggcatatctgtattttcctttttctcatactcatggtttctgtattttgcttagtgtgataaatactttgtcagatatttgtcatgtcatgctcctcatacttgagtctatgatttcggttagctgtgctagccttggtacttttattccttccataaaggtgtgatcatgaatagtaatttcaagtcttggaatgttttgtgctagaatattaggggtatgaatgctgagaataaactgttgtctttaaggcagaaaatcggtgagagtggttgccagattttctgtatacaagaaaccaagaaggaacactttgagctctctgatatcaagaaatttgcccccaagcgttttgattcatttgcttttgccccctccgtgggtgctttaggtggtattctaattgtttgggtctcaagagtcttcttagggactccaaaagaagttaaccccttttttgtgaccgtggaattaacttctagattcacctctcaagtttggtccttgacatgtgtgtatggaccatgcaatggccctgaaagatcagattttgtggcctggtttaaaaaatattcagattgatgctcaacagaactagctgttcttagaggattttaatttttacatatctgtgcaggaccgaaataaaataggagctgatatgaatgatatctttattttcaatgttgtaattagttccctaggtttgcttgaaatccctttaaaagggagaaggttcacatggagtaatatgcaacaagatcctttactggaaagactgtattgggtatttacatctgcatcttggactttatctttcgccaacacaactgtcctccctttgaccaggaatatctctgatcatgttccatgtgtggtcaagattgacaaaaatccttaagtccccaatcttcagatttgaaaatttctgggtggaagctgaaggtttctttgatattgtccagcaagtttgaatgttggatcctggctttgatgctcctgcaaaatgcaattccttcaaacttaaaattctcaggaagaaactgatcctttggagtaagaacttgtccagactcatgcttctcttgacaaattgtaataaagtcgttgattttcttgatcttctagaggaagaaagatgcctttctttacttgaatagaatttcggggaggcagttaagcaccacatcttaaaacttctgggagaaagttggtattcaggaaaatttattggaaaaaaagatgtactaatataaatggatgatgctgggagaagaaaacaccaaattctttcaatccattgccacaaaaagatacaaaataaacacagtttctcaagttatggatcaaaatggtcagatagtttatttgcatgatcaaaaagcaagtcttttctatcaaagtttcgaaaacagtatgggtatctcttgctccccaagaatggtctttgatttgaatgatctctttcttcctagggcagacttggaatacttgactgatatgttttccactcaagagattgatagtctcataactttaatcccagctgataagtaccaggcccagatggtttcaatggttttttcatgacaaaatgctggcacatcattgctcattttcatgcagaagctacagacttgcaggttctcaataattcttacatcactctggtgccaaagaaacctttctccagagacagttaatgatttcaggccaatttctctaatgggttttagtcttaagtttcttaccaagttgatggctgatagattacaaggtgt

SEQ ID NO: 18957 - DNA, 738 bp, Oryza sativa
aatagctgagctaaaaaagaatatgagggtcggaaaagcccgagagttccatgaagatgagcatggcacaatctggttgggagaaagattgtgtgtgcctgacgacaaagaactgaaggatctcatactcacagaagctcatcaaacccagtattcaattcatcccggcagtactaaaatgtaccaagacctcaaagagaaattctggtgggctagcatgagaagagaaatagccgaattcgtcgcactctgcgatgtttgtcagcgagtcaaagcagaacatcagaggcccgcaggactgctacaaccccttcagatcccggaatggaaatgggaagaaatcggaatggatttcataacaggtttgcccagaacatcgtcagggcacgattcaatctgggtggtcgtggatcgactcaccaaagttgctcattttattccagtacacactacctatactgggaaaaggttggcagagctttatctttcaagaatcatgtgtttgcatggggtacctaagaagattgtatctgatcaaggaagtcaattcacttcaaagttttggcagaaactgcaagaagaattggggactcgtttgaatttcagcacggcttatcatccacaaacagatggtcagaccgagcgagtaaatcaaatcttggaagatatgttgagagcttgtgcacttgactttggtggagcctgggataaaagtctaccgtatgcggaattctctta

SEQ ID NO: 18958 - DNA, 3222 bp, Oryza sativa
ttgttgttagaagtatatatacttgttttgcagtattagtatatcctttttttttaagtagtagtagtacataacttcttttttcatttagtaccactatacttaggctgcttgttgttagaagtatatatacttgttttgcagtattagtatatccttttttttaagtagtagtagtacataacttcttttttcatttagtaccactacataccactttttaatttaatgtcagtacatgtatacctttttttccggatatattatgatatcttggaatgggtatatactgattttttcttggatgaagtatatatactgatatcctccctgaatgagtatgtactgatcttcccttggaggaagtatatatactgatctctttttgagtgagtacatacttatctcttctaagagtgagtacatacggatctcctctgagaatgagtatatactgatcttttagattagtagtggtttatatttctttttaattagtaagtggtatatgcctcttcttagtcagtataatttttttttaatcagtatatactacattcctgagaagtttatatacttctgtttgatctgtatttactgcgtttctcattgaaggagtatatgctagaacgttttttagtcggtatatgctagtattttttttgtttggtcagtacgtacatactatttttacctggtagtatcaacgatcaaagaacagtacgtatataccactaagcagtgcatgctgtttaaacaaacgagcagtgtgtaatcatactgattacaataacgagtggtatgtaagatataatcgattaagaagtacagaaggttaagttataatcaactaagaagacggtaacagtacatagatacaactgagattaagaaaaagaaatcatagctacagaggaaaaactgcatcactgcatcgccatcgtcgtcagactataatcttaagctaagctaattgttacatctctaccagaaaccaaatcacaatgggagatgtgcgtacatgttcgtatctgcggtcttccaccgttgccgcgtgattcattagctgggaataactctacaaactggcatcatcgtgcatggtcgatctgtggcagccgccggccgaatcgttcgattcgtttgcctcgaccagccgtactgattttagttggaggagagttcgcgtttcttgctgcggtagtggaactgtggaagccgccgccgaccctgatactgttgccatgggaatcctgcgaaaggggagtaatggatgtaaacaaccatcaatgataattcaagcattgaaaggacgtaaatctagtcgatcggcaccatcgacggggagcacaacccaactacctgatgtcgttgctaatcccatccgtctgaggactgtatgaggaagcgggtggtcgaactggttgatggagcgcgccgtccacccgtccgtggctgccgtggcaagattgctccagttcttccaccgccggcggacttcgcgacctccaaccaagctaccgtcaaggaaccgtcgccgcctccgcctcgcgtcaaaccgcaaatgtcgcgagagctgttcgatctgttgagtactaaccggtgcgatttatataattaagcgctaattaaggatcatggattattatttacaaaaggaaaatcaaaacgggtccgttcggtgatccgctaaggagcttcatcgagatggctgtgatggacggtagatggaaccgggtgtacgtactcccgggagtacatatcattttcatatatatatatatatatatatatatatatatatatgacatatattaataatatgtatttatacatatatctatgcatatgtacatgtacaaaatagacatatatgtatatacttaacattttatgtgcatatataatatatttacactaaagtaaatgtgtacatatataaatatagatatgtattacaattcattatgtcctagctacgacttcgacgtagtcgttatctcagaagttaacgacttatgaattgtagatccgtcgtagtagaattcaccctcgggatcaaggacttgttcattgatgaatcccatgagttgttcttgaacagccgtgataaagtcctcgtgtgtgaggttgtccctcatgtgaataacctatgaatgtatgaagttaattagtaaacaagaaatcgatacatacgcaatgaaattttgaatggtttatttatacgtacatcgagttctcttgtggtgatgatttgggttgtaacgcagtggcaatactcgcatatgtagtagccgcacaagttagttccctcttcctgttttgcacactatatacatgacaaacgacgagagattttatatttgaattagagattcgatataaattttgatcatgtactcactacaaatttgaacctccggcgaagtttttctttccaagtgccacggaccaaatgacggaaccgataccaagccctacatgaagtttaaaactatatatgattcgtactagcaatagcaaaattcgtaataattaataacactggaacatatgacattacctgtttataagttcaaaaatctggtcaaaagtagactcatctttattcattgagtcatagacattgactctacattccttcaagtcgaagagtaaaaggacccagtggaatatgcaatttgtgtgagatgatatatgaaacactgtgcatctatatgtacgggaacgaaatttgttcggtagatagtaaaaactaactctgtgttgtacggcagtagtatgaacgtcttgaaatgctgctccttgaggagatggacgagattgacctctgtgggttgcggatacttggtgaccatttcgacgtttactttccgagggtcgatgaatccagtattgaaaaacccccgctgtcgagccctttgaatctccattctacaacgatgaaggaattgttatatatggtgtacatatatacaaggagctaattaaaggaacgtaagaaatataactcaatgatatgtacaaaatccatgcgctcagaatagagacgtcgagggcatctagttggtatagttcgtagatatccttgaaattgatccagagaacatcttctccttgtaagaagtcggagttcttgattctcgctccaataatctccctaccgctggcgctcatctccatgtaccattcatggaattggtacatctgtgtgggtaggga

SEQ ID NO: 18959 - DNA, 667 bp, Oryza sativa
cgtcaactgttcgggatagaggtattaacggaagcagaagagaaagtcagaatcatcagggaaaggtttaggattgcccagtctcgacagaagagctacgcggataaccgccgaagggaactcacttttgaggcagggattacgtgtatcttcgtgtcactccgctccggggagtacaccgttttcagacgaaaggcaagttggcaccacgcttcgtgggaccctacaaaatcctggaacaaaggggagaagttgcttatcagttagaacttccatccaatatgatcggcatccatgacgtgttccacgtgtcccaattaaagaagtgcttaagggtacatgaagaacaggctgattcggaacacattgatatccaggaggatctaacctatgtggagaagccggttcatatacttgataccagcgaaagaagaactagaaacaaggtcaccaggttttgccgagttcagtggagtcaccattcagaagaggaagcaacctgggaaagggaagatgagttgaaagccgcccatccgcacctcttcgccagctcctccgaatctcggggccgagattccgtttaaggggggataggtttctcacaccctgaagttctcctcctaagcctaaaagtgaattaataagagaccctaagaaaataccggtg

SEQ ID NO: 18960 - DNA, 2063 bp, Oryza sativa
aggcccgtcggagtccaggcctcgggacccgaagggagcgctccaagctcccttagattgattgcttggatctctgagatccaaacatacctcacagataagactctacctgaggaccgcgaagggagtgaacgcgtacaacgcatttccaaacgctatgtgctggtagaagggaccctctatcggcgcgcggctaacggaatcctcctgaagtgcattcctcaggaacaaggcgttgagcttcttgttgacatccatgagggcgattgcggagcccattccgcctcgcgcaccctggttggcaaggcctttcgtcaaggattttattggccgacagctctcaatgatgcagtcgatctggtccggcgatgcagagcgtgtcagttccacgccaagcaaatccatcagccggcccaggccctgcagatcataccactgtcatggccatttgctgtctgggggcttgatatcctgggaccgttcaaacgggccccgggcgggtttgagtatctgtatgttgcgatcgacaagttcactaagtggcccgaggcttatccggttgtcaagatcgataagcactctgctcttaaattcattaagggcatcacggcccgttttggagtgcctaaccgtattattacggataatggcacccaattcactagtgaactcttcggcgactactgcgaagacatgggcatcaagctctgcttcgcctcacctgcccaccccagaagcaatggccaagtggagcgcgccaatgcagaaatcctcaaaggccttaaaaccaagaccttcaatattctcaagaagcacggcgattcatggatcgaggagttgccagcggtgctctgggcaaaccgaaccacaccaagccgagcgaccggggaaacgcctttcttcctcgtctacggcgcagaagcggttctcccatccgagctcaccctgaggtctcctcgggccaccatgtactgcgaggctgatcaagatcagcttcgcagagatgacctcgactacttagaagagcgaaggcggcgcgcggccctccgagccgcgcgctaccagcagagcttgcggcgctaccatcagcgccacgtccgggcccgatcactctgcgtcgacgacctcgtcctacgccgcgtccaaacgcgtgctggattgagcaaactctcaccaatgtgggagggtccgtatcgagtgatcggtgtcccccggccgggctcggtacggctggccacgggcgacggcacggagctgcctaacccatggaacatcgaacaccttcgtcgcttctacccctgaggagggggggtcgggtgtcaggttttggctcaggccaaccccgcacccccctcgggtgtgtagggttggccgggggctaccacacatgcattacattcttatttctcttttttcaacatttcaatagaagcagtttcaatttcctaaaggttgtgtctgtgctgttctttccttttgaagaatcttggcttaaaataaggtcactcgtactcaaccttgccatcgggggttcggtccggtcagctaaaatcgccaaacggggcccagaaccgagccgtgccccggggcgtggtgaactccgggggggaatcgacaaaaacccacaatcgggtcacccatacccctcggtcaccacgttcccggcctggccagtctcgacatgtggatctccccaggcactagccccgacccgagccattcgaggactgggacttgggcacgagcccttatttcaagctaagacgcaaaaggaccacggcacagatcatcctcatctcgtatgtatagcaaaataaaactaacacaaaaattttttcatcatttctgattgcagattaagttaatttgtacacaaaagaggcatgaaggccttagaagaaagaaaaagaaaaaagtaaagattggcgggggcccgggggctcattccgacgcgcccgagtcgacggcctcgtcaccaccatcgtctgcactgctggtgttgccctcctcgtcggagctgggggcgaacgcgagccgaggggccgacccctcgaagcttgcat

SEQ ID NO: 18961 - DNA, 2643 bp, Oryza sativa
ctctcccgtgacccgtagagccgtcgccaccgtgcaagccgccgccgccgtcgcttcttcgtcgccggccgtcatccgtcgtcgttcgtcgcgttggtgagtaccatcgggttcgtctcgtcgtcctctacgtgtacatgccctccttttccgcagccggccgctctatctccggcgaggtcgccatcttggttcggccatgggtgatgtcagcatgacgtcatcggtttatctttttcccgtagattaaatcttcggaaaatcataactaaataaccatagatccgtttcaggtggttcaagttgctaaatttttctaaaataaagatctacatattaaaattatccataaattgaattaaatttatttaattctttttaaatgggctttaattagatttaatcttgtaaaattcataataaattcatttgaagtcagaatgaggccgttcaagtctcataattcatctaaaattatgatctacatgtttgtttattttttatatactgtttatttggtttttattagtctttttcttcgttttgcgtgttagcttgtcgtttccgtcgttgcgaaggttcgtgagtgcgtcggaagtgatcaagaagattaattgaagaccgattattgcaaggcaagtcacacagatcctaaacacaatcctttgagcatgttgatcctatatttaaattctctatttgtttcaactgtgcatttattttcgaatgtcaccgggtggtgtgaacctattcctttgttatggccaatttgcattgaatgccctattccttgataccttgggtaataaattgattagcttgaaccttatgtattggtttggttcagctaaaagttatatatataattgcttagcaatgcttagaaacattagctcactaatgggatgaatcatatatactacattattatttatggttatatttaatggtagctcacgatggttaatcgtgtgatgttaattaattgataattaaaacctggttaaggtgggttgtgagcatatggttttgatggttgtgctcatgacaattaaggaccggttcgcgagctactgttgtgagacattaaccgtaccaaccacaagccagcgtgggcaacggctttatcctttgtatagcatggttcattatagtgcgccagactgagaagtggcgagaagtccacgggggtcgctggggagtccatgccttgtttataagggggtgattatgatccaggaacggtgcactgttttgagttgtgttgtgcaaagggtattgttacgattttcccctttgcaatgccgtggtggtatttcggggcatggcaacatgtgtggaaccgtgccttgtgggtacagtggtacacctctggccagagtaaaactattcgaatagccgtgcccgcggttatgggcgagttgagcaatgtttttcgtgattagtctcacacctctcacaataattattgatgattaactggtaataatttgcttagctcctggtttggagttagatctgttcagccgggtatggttgttcaggatggttgggcctgtacagcatgggtgtgctgttcagtgttgattaaaatttctgattaattactctactgttttactactcttaactctttgctaaatgctgctttcgcaaatgagcctatattatgccatcctttggtatccttgtgcacttgcatatttgctgtgtggcttgttgagtatgtcatatgctcattcttgcaataatcatcaaacctcagttgaagataaaggatccagaaggagaagacgtttggcttataccccagttgagctgcctgtgggagtggagcttcgctagaccgtaattccgctgcagttttcttttcttttgtaagtatgtaacgctattattgatgattctgtatattaaattgtcagtttgtgtacctcggctgattcctggacgagggttctatgcacaaattagttcggaaattactagtgaatttccgggcgtgacaagttggtatcagagccatctcgactgtaggataagccaaatggtcaaaccttaaggactaattttccgaaaacataatttgtgaaaatttctcctttcttccttatctagaattctttgcaaattgtttcattgtctactctcctctctcgttcaacttgaagtagttctgaaactagtggttgaaacctgaagacgccaatgaggtctactgatggaggttaagtaaagtggatcgaggaagaactgaagtgccaagtggtcaagatggaatgaagtttggatcctgtcttagcacctataccgccaaagtaattttgaagaatagttagtagggtagaacgtttgttgtttgctttgtgtgtaggtatggttgcattcccatcattggagaagttcattgatgagtgtgtgactatactaggttgcttgcttaatcaacttgaacaatataatggtctacacacatcagatcagtgttaacctggttaaggtcttatctttagtgtaacccctctccttctatcctttctaatctgcaacagatggtgaacactcacgctagtggaagtggaaacaataacaatgaagagaacccaacccttgctcaagtgctggctcaacagacccaattga

SEQ ID NO: 18962 - DNA, 746 bp, Oryza sativa
tccccaaccgggagtaaatatcttttcccgctatttcgaaattctttttaaacccggttagggttaagaaccgggactaaagattatagcactgcatataattttcgcttacatatgtgtttataaaatagaagttaatgcattaacattatttaaagtacaaagattaatgacaattacttcgaaaaattatttttgtctgtaataaattaagtggataaatcgtaataagcaaatatatgacttataattaataaaaattccaatatatatatatatatatacttagcatatatatgaatgatattattatattggtaaaaactctaattaaatatgtatgtacatactgcatgatttaaaattaataaaaattgtaatcatcatatatacttagcgtaggaattatattaaattaaatgctaaaaactctaattaacatatgtaaatgccacatgcatgatttaaaccttttaaaaattcgaatagtcatatataagtagcatatgaaagatagtaaattaaattgtgaaaaactctaatatatgaatgatagttttaaaaatatattaaatttaatacttttaaaaattctccagtcaattataattagcatatgaatgatagtaaattaaatgttaaaaactctaattaacatatgaaattgccacttgcgtgatttaaaacttttaaaaatcctctagtcaattataattagcatatgaatgctagtaaattaaatgtta

SEQ ID NO: 18963 - DNA, 776 bp, Oryza sativa
ttcgctcatagtccgatagcttgatggcctccttgacaagtgcagacatacccctgaagaagttcatgacactggggtctataggaatcttcttttctggacttcgaggcttgaattgtctcttgacttctgacgcaacgtaagcgtcaagctcctcttgcgtgcaatcgtaccccgggtccttgttcttggcggcgtcaacttttgccttcttcgttgcccttgtgtgggcaggcggtggagctgggggggcctttgactttgaaggtgccggaagaggagcttgcggaggagtaggtgtaggagcacgaggaggagtcggtgcaggatcctgaggaggagtcgatgctggagcctgaggtggagacggtgctggcggagcatgaggaggagacggtgcaggatcctgaggaggagatggcggagccggaggagatggtgcacgagacgccgcttgtcgcccagggaggatgatgtaccgcctgcgccatagaataatggcatggcttgtgtctcgtagatgcgtctcaccgtctcctccagggtaatccagctcgaggtcctcgtacgcgccttcgaccaactcaacttcgaccttcgagtatcctgctggaatcggcctgcagtggtaagtacctgaagggtccgttgggatggccatgcccgacgccaccttcatgttgtgagagattatttattagtaatcaacatatataagcagcaactagcggaatggctaaatcttacctttattgataagttcttgaaaggaatat

SEQ ID NO: 18964 - DNA, 1483 bp, Oryza sativa
aattacacatcaacttctacgtagctcaaattatagtccttttaggtatgacgagtaaataatttccaataggtttttatcaagctttcctagaaaacaaatacttctaaattctccactgtaacgcacggcccattcactaataactaaatattctctaaattatctttactaactgtagagcgaagatcgaaaaacatattttggtagttgtatcgtgcacatacacagatttgagattattacagtggtttgtttctgtcctaaagggcacaatcaattactttcatggtatatatttacttattatatatataaatatcaaataaatactctttttttagataaaggaaatgaataaacctggtatctacatccacaagacatgtacaaagacaaagcaaagaaagactcttactgagaaaaagctttgagctccttcaagtggacatgctgcagaaggttaaattccagctttgcaagatctaaaagaacaacaatacactcttcctcctgtccgtactccagcatgtaatgcaacatttcaactctcttgtaggttctcggtaatggtaagtgtagggcaccgttgatttgattatctagaggggccttgagcctacttccatccctcattgattcgaggtggtgccttgcaaaagacatagcttcttcaagttctggctcatcatggacaaggaggtgagctgcattgtacaaacttaataatgcccttggttcatcagctattgtattgatgaacctcccatcctctcctttgaatttttcgaatacatctgcaaggcagctaaattaaatgtggatttttccttccaaaagatactagattcccttttcatacaattttttaatacatcggatattcttgactaatttttatgtatatatatactctaatttggatttatattgaaaaattgtttgacacaaaaaataattacgaaaatgaatgaatacctacaatacaatgacttaaaattttgtgatccaaagaaaaatacaaaaatttgtatatgcaagtcatcaccaatataagaaatactcgcactattgaaaattgggcctatctgtcatgcacacagtggataaattgttactccctccgtttcatattataagtcatttgacttttttcctagtcaaacttctttaagattgaccaaatttattgaaatgaagggtgtattttgtaataaacttgtttggcattattgtagtttgtaaaatacatagtaatggttgcagtgagatatttctgaccaagttgcaattttgtgaaaattactctgcaagttatctcctatagtatttattagtacctggagatacccaaatgccatgctccctaagtaagcgaaagtggagagcaacctcgtggaggctagagctagtgaattcactttctttgatgtcacttattacattgtttatctcatcttggaaaaggtgatctattccaaga

SEQ ID NO: 18965 - DNA, 1321 bp, Oryza sativa
caaggaactggagtcgcacaagcgccgcttggcgaatttccgcaatcaacagggtgctaaccaaagggtccgctacaccaatccctatcccgggggatcctcttcgcagcagcaacaacagcagcagcaaccccgctctgcgccccgacctcaattcgtggtgcgcgtcccacagccgcagcagcagcagaatcagcaagggactcgtgcgccccgtcctcctacgccaacggtgcagcctggtcaaggccgcagggacgctcaaggtcagcagcgtctgtgcttcaactgcttcgagcccgggcactttgtggataaatgcccgaagccaaggcgccagcaaggccaagcgcctccccgctccaacaacggtgggaaggatgtcattcggggtcgtgtgaatcacgtgacggccaaggacgtgctgacaactccagacgtcatcgttggtacgttcctcgttcattccatccctgctaccattttgttcgactctggagcttcccactcgtttatatctgtgccattcgtggggagaaatcagttgggggtagaaaggcttaggaaccctctgctcatcaccacccctggaggggttatgacagcaaagtattatagccctgccgtccctatagaaattcaggggattccttttccctcggatctgattctgctagacaccaagaatttggatgtgattcttgggatgaattggttggctcaattccaaggagtagtggattgcgcgagacgcaccgtcactctgtaccgagggccggaacaaccggttgttttctttgcacccccaacctctgtcagtagttcagaactgcattagataggactgtcagaaatccccatcgtcagggagttcggagatgtgtttccggaagaactacccggtatgccgcccaagcgagagattgagttccggatagatcttgctccaggaaccactcctctgcacaagcgaccctaccgtatggcagcaaatgaactggccgaagtaaagaaacagttggaagagttgaaagaaaaggggtacatacgtccgagtacttccccctggggtgctcctgtgatttttgtggagaagaaagcaagacgaagaggatgtgcgttgactacagagctctcaatgaagtcaccatcaaaaacaagtaccctcttccccggatcgatgatctgttcgatcagcttaaaggtgccactgtattctccaagattgatcttcgttccggatatcaccaattacgtattcgcgaagaagatattccgaagaccgcattcaccacgcgatacgggctgtatgaattcacgg

SEQ ID NO: 18966 - DNA, 6382 bp, Oryza sativa
cattttaattggccaacaatttgaaacaagtaattgatagaaagaacaaaatttaatttgacgcaaggagataaaatgcatagatggacagtgaacgatcaaaagcaaaagtggtttattcggctagattgcaacatccaggacagaggaatataaaaagatcacacattggattgcttattggtctgttctagcctaataggctctgtcacctaggattgatcactgcatctgatccaaaacctgcatacagagaacatatatatcaaattagtaatgtagtatagtgctgaaatggaattaggcccgagtgtgatttggcaacacagctgagcagtgaaacgtgtaggaactaggaagggaggcggagatgcaggagcatggcggcagggccgtgggctgcgcgcgcggtgtagacgtaggcgctggggaggcaaaaccgcactagcggtgcagcgcacagccaccgggcatgaggcgtcgccgcgtggccctcagcggccgtgggggagctcgcctactcagggttgttggtcggcggggaggcgtaggtgcagaggatggcagccaacacagattgggagaggtgtggacacgcggagcggctggccagcaaatcaccatggtgccttaccttcagattggtgcctggcttaggcctgaggggaggagcagtgcagagagaagaagagaggggatagagtttcgttggagaagaaaacccacccacgagctctttgttggagaatggagagagaggagatagagtttttcacgggcagttagattttcttggagggataaaatggagggaataaatggcgcgacaacgaaagacgtgagaaaaaaaatattgagaccgaaaatactggagggagagcaaaataatttaagctcatttttttcgaaggaaagatttggaaaataacgtgagactgaaaaaaaaaaagagggaaagaacggagcgagagcaaacgttctgtcggagataaaaataatgttaaattctgactgagtagatttaagctcaatttttcggagggaatgatttggaataagactgaaaaaagagggaaagaatggagggagagcaaaataatttgcgcaaatacacaaaatgttaaattcacatcaagtaaatttaagctcgatttttttagggcagatttaacctccagttatctaatctagttcagctaatttatttttgtgcggatcaataagaactagttataaaacttcataaatgcactagtaaaaattattttctactaatacaaaccgcgtcgttgccgactcggtcctgagagaccggataaaatccaaaagtaacatattgttttcttaaaatagtagttagttaatttatcttagcacgaccgaaaaatcacgtgttttttcattgtagacccggtctagaaagactggatgaaatccagacgtaacatattgctgtcttaataaaaaagtagttagttaatttatcctagtacgaaaaaaaaccactttattttacattgttgactcggcccagaacatatttttgtcttaaaatagtagttattcaatttatcttagcacgaccgaaaaaacgtttttttttgtcaatctggtccggacagaccggatgaaatcaagacgtaacaattttttgtcctaaaataatcattatttaatttatcttagcacgaccgaaaaagcatgcgttttttcgtcatcgacctggtccggacatacctcatgaaaaacagacgtaatatacttttggtcttaaaaatatagttatttaaattatgttagcacgaccaaacaatcacctattttttcattgtcgacccggtccggacagaccggataaattccggatgtaacataattttttgtcttaaaattatagttatttaaattatgttagcactaccaaacaatcacctgttttttcattgtcaatccggtccggacattccgaataaattccggacgtaatatatttttttgtcttaaaattatagttatttaaattatgttagcgctaccgaaaaaacacttgtggtccagacaccgcggattaaatctagacgtaacatattttttgtcttaaaataatagttatttaaattatgttagcaccacaaaaaagccacgtgttatttcgttgtcgacccgattaggatagaccgcgtgaaatttggacgtaacatattttttttcttaatagttatttaaattatgttaggacgagcgaaaaaccacatattctaaaaatatatttttgaatggtttattttaaaatttagaaataaaaaagttcaagaaatttaaaaaaatctgagcagacagaatttaaaaagttttaggaatcgccactagagaagaaatgaaaaaaaatatgcatttgctagtatttgaactggagtcctcaattcagtagaaacagccaagtaccactaggctatgtccacttcacattggagaagtctgttttatttatttattcacgttaggtgccattgacaatgtaaatagttttctcgaggaatttgtataagatggaaatagaataacacaacacagatagatgcaaaaaatatagtcggccattccattttctcatcatataaacaatatgatatcttatatattgaaaaataagatctaaccaccaattctgtatataactaatgtacaacattattacacaaagcatatatgcaaataaaaaaaatgcatccatctggctcaatcacttggacaatccaatgaaatctacgaacgacacagtaaagctattgtggtgaagaagcctcgatcccagtaaatctccatccaaaattactgccataaaaataaagagctcgccaagtgaggatatcaacgatataaggaaatcagtgataatggacagatagacagagaacaaccttcataacctcacctttaattagttaccatgttatcgacagttgttccttctatatctcttcggacccatgtctgaccatcatgtgcattgtcaaatagctccccaagattattgacatgatatggttcacattccacatcattccattcttcgcccagttcaaatacatctctgggtttcatcttccttacaatagaccaccctggatttaaatggtcttcaatgtaaaacacttggtcgacttgatttgcaaatacaaagggctcatgctcaatcttttcaccggtatgaattttatttgagaaattcacaagtatgcagccaaacttatctgttttcactctttttcctttagttacatcgacccattcacatttaaacaacacaactgagaaatttccatagtagtctaactcaattatatcaagtatctttccgtaatacatgatatcaccaaggacagggttggtatcactcgcagacgtgtagctcgatgtttttgcagtcacaacaactccactattttgagtcaccctgtcataacgctttgatctgaacctgtacccacgggtattgaatgctctatgtcgttttgctacctcaattggtccacgtgccaaccatctaatatcctcatcaatgctatcaatacctctttgattctccaactgcaaagatctacaccacaccaaaagatacattagttttactcatatttgaaaagaaaaatctaaattttgatacttacatgatctctgaaccaattaggaaattgttcattttgcatgttgtcggtgatatgggaccgggagtatcatgaccagaggcttgaggcagacgcaatcgcccacgtggcctggcaccttcggggacgtcgggcccgagggtgaggtgtccgccctcctcctgatttcccccgagggggggtcgggttgcgcttgccccggccccgagggccgaggcaccccgaccccttaaggaagtctgcgccacatatatgggataagtgagcacagctgtgctcacctaacagcatttattgcagtctggtcaaagcgtgtcacgctgcatgcaacgcagtacagcgcgttcctttatccggtctgtgaccagtcacagaccggtcagatcacgggttaggtggcgactggcggtctgacgcacgccttgccccatcccgtcaagacgaaagcctctaggcactcgtctcaagccggagctagcgtgttatctcttagagatggcacgttagccctggtcagatttataccaggcttcatcctaaccattacaggcaaggtgttacacgaagaagggcaaacatgcacgttgttaagctgacgcgtggtggacaagaatgaccggtctggcactggtcgcgtcatcgacagacagccacggtcccgcgtcatctctgtcttcgggggaggtgggggtaggtgtgggctgtcccatcagaagggctcccggatggaaaccgtaccgatctccgcccattaaagagaaaaagaacagtccagtttggaaagagaaaggtgcatgtggtatccccttgagatataaaaggaggaccttgcccatttagagaggggacttttcccttttggaaggctgaggggaaaggaagttaatcctttgtaactggtccatacacaaatccacaaaaacacaggagtagggtattacgcttcgcagcggcccgaacctgtatacatcgccgtgtctcgtgtgtcttgcgggcgggtgatctttccacatacagagagagagagagagcttgggattgcaccctaagcccctggtcgaaccggcaaaggggggcttgcgcagtctcccggtgaggggcaacgagctccgtcatctggcgcgccaggtaaggggctcagcgtgtgttttctgagctctcatactcttccgtgtgcaccaagtttcccttgttcagcctaatggccgagcaagcaaaggcgcacgacctctctccgagtgtgagcggcgacgacggggagccaaacccgcgccgtcgagctcgtactcccccacctcctccacgccaaagtcccaagcggggggaggcgctcgagagagtcgaaaaatccgcagcatcgccagtcgcgggtggtgcaggagaacggcgagatggggagcgtcgcctcctcgtctacggcgacggcagcacgcctcaaggcgcgcttcaggctgttggcgcgctcctacgtcacccgcctgtcgtccctgacccggagtctccagcccagcgatggctggacgacgtggccaacttggtcatgacggcacagcaacgcctgggtgctggcggacggtccgccaccaccaagacctccggcgccgccactaccggttccgcgtcgtcaagacggagagcgcggcgagcggcggccgctgcacgccattcggctaccactccctcgtcggcgcctccgactcgggaggatcagcatgaagagccggatgcccgcctcgacattgagcgccgacgtagtgatcggcgtactccccgcgcaacggagggtgcctcttcgtccagggtgtcacctcgacatggacgtgaggatcagccctccgtgcccccggttggtggtgttggctgtagagcctttgtggcgagtcttcggaatgtccgttggcccccaaggttccggcccaccatcaccgagaagtatgatgggagcgtcaaccccaccgagtttctccaggtctatacgaccgggatcgaggccgctgggggagacgacagggtcaaggcgaatttctttcccatggccctgaagggacaggcgcggggttggctaatgaacctgccacccgcgtcggtccactcctgggaggatctgtgccagcagttcaccatgaactttcaaggcacctatccacgcccaggtgaagaagcggacttgcacgcagtacagcgaggggatgatgaatcccttcgctcgtacattcagcgtttctgccaagtccgcaatactataccttgcatccctgcacacgcggtgatctacgcgttcagggggggtgtgcggcacaaccgcatgctcgaaaagattccctccaaagagccccagactaccgcagagctttttcagctcgcggaccgagtggctcgtaaggaggaggcctggacctggaaccccttcagttccggtgtggcagcttcggccgcccccggatccgccgctcagacagggcggcgtgacaggaggaggaagaaaaggtcggtccattccggcgacgagggtcacgtcctcgccgtcgagggcgctccgcgggccacccgaaaggggaggcctgcgagcgacaaaaagaaagaggctggtactcccagcagggagcgcccagccagcaagtggtgctccgtccacaacacctccctccacgatctcgcggactgtcgcgcagtcaaaaacttggctgagcgaacgaagaagtgggaggaggaca

SEQ ID NO: 18967 - DNA, 2185 bp, Oryza sativa
gccccgaggcagcggattgccacatgcgacgaggtcccggtcaaggaggttgccttgggcgacggcccatccaagaccacacggatcggtggtcttctggatggcaaataggaagacgcgctcgtctccttcctgcgggcaaacgctgacgtcttcgcatggagaccagcggacatgcccggggtccccagggaggtgattgagcaccgtctcgccgtgcggccgggcgcaaggccggtccggcagaaagtgcggcggcaggccccggaacgtcaagccttcatccgcgaggaggtggcgagacttctggaggccggattcatccgtgaagtcatccatccggagtggctggcgaacccggtggtcgttcccaaggcgaacggcaagcttcggatgtgcatcgactacaccgaccttaacaaggcatgtcctaaggatccttaccccctgcctcgcatagatcagatcgtggactccactgcggggtgcgaccttttgtgttttctagatgcatactctggttaccatcagattcgcatggctagggaggatgaggaaaaaactgcgttcattacccccgtaggaacctattgttatacatcaatgcccttcgggttaaagaatgcaggtcctacttttcaacgtactactcgaatttctttgggtagccaaataggacgtaatgttgaggcttatgtcgatgacttggttgtaaaaacgcgcaaccaagaaactttacttttagatctagcggaaacttttgagaacctccgctccgcccgcataaagctgaaccccgataagtgtgtgtttggtatacctgcgggcaagcttctcgggttcttggtctctgcccgaggcattgaggccaaccccgagaagattcgagctattgagcggatgcgcccccccagcaaacttagggatgtgcaatgcgtcaccggttgcatggccgccctaagtcgtttcatatcaaggctgggagagaaggcgctacccttgtttaagctcctcaagcgctcggggccgtttacttggacggaggaagctgaacatgccctcactcagttaaaggcatatctcagctctcccccggttctagtcgccccggagccaaatgagcccctgctactttacttagcggcgaccccccaagtagttagtgcagcattggttgtggagcgcgatgaagacaatcctcatttcgtgcacccccactctgtgctaacttggcccgggagcgagcggggaggagaggcccccgagtcggacggtggcctacggcccctgacgaccggagccggccctctgcccgcttgtcagacggtgctaggtgcccccgaccctcaggagggccccaaggccactgcgggaaggccacacttaacgccctttgaccccgaggctaaccctgtgctgactcgacccgggaaagagcagggagaagaggcccccgagccgaacggaggccagaggcccctgacgaccggagttggccctttgcccgattgtccgacgatgccaggagcccccgacccccaggacggccccgaggccactgagggaaggacgcccctttcatcatccgaccccgaggtcatcggcacagaaaacaagtgcgcccccaaaggccacttgaacgaagaaccccccgggggtacggcccctagcagagaggatcagccccaccgaagggtgcagcggcctgtctactttgttagtgaggccctccgggacgctaagacccgataccctcaggcccagaagatgctttacgctattctgatggcctcgaggaaactgcgccattattttcaggcacatagggtcactgtggttacgtcttaccccctcggtcaaatcttgcataatcgagagggtataggacgggtggtaaaatgggcaatcgagctttctgagttcgatctgcactttgaaccacgccacgctatcaagagccaggccctcgccgattttgtggcagagtggaccccggctccagagaccgtctcaatccccgaggccagcacgaacccctcgcagctgcctcacaccacccactgggtgatgcagttcgatggttctctgtccctccagggtgccggtgcgggggtcacgttgacctccccgaccggagacgtccttagatatctggtccgcctcgactttcgagcgaccaataata

SEQ ID NO: 18968 - DNA, 868 bp, Oryza sativa
atttttcttttgcctgggagaaccacttgacgcttaggctcatcaggccctctgcccttctttcctttgctagacatgtccttcacgaaaaagacttgcgttacatcattggcaaggacaaaaggttcgtccgagtatccaaccttgttaaggtcaacagttgtcatcccactgtcatcaatcattacgcctccaccagtcaacctaacccattggcaccggaacagaggaaccttgagaggaccatagtcaagttcccatatgtcctcgatggcaccgtaatacgtggcagttgttccatcgtgtcctatggcatcgacacgaacagcgctgttttggttcgtgctcttcatgtcttgggctctcgtgtagaatgtgtacccattgatctcatatctctggaatgtcgcgatcgacccagacggtccccttgccaggaaggcaagtagttggttgatcgactcgttacccatgagatgttgtcgtagccacgtggggaaagtatcaatgtgatgccgtgtaatccatgcatcggacttaccgatgttcctggcgcgaactagagccaagtgctcctcgatgtaaagagctaccaatgaagagtgttgcagaacagtgaaatgggctttacggaataaattgttgtctaccgtcattattgctttccttccgagagttccctttccccgtagtctcccttcatggcgtgattcaggtaccccgattgggcgaaggtcttcgataaattctatgcaaaattcgatgacctcctctgttccataacccttggcgatgcttgcctttggacgagcacggttacgaacatacttcttcagaatgcccatgtacctctcgaaaggaaacatgt

SEQ ID NO: 18969 - DNA, 1121 bp, Oryza sativa
ctcccactaatcttctggtatacacaaggctcttcttcatttttgacaaagcccaacaccttggctacttcattaaaacaaatattccaactccgagatgcttgcttcaacccataaatggatttctgcaacttgcatattttttagcttattgtggatcaacaaatcccttgggttgtgtcatgtacacatcctcatcaagatttccattaatgaaagttgttttgacatccatttgccatatcaaaaatcgaaataggcagcaatcgctaaaacaatccgaatagattttagcatggcgactggtgagaaggtttcatcataatcaacaccttaaatttgtctaaaacctttcgccactgtcacgcgcggaatttctatccaaaattccaaacgcttacatgtgtgtaaaccctcgtacaagaatcagccaaggcacacaataacaaattgataatagagtgcaatcattactctaattaataagcgaatataaagttattacagaggtagatagttcctctcaaacaataaaaatccatgcagcggaaaaataagatgaacggcgcagacgactccatcccacaagcagcttgaccagggctacacctaatcctccacaccttcagcatcactgtagaactcttcgtctgatgaatgattgcaaggtgagtatatgacatactcaacaagtcacgcagcaaatatgcaagtgcagggaataacaaagaatggcataatatagtctcatttgcataaatggcatttaataaatactccagaatttaataaaatagtaaagtatttaattaaacagtattaatccaacgctatacaacatacccgttgcataggcccaaccattctgaacaaccaatcccggctacacagttctacctccaaaccaggaatataccattccaaaccaggagctaaacaaattattatcatcatcatttaatatggtgagaggtatgaaactaaacattattagacccgcccataaccgcgggcacgactattcgaatagttttactctggccatgtcgcgcccggaaaaattaccttttcccaaacgctagtgtattaatccccgtcccaggaaaagccgaggtacacca

SEQ ID NO: 18970 - DNA, 1533 bp, Oryza sativa
aaaaccacctaatgttgcataattaatcagcgaagaatctacctaaattcatactagtggaaccatgaatagagtacccactagttggggttttgtttatcctagggtgaacaaggtaataataacaatagcaataataataaggtcataacaaaggtaaataggcatggctaaataatacagtgataacgcgggaattgaaataaagcgataatgcattaatttaaatcaaaataattttataaactaggattcaatatgctcaatgatgatgtgacttgccttgctcaaagagaacggccttccgaaccttcggcgacgatcgcaaaccacgcttcgggaacctccggaacgatagaagctacacgaagcacaaaagcaaagctacaaggctataaagaagcaataacaatacataaaaaggaagtacatggttctttaggttataacaaacattaggagacttgaacgggtcgattcagagttcgtatgaccaaggtatgatcattcgaagtttaatgctgttacatggagattgacggattattgtgattaggttttccaactataaaacatgtgtaagcgctagcctggaaaatacaggaaggctgcgctgttgacatgcagactccacatgtcaacctaaaggaccacagtagaccgagtacacagagacggtccacgggtcgacggaagcggatcccgtgtgtcaaccgaggcaagcggtcgacaaacggactccactagacaccacacgggctgcacacgtggaaaccacgcggctaccgagcgggcacactaacacggacactacacacacaagcgaatgactaccgacaccagtacacgggtaccggggtcgacaaccgcacaacgggcacgggcgacaccgaaaggattaggacggggcagcgagaggatggatccttaccaccacgcgacgaggcgtgggaacgacgacggagaacgggcgcggcggagacagacgggaacgacggagacgaatggcgaggggacgacttcggcagtgatccttggacgaaggcgagacgcggccggcatgaggcctgacgacgtggagccgaggacgaaaacgacgatggggctgcagcaaccttgacgaaacgcgggcgacgatcagcacggcttgacggagggacaaacgcaacgacgaccgagaacgacgggaggacgacgaccggaaccggcgaggaggcgacgagggcagccggcagcagctgcacggagacaaggacggcatggaacacgccgctgcgatgccgacgacggtggcggcgcagcgagacgatgagccggcgaggatgaacggtgaagacgacgacggacaccggcggtgttccgccgatggggaggcgaggccaggggcgaccttgccgctgcgacgctggaggaggagacggcgacgtcggccaatgcacgggcacggcgggaggggctgccggaggcgacgtcgacaatgaggaggatggataggccggcacgggtgacggcattctggtgaaacagaggagc

SEQ ID NO: 18971 - DNA, 3716 bp, Oryza sativa
caccggaattcgcaccccctcgcgctccggtgagttcaaccgctatcgccgccttcggccatgaatgccgggcgtcgtggttcatctccctctctctaatctctctctcttccttccttagggcaccccgaaacccgtccgccggttgccgtcgtcctcccgtggcttgcagccgccgttcgccgtcgtcttcctccgcgccggccaccctcggtgaggtttcctctcccatccattcccctccctctcttcctagccgccgcttagtgccgccgccttcgcgtcgcctttgcgccgtcgcctccgccgcctgatgccgtcgccggcaacgcgttcgcgcgcgcacgccgtcgccatcaccgcggccggtaggccggccttgagccaagccgagccgggtcgtcgccgcccgtccgatcgaccccgagggcgatctaggccgtttggactagagattggactagggattgcttagccatgcttagttcaactagtgcacaatggggagaatcctattaatgtttagactgttggttctaatggtattgttggattagtgccaccgctttggtgttggttaattaaaataaatcacatggtgggctgtgggtgcatggttttgctggtcgcacccatggcagttaaggacaggttcgtgggatgccctggaagaacttatcgtacttaccacaagccagcatgggcaacggctgggcttgtaacgtagctttcctctagccgacgcatccaggcaagggtgggcgtgatggagtttggatgggccctgcgacggcctatgcggcttccggattcacctaggcacgagaggggactgcccgctgccttgcgaggagtgggggtgaaacctgaggtgtggtgtgcttggttagagggggttatgcgaagggtcctgtcacggcctctttccggtatgtcgtggtggcatgtcggtgcacggaaacgtgtcgtggggctgtgtcttgtgggtacagttgtacacctctgatcagagtaaaactattcgaatagccgtgcccgcggttatgggcggtcaaccagattcaccgtgattagtctcaccctagtgtaatcttttgaatttggatagtttaggttgaggtttgggcctgttgcaatgtgggatagcgttggacagtggatagttaatattaattaattattacaactgtttaaatctttcaacttctgttttttttaatgctcgctttatgcaaacgaaccactttagctcttctttgataattccctgcatcatgcctctattccggtatgacttgctgagtacagtgggtagtactcagtcttgctctatttttcccaaccccagagtacgagtatgtgtcagatgcaggtttctctgaggagtaggcttcgtccgtgccgtcaaggatgcctgtggagtggtgttccccctgcagttctagtcaaggcttagctcctgttttctttctttctttccgctgcatctacgtgagactcttatcatgtttgtaagacgtggatctgaatgtccacattgtcgtttgtgtaccccggccggtcatggacggggattttaatgcacattctgcttggaattgtattcgggaatttctgggcgtgacatctatccgcctcaacagcaagtccaatttgtcttctattgccatggcaccctacttgatgagaactttctcaactagaccaagagctagatgggggaaaccaggctggctctgataccagattgttaggaacccactacttccaactcaacaacaagcatccaccatagaagcaacaactgctttggggacaagagaagaagaagctatggaatacaagtgctggaaacttctagaaccgaggggggggggggaaggctggagattggaggagaggtagagtagagagatcgacgagggtgcccaccgaccgcccaagtcgccgccgccgccaggagcttcagctccgccaagtccaaatgatctttcgatgccccctagtgttgccgatggtgccgcttatatgctgctcccttccgtttgcttgggcctcttggcgatgggctgaccagcccgtgtgcggcccacccgggatcctgacatacattcattgtggattaggtgcaagaagaggccgtaagtcaagcaattcgattaagatgggggaagtaggaagatacagtaaacccattcatcatgagcagagatgaccatttcatggttattgagatcgtagagagtaatcaaattagttcactcagatcaaacacaaagacaacaggccgtgtaggatatggaaaaatggtgtgcccattaatctaatcattttatcgaaaggagtaacgaattaatttatactgcgaaactgttgtttcagaacaggtccatatcctgtcgtgtggtaacacaactggatggaatcataagatgaaaaggagcagcaagaccgtcttgccggaaattttctggtaatttctgaacttatttgtgcataaaatcctcgtccaggaatcagctgaggtacataaactgacaatttaatataccaatccatcataataatatcgttacatacttacaaaagaaaagaaaagctgcggcggaattacggtctagcgaaggttcggctccactcccacaggcagctcaattggggtataagccaaacgttttctccctctggatcattttaatttcttcaactgaggttgattgattattgcaagatgagtacgtggaatactccacaagccacacagcaaatatgtgagtgcacaaggattccgaaggatggcataatataggctcatttgcaaaagtagcatttagcaaacatttaggagtagtaaaacaatagagtaattaatcatcaatattaatcaacactgaacagcacaaccatgctgcacaggcccaaccatcctaaacaaccatacccagctgtacagatctaattccaaactaggagctaagcaaattattacctgctatagcatcaataattattatgagaggtgtgagactaataacgaaaaacattgctcaacccgcccataaccgcgggcacggctattcgaatagttttactctggccagagatgtaccactgtacccacaagacacagccccacaacatgtcactatgtccctcagtaccaccacggtacctcggaaaggagctgtgacaatacccctcgcacaacacaatccaccacagggcacctttcctggatcataatcacccccttataaacaaggcatggactcccagcgacccccgtgggcttatctccgccacttctcagtctggtgctccgcaatgaaccatgctatacaaaaggtaaagccgttgcccacgctggcttgtggttggcacggttaatgtttcacaaccgaaactcgtgaaccggtccttaattgtcatgagcacgactctcaaaaccatgtgctcacaacccaccattatcaagttttagttggcaagtaattaattaaccaatcacgattgaccatcgtgagctatcattaagccatcattaaataatagtgaatcataagttatcccaatcgctgcactgcacggtgtctagctttttccccacggcatgcaaccaatccaacgcatccacggggttgttggagctagagaaggtaggtggacggatgcggaggaactcggcgagtttagagtgttgtgggggtggtggtgga

SEQ ID NO: 18972 - DNA, 3639 bp, Oryza sativa
ccagattgagagcccttgccaaggtgagtaaggataaggaacgggttgctcggcattataacaaaaaagtggtgcctaagtctttttctgaaggagagttagtttggaaattgattttgccggtaaggactcgagacaacaaattcggcaagtggtcacctaattgggaatgaccatttcaaatacataaggttgtgtccaagggagcttacatgttgcaaggacttgacggtgaggtttattgtcacgaccggaaataacccaacgggcgttcctgacgtgcgtgcattaatccttgtcccaggaggcaaggtacaccaaaagttgatacaattcagagtttaacaagcggaagcgtaaatagttaacttattacatgggcagcgaaggcccagcacacacagagacaaacgataaacagcggaagactagggcgacgaccacaggcgcttgacggcaggcacgagctagacaccaaagccttcatcttcaaggagctcctcttctgggcttgggaaaaattgagcaagactgagtacaaccaccgtactcaacaagacacacccacaaatgcagaataaatgcaagggagtacaagggaattataccataaagggttagggttgcagtaaacagcatttaaagacatttagttgctcaaagctattttgtaaacgcgatcctagaactatacaatattatttatcaaggccgtgaacccacacgaacctgccttaacccaaggcctatgatgattaagaccgaactggcaacccgaccctgggtcccagctcgtcccaagccaacccaggccaaccattccaccttttagttgttaagcaggttttaagaattgaaacactaacttgggtacattgctcggcttgcccataaccgagggcgcggctattcgaatagattatactctgatcagaggtgtacatctttacccacaagacacatcttcctcacgtgcaaccacgtgccacataccaccacggtatacagacggaagacgtgacatagtttccaacccatcctagccatagacaagagtaccgacccaatcccgcctacggccggaacccccgggacaggcaggcaggactgagcccctagcagcaggacaccggccctgtgccatgacatctcgactaccgggccgcagctcgtgtagccttcatttgccctggagaatgtccatcgacccccgacttcatccacctccatccgtgtacttttgtttataaccagactgagccacaaactaagccttacccactagacatgtggaagtacggtagtgctttgcaacagaggcccgaagaccggtccttatatggccgaggtgctactatcaaaaccatgcaccccgagcccagcctaaaaccattttggggattttgaatagagggggcggtgtgaatccaatttcacaataatccaacaattccaaagtgtccaggtgatatgaatatcccaaagtctagagttgtaaaaccacctaatgttaactaattaaatagcgaagcatctacctaaaatcatactagtggtaccatgagtagagtgtccactagtggggttttgtttattctagggtgaacaaggaaataataacaataacaataataaggtcataacaaaggtaaataggcatggctagataaaacagtgataacgcgggaatttaaataaagcgataatgcaataatttaaagcaacataattttataaactgggattcaatatgttcaaagatgatgtgacttgccttgctcgctttcccaaacatcggcttcaacctccacgaagagcagatcttccgaagctgcagcatctacacgaccaacggaaaagaaaaggcttttactctaataaactccatataacagaagaaacaaagcacaaaaatgggttcttgacttcttaaggaaaaattagagacttgaacggtccaattccgagttcaaatggccaagttatggccatttgaagtttatatgctctttaaatggatatttgcgaatttcttcatttaaattttaattaaaaatcggatttattgcgtcagccgagggagagggcacgcggaccgggtccacgggagtgggggccacgcgtcagcctcacggtacacggtggaccgggcgcacgcggctgacgccggccggcgccgtgggtcccacgcgtcagccgcacccgcgggcgcgggcggctgacggccgggccccacctggcaaccgcggggcgcgcccgaaggcggccttgccggcacggccgacgggaggcggcgcgcccgcgcccctatggtcgccggcggcggccataggcacggcggagcggcggccgagagaaaggagagaagagggaagcgaagcggcggtcctcggctcaccccgggtcgacggcgacgacgggaacggcgaccgaagcggagagaggcggcggcgcggctcgggtcgacgaggacggcgatgctccggcggtcggcgggcgaaacggaggagcggacgaggtcgacgagaacgcggcgaagccgaaggaggcgatgccgaagcgggaggaggtccggggcgacgacggcggcgaaccggagctcggcggcgacggcggagagggaggacaacggcgcgagctcgaatccgacggggagagagtgcggcgagtggcggaaacggaggagagaggcacggggagcgattatatagcgtcgggagggggagagagcggccggaggggaaggaatcggccgcggaaatctcggccgccattgatgcgccggcgaggattgcgggagcaaatccggacgaatccgaggtagagagagagggaaaagtgggggaaaagagggagggaatcacggggagtgatttccccctctttatggcgcgcggggacggcgggatgcggcggattcggcggtggcggcggcgctagggcacgggcgggcggcgggcgcggcgcgaggtaggggatgacaggtgggccccacccgtcagcgagggtggcgggcgggcccgcccatcagcggcgcgcgcgcgggggaaggccgatgggccgcgggggagaggagagggagggaggaagttgggccgagccggcccaagaagggaagggggggaaagaagacttcttttagggtttttctttttataaacctttttaactttgtttatttcttctcaattattatttgtgctctgaaaattccactaaaatttatttacgcattttaggcttttaggaaatatacaaaaatcctccaagccttatttgacttttatatttgcacattttaattgttggaggctttcacatgaattttaattattctttgcacaatttcgaggatgtattttagagtcgttttgggacgcgacatttatgaacgagcgcttaatggaaaatatctgaagaaatattacccaagtgtttgggtcaattcatgatcggctggatgctgccgatacatgttagctgatgtgttgacaccgcctagagatggccgatataagttatattgcccttagcagtttttattatcttaattggttgtgttttgccgatgtatgatggccgatgtcgcgtcccaaaacgaccctaaaatacatcctctaaattatgccgagaataatt

SEQ ID NO: 18973 - DNA, 2115 bp, Oryza sativa
aggggcttgagagttgatccacagacaagtgacatatcaatcaatattatagtaagtcgggcaactgagggtttttattgggaactaatgccagttcaaaactctcgagtgtggaaatggtatgtggaaaatgcattgcaacgcgggtggcctttagctatggttccgtttgttcacccgaaggatccaggtgtgcagatgaacatggatgatggcgagggaccaagtgctgaagtaaatgagacttctgtggaggaggtcaacgcacgagaggatgggggcgtagtagctccagtaggcattcaaccaggtggagtggccgacgagggggagactgtcggtgccattgtggatgaaatagacagggaggattctgacaacgagcgtgtagagaaaggtgattcgtcagatgatgagacggatattaatccagcagaatgggctagtgaggatttttctgagatggtcgtctctgaagaggatagtgtgagatgggagtacaaagaaaatgaggttattcagggagcgatttatagtagagcagaagatatgaaggaggcggtaaaacattttgcagtgtcaattcatagagagttttgggttgccaagtccaaccggtcgcaatatgaagttcggtgtgttaaggaaaaagatggttgtccctggagagtgcacgcgtataaggggaaatggaaggattattggacagtgtcagtcgttaccaagcatacatgttttctacctggtgtttagaaataccacaggaacattacatgtgcatttgttgcaactgagatgtatgcgcatgtcatcgataatctcacatatgaaccaaggtcaataatccgacacatcgaagagacatacaagtatactattagctatgccaaggcctggagggccaaacagaaaataatagagatgagatttggaacttacgaagcctcgtatgacaatttgccacgcctgcttggtgttatcgaggaaagaaaccctgggagctcttacgaagtgaagaaattcccctcaattgaacatcctggcaagagtgtgctgcaaagggcgttcttagctctacatgcatgcaaggtggcattcatgaactgtcgtcctgttctctgcattgatgggacattcttgacaggaaagtattggggccagatactaacagcaataggggtagatgggaacaatcaggtattgcccttggcatttgcttttgttgagagtgagaataccgacagctggtactgattcctgaaattagttaaaacaaaagttgttggtatgaggccaaatgtgtgcctgatacatgataggcacgctagcattctacgagcgatagaagagttgcagtttgggagtatggaacgaggataccctggtgtttgggaagatgtacagagtaggtggtgcatgcgtcatatgggagctaatttgttcaagcaattcaagaacaaggagcccatgaacatgttcaagaggctatgcaatcagaaccaggagaaaaaattcaatgagctttggaagagattagatgagttgacagccaaatgtagtgatcagcgtgcaacggctccatcgaccgccgttgctgaccctcctgaagctcttggacctctcccaatgaatagtccaacattggttagaagaactggattggagattcggaaattttctcagtggattcttgtaacgccccgattttcgttcgggattaaaaatcatttaatgatgcatttcctagaaattgaataaaaagttaagcaatttaatcaagtgaaataatgggagaattaaaattttcccttaaaaatcattggccgggaatattttgtaatattctttgtgccctaatgtactctccggaattttccgtgaattttcggagctcgagaaatagttttaaagtcacgaagatcatttaaccaattaaaataaaaagaaaacaaataaaaacctccctcctctctttgggcccctttcggcccaattcccccccccctctctccctctcgggccggccttctccctcagcccgctcggctctctctctccctcaagtctgctttgcctccccgtcaacccgaggccccacctgtcatcttctccccc

SEQ ID NO: 18974 - DNA, 5919 bp, Oryza sativa
cccatcgcgaggccgagccactaccgccacacaccgccttcagccggccgttgccgccgcgttagtcgtcgctgcacctcgccgcttgcgccgtcggcaacgccgtgccaagctctaccccggcctccgctccgttttcccaaatcgccaccgtaaccacccctcccccgtcaacccgagccaccaccaccactggccgactccagccgcgtcgcaccgctgctacagtcattgcagacccacgccgttgcctccctcggctccacaaggacgaggagaacctcggccatctcttcccatcgccggaaactcactggacgtccagattcccgtgcgccggtgagcccttcctcccttcccttcctctccagccggccatgtcgccgctccgtcctccctaacacctcccctcccatcctagggtgcagctgccgctcatccgcctcttcccgagcgccgcccgtcgtcggagcgtcgttgtttccgtccgtcccgagctctgccgtcaccgcctcgcgttgccatctcgccgccggccacctccttccgtcgtatgctactcggtgagctccccctcccttttcccgccgcactccgccgctccccggtcggccggtcggcgagccggctcgcgcccgcctgaggccgcccgatgcacctcgagtgaatctgggccgtccacgtggccgttcggcgccgcccgcgtcggtgccctcgtggcgccacgtcggcgccacctctgccgcatgtccgccgtggccgccacgtggccgtccacgtggtgcgcccgcgcctgtgccgcggtggaccgagtccaccgtgggccgcccccttggctcgctgacgtgtggggcccgcctgtcggcgccggccctttgctgacgtcagcacttgtcatttcctttgagaaattaattattaattgcgcaataattcggtttaattctagaaattcatttaaatggctcaaaatttctaaaatccatatctaattcattcgaactccgaattgagccattcaacttgcaaaattcatctaaaattgagctctacatgtttgtttagtttttatgtcctgtttccttggtttttattagagttttttctcgttttgcgtgccagcgtgtagtttccgtcgtttcggaagtccgcggtcgcgaggaaaagagttcggaagatcaaagtgaagaaggcaagtcacacattccccttgagcatgttgatcccaatttacaaatgttttactgtttgcaaacaaatatgcatgttttgctaattacatggggtcagggttttacctatctgctcgcttgtgccatgtttacttgatatctgttctttgtcaaccttgggtaatgaatcgactagctcatgttacttatgtgacctagctagaactatatgcttagccatgcttaattaccactagctcagttgatgggataactgcagtattagacctttttagtatcagagtgagctgcgtgctcgagacacctggccatgcttcatggtcgtaattatccaactaaaatgcgactgaatggtgggctgtgggtgcatggttttgctggtcgcacccatggcagttaaggaccggttcgcgggatgccctggaagaatttatcgtacttaccacaagccagcgtgggcaacggctgggcttgtagtgtagcttttctctagccgacgtacccaggcgagggtgggcgtgatggagttgggtcggccggggtgtccggttgatcggcttccggattcaccgcggcacgaaaggggggctgcccgttgtctgctggggacgggggcgaaccctaaggtgtggtgcgatcggttagagggggttatgcgaagggtcctgtcacggcctctttccggtatgtcgtggtggcatgtcggcgcacgggaacgtgtcgtggggctgtgtcttgtgggtacagttgtacacctctgatcagagtaaaactattcgaatagccgtgcccacggttatgggcggtcgaccagattcaccgtgattagtctcacacttaataaatcgacctaatacactgtagtttaggtgggttggttgggcctgttcaacgtggtgtagcgttgatcagtggagatttaatgttactttaattactcaacagttttactgttttgctcaataaaatgttttacaaccgcctttatgcaaatagccacaaaccgtccttgtgttccccttgcacgtctgcatcgttggtgtggcttgctgagtacggtggttgtactcagtcttgctattattcccccttttcagaagtgtagtgcttctgagctgaagacgaagttagaggaccaaggctcagaccccagttgagttttgcctgtggagtggagctgaagccccgctaggatcgcctttttccgctgctgctgttttcgtttcggtgcgaggactaagtgcctcttttgtaagtattttacgctttatttacgtttggaactgtatattacttgtcgttttgtgtaccctggctggtcctggacagggatttaatacacaaaatagtctggaaatttgggctaaatttctgggcgtgacaattctgcatgaaccaaaagagaaatgggccaaggcgtatgacacaggtggtgcatcatatggaataatgacaacaaatttggcagaagtttacaactgggtgatgcacggtgttcgtggactgccactagttggcatagtggagttcattttacatgggacatgcagatattttagggatcggttccaggcaattcttccctctatgccgaacaacagcattttgtttggaactttcatgcagaaaaagctagaggagttgcgtaaaaaggccatgaaacatcgagctctagtgcaaggtactcaacaacaaaggtttgagatactttgtcaagataaggcaggcaggggtatctaccgcaagagagtgaagcaggagtgtgttctcaaagccaacggcacatgtcattgctcttgtgcaaagccgaagctgctccacaggccatgcacccatgtcattgctgccgcagcggagtgtggcataccagatgcagtatatgtgtcacagtacttcagtaagcaagcaatatatcatacatggagcagcgagatttatgggttcggcatagctggggagttcacagagactaacgatgaagtactcaatattcctgacccatcgaagctccgaggcaaggctagaaggaggaggactcgtcgcatccgcaacgatatggatgagtcggatgctggtagggtgaagcattgcagcaaatgcgatgaacgtgggcacacctacaagcattgtcctaaagacaaggagaaaccaaatgcggcggaggcaggactatcaggatcagcagtagatggagctcgccctacgggtgaagacactacctacactcgaccacgtcctaggcgtcgtcgtgccacatctggctacgtggtgtagttcttatgttctatgttggcatgtggctttgcttgtaatttgtttcgaacttattgatgtgtttatgtttcgtcatgtaatgtcagacttcggcatgtcatgtctttaggtctcgtgatgtaacgtcagactaaggcacctagtgtgtttaggtatgctgatgtaatgtcggacttcgatacgtaatgctatgttatgttatgttatattatcgaactctacatatatgttaaattgcacgtcatcgttatgtacccttagtaacgtttgctatatttaaatagcctgtactcttgttgtacataattattctcatgattttattactatttcataattttacaacttatcttttgttttacattactactttttgaattgttctaacacgaaacactatatttttcagagatggcacgtcaggatacacctcagttgttggacccggcgatagatcaccgacaccggtctcaccttactgcggtacagggggctcagattgggacgttccgggcacggacgtgcggtgagctacttacggttcacgactcctttgtcgagaggtacaaacagtgtattactataaattagttgcgctgtaataattattataatgacatgttaatttgttattgcaggttgcgtgaggccggcctcctaccgatgtgtcggctggtggaggctgccgccggcgacgtggacccggccagacgatggactgtggaccggtccctcctagcagctttggtcgaccgatggaggccagagacgcacacttttcacttgccgtgcggtgaggtagcccctaccctacaggacatatcgtacttgttggggctaccgctcgcgggagacgctgttaggccagtgaccacgggtgtggactggcaggacgatcttacggcacgtttcgcactagtacagcgcgcaccgcatctcccgctcgagccgttggcacaccaccgcaacaccggacctacgaagaggtggctgcttcagttcaccgtgagtgtttttgtaccgaaatgacaaccgtactacatatttagtccacagttaaggtgcctaacattttatcgaacgcttgcaggtcgagcagctacaggcggaggctgacgagtactcctacagccgctgtttggaggcgtacttgctctggctttttggctgggtgatgttctgtggcggtcacgggcacgggtacaaatcctaccggctttcgtcaatggctagacgccggggtgttgaggatccgaactggcgtagcgatccttgtgtatacctactaccaccttggtgccagcgtcctctttgcctatgcggtgatcgatgccaactaatggcttcgaggaatcctgatattcgaggaaggcacttttttaggtgccctaactatgaccgtgaggtattttattatctgcatatgcttattcattccgtatgggcaatcgctttattcttcgtaacactactctattcgacagacccgcactacggcttgcgcatacatcgagtgggtcgatacagaaaatcccgttctcgacctaaccacttgtttacaagaaggtcgctggtatttcgcatccgaaagtactgagcaatacttacagagaaaagcggcttatgaacgacaatgtcgtgaacaacagagcgactggcgggtgctaactacagcactccctccatgggaagcccgtccagatgcaggtgtggtgatcgttgtcaggttcttcgttctataaagcctacaacattgggtcgaaggttctttgtttgtctaaatattcttgacgatgatttcatggtaagaatattttgattacatgaatctttattttctcacaacatttactaactttgctcgcttgacatctattctttcctctcaggaaccaccaaggagatgtcaatatagagaatggatagacactagaagggttctaactccacctagccatgttgtgcagcttgaactaccagagcaatacagggttactaaagcgcggtttgagagaggagagggatcctcacgtaggggttagctattatcggacaacttggcatattgaaatttctactgtcatgcttccttgtcccattactgcatcgtcgttgtgttcaactattgcactacctccctcctagttcgaatctaatatcatctatgtaaccgcaatggaaatagttgtatcatgttcaaattgtactactatttcttcatgttacataattctccttgtttaagtccatataatgtttctacgaccgagactgcgataggcctatattaattatccgagtactgatacgtcgaataaggtacaaaataatacctcacttaacatatgaaattgcgaaacaaccaacttcaatacatttttataacaatattaacaagttttaccaataaatacttctttatttattattaacataacatagaaaaatcttt

SEQ ID NO: 18975 - DNA, 1491 bp, Oryza sativa
atcaactatctgaaggcccaatcaagtctaacattgattggcttgaggctcgcaagattgaccttttagcacaacttgaagaatgtaacgctgagctggatatggaacacaagaaactagccgatctccccaagtctattgaagaacagaaagcgagactcaaatcggctattaaacatgttgctgaactgaccaagtccctgaaagttatcccaggaaccgatgctcaagatgcccaagccaaagaggaagtagagcagattaggtagaaggctatatcggctatccagcgatacttatcgcggtaatctttgctaaaacattctgttactgtactgttggaacgatcctttgcgccgattaatacgactttgaaatttgcgcaaacaaaatttaaaattttatactgcatgctgatatatatatatatatatatatatatatatatatatatatatatatatatatatatatatatatatatatatgcccccctagttatacaatgtcgagagcattgataaaattatgaaacaactaagggcgataataatatcggccattgtacattggcaaaacacaaccgatcacattataaaaacaactaagggcgatataacaatatcggccatctcaaggcgatgtaaactcatcggctgtcatgtatcggcaatagtagccaatcatgcgttaacccaaacactgtggtaatatttcttcaaatatttgccattgagcgctcgcacataaacttaaccgtcgagcccttgcaacatatatgctcccttagacacaaccttatgaatttggaacggtccctcccaattcggcgaccacttgccgaatttactatcacgagtaccaatcggcaaaatcagcttccatacaagttctccttccaaaaaatctttagatataactttcttattataatgccgagcaacacgttccttatccttagtaaccttcgcaagggctcgcaatcgtgactgaaccaaatcctccctctcattagccataagattgtaatactcatcggctgttaaatcgttttgcagctccgttcgtcgagagccgattctaacttcccatggcaaaacagcctcgattatatggaacttgaatcgatccatgacaggccatcctataagaccacaatgcttcggccaaccgagtatgccattgccgaggataatcagaaattttttgcttaaccaatttgatcaaacttttattagatgcctcggcttgcccattagcttgtgcataataaggtgaagaattcaacaacttgatacccacgctatcggcaaactgaacaaactcgtcggacacgaagattgaaccttgatccgtagtaatagtctgaggaagaccaaatcgatagattatgtgttcctgaacaaattgaatagcatccccagaatcaaccttcttcaaaggaatcgcctctacccacttggtgaaataatcagttgccaccaatataaa

SEQ ID NO: 18976 - DNA, 706 bp, Oryza sativa
tgatcggcttttaatctcaataagggtgtaaaaggttccaatcttccagacagattagaaataaatcttcttacaaaatttatctggccgatcatctcttgtagctctgtcttattttctggcggctgaatcttcttgatcgcattaacgctccttcgagtcacttcaatccccctctcatgaacaagaaatcccaaaaattggccagccgacacaccaaaagcacattttgtcggattcatcttcaagccatactttctggttctctcaaaaactttccttaaatcggctatgtggtcctccacctctttagatttaacaaccacatcgtcaatatagacttcaaccaaccagccgattaaatcatgatatatataattcatggccctttgatatgttgctccagcactcttcaagccaaaagtcatgacgacccactcaaataagccaattgcaccagggcatctaaaagctgtcttatggatatcctcttcagccataaagatctgattatatcctacattcctatccataaaacgcaaaattttgttccctgatgcagcatcgactaattgatcggccactggcattggatattcgtcctttggtgtagctttattcaagtctcgaaaatcaatgcacaccctgaccttgccattctttttaataactggaactatgctagaaacccattcggcatatcgac

SEQ ID NO: 18977 - DNA, 2014 bp, Oryza sativa
ctttcgccactgtcacgcgcggaatttctatccaaaattccaaacgcttacatgtgtgtaaaccctcgtacaagaatcagccaaggcacacaataacaaattgataatagagtgcaatcattactctaattaataagcgaatataaagttattacagaggtagatagttcctctcaaacaataaaaatccatgcagcggaaaaataagatgaacggcgcagacgactccatcccacaagcagcttgaccagggctacacctaatcctccacaccttcagcatcactgtagaactcttcgtctgatgaatgattgcaaggtgagtatatgacatactcaacaagtcacgcagcaaatatgcaagtgcagggaataacaaagaatggcataatatagtctcatttgcataaatggcatttaataaatactccagaatttataaaatagtaaagtatttaattaaacagtattaatccaacgctatacaacatacccgttgcataggcccaaccattctgaacaaccaatcccggctacacagttctacctccaaaccaggaatataccattccaaaccaggagctaaacaaattattatcatcatcatttaatatggtgagaggtatgaaactaaacattattagacccgcccataaccgcgggcacgactattcgaatagttttactctggccatgtcgcgcccggaaaaattaccttttcccaaacgctagtgtattaatccccgtcccaggaaaagccgaggtacaccactcaaacatgatacaaaaggcacatctttattatatcgataatatttacattattacaaagacacttaaggcctgacaatcaaaaataaacagcagcggactagcgggcctacggctccatcttcacaggcgctcaactggggtataagctaggagtccacttaggacttcttctccaaagcttctcgtactgaaggggagggaagatagagcaagaatgagtacaaccacagtactcagcaagccacaccgggagatgcatgattaatgcaagggggtacaaggggtaataatataggggttaagttttgcagtaaacagcatttaaaagtcacttagttgcccaaagccattttataaagacgatcctagagctacactgttattaatcaaggccgtgaaccctcacgaacctgccttaacccaaggcctacgatgattcagaccgaactgacaacccgacctaggtcccagcttgtcccaagccaacccaggccaaccattccacattatagttgttaagcaaattttaagaagtaaaccactaacttgggtacattgctaggcttgcccataaccgagggcgcggctattcgaatagattatactctgatcagaggtgtaaatctttatccacaagacacgtcttcctcacgtctaacaacgcgccacataccaccacggcatacggacgaaagacgtgacatagttcccaacccatcctagccataaacaagagtaccgacctaaccctggctacggccgggattcccgagacgggcaaccaaggttgagcccctagcagcaggacaccggccctgtgccatgacatctcgactaccgggccgcagctcatgtagccttcatttgtcctagagatgtccatcgggccccgacttcgtccatctccatccgtgtacctttgtttataaccagactgagccacaaactaagccttacccactagacatgtggaagtacggtagtgctttgcaatagaggcctgagcttaatccttatattggccgggtgctacttcccacaactggcatgcacccaaaccccaccggaaaataggttttaggggttttgaaagagaaagagaggtgtatgtccaattccatcataatccaaccattccatagtgtccaaatgatatgagaattcccaaagtctaagttataaaaccacctaatgttgcataattaatcagcgaagaatctacctaaattcatactagtgga

SEQ ID NO: 18978 - DNA, 1164 bp, Oryza sativa
tgcattaatttaaatcaaaataattttataactaggattcaatatgctcaatgatgatgtgacttgccttgctcaaagagaacggccttccgaaccttcggcgacgatcgcaaaccacgcttcgggaacctccggaacgatagaagctacacgaagcacaaaagcaaagctacaaggctataaagaagcaataacaatacataaaaaggaagtacatggttctttaggttataacaaacattaggagacttgaacgggtcgattcagagttcgtatgaccaaggcatggtcattcgaagtttaatgctgttatatggagatttgtggattattataattaggttttacaactataaaacatgtgtaagcgctagcctggaaaagacaggaaagctgcgccgttgacatgcggaccacctaagggaccacggtggaccgggtacacagagacggtccacgggtcgatagaagcagatcccgtgtgtcaaccgaggcgagtggccgacaaacggactccactagataccagacgggctgcacacgtggaaaccacgcggctaccaagcgggcacactaacacggtcaccacacgcacaagcgaacgactaccgacaccggtacacgggtaccggggtcgacaaccgcacaacgggcacgggcgacaccgataggatgagaacgagggcagcgagaggagagatccttactaccacgcaacaaggcatgggaacgacgacgaagaacgggcgcggcggagacagacgggaacgacggagacgaatggcgaggggacgacttcggcagtgatccttggacgaaggcgagacgcggccggcatgaggcctgacgacgtggagccgaggacgaaaacgacgatggggctgcagcaaccttgacgaaacgcgggcgacgatcagcacggcttgacggagggacaaacgcaacgacgaccgagaacgacgggaggacgacgaccggaaccggcgaggaggcgacgagggcagccggcagcagctgcacggagacaaggacggcatggaacacgccgctgcgatgccgacgacggtggcggcgcagcgagacgatgagccggcgaggatgaacggtgaagacgacgacggacaccggcggtgttccgccgatggggaggcgaggccaggggcg

SEQ ID NO: 18979 - DNA, 992 bp, Oryza sativa
agcataaaagagcaaaatcaccaaaacagcacataaacaatcatgaatagtacatttggatatttttaacatgtagatctcaattttagaaaaaattagagacttaaaccaactaaatccgagttaagatgaattagttatgaatttttaaagattaaatcggattaaatcatttatttagattttaattgaactatgacgcaataaagaattatttttgaaaaggaaaaaatgatttattgcgtcagcaggctcgggttaacggtggaccgggtgcacggggacggtgtacggaacgaacggccgagatctaatctagacaaaacgaacggccgagatcgatctaatccaccacgggtctacggatgacacggcgctgacgtcagcgatgacgtcatcaccggcggcggctcggcaactcacgctcgccggcgaacgatggcgcggcggcgcaaacggagggcacctacacgtagagggcgacgcggcgaactcactgagggcttggacgacggcggacggcaacggacagcgacggcgacgaggtcgaagctgcggaggcgttcgggtcgacgacgacggcggtgctccggcgatcctcggtggaaacggagggtaggacgaggacggcgacgacttggcgaacccaacagtggccttcccgagcgacgacgacgaccagagcggcggcggcgcacggctggactcgcggcggcgacagcggcgcacgggttgtcgtggaggcggcgctacaagcggcggcgagctgaggcgagggtggcgacgaaaagaggaggtcccgagtgtccttatataggggctaggagcggcgatgtaggcccacggcggccaacaacggcgatggaaggtctagggttaggaggaaaaaacgaatccgaatcgagctcgaatccaacgatttcaaacgaaattagccgaagattccaaaagagaaaaggaagaggggatcccgaggatcatttcccctctat

SEQ ID NO: 18980 - DNA, 2922 bp, Oryza sativa
gaaagatacactggaagcacgtaatgatctgaagcatatggaacaatgcggcgaccttcacccggaaccaaaggagaaaggaagccattacttgagtccagccagctacactcttagcaaggcagataaggaaagtatgtttgaatgcttggagagcataaaggtaccgtctggatactccacaaatatcaagccaataataagcacgaaggagaagaagttcacaaacctaaagtctcatgactgtcacgtgttgatgacacaactgctaccagttgtaataaggggtatccttccagacaatgtccgggcaacaacaacaaagctatgtgcattcatgaacgcaatttcgtagaaggtcatcgatccggatagattagaagcccttcagaatgaagtggtgcaatgtctcgtcagttttgagttgatatttccaccttcatttttcaatataatgacgcatctgctttgtcaccttgtgaaagagatccgtattctcgggcctatgtacctacacaacatgtttcctttcgagaggtacatgggcattctgaagaagtatgttcgtaaccgtgctcgtccaaaggcaagcatcgccaagggttatggaacagaggaggtcatcgaattttgcatagaatttatcgaagaccttcgcccaatcggggtacctgaatcacgccatgaagggagactacggggaaagggaactctcggaaggaaagcaataatgacggtagacaacaatttattccgtaaagcccatttcactgttctgcaacactcttcattggtagctctttacatcgaggagcacttggctctagttcgcgccaggaacatcggtaagtccgatgcatggattacacggcatcacattgatactttccccacgtggctacgacaacatctcatgggtaacgagtcgatcaaccaactacttgccttcctggcaaggggaccgtctgggtcgatcgcgacattccagagatatgagatcaatgggtacacattctacacgagagcccaagacatgaagagcacgaaccaaaacagcgctgttcgtgtcgatgccataggacacgatggaacaactgccacgtattacggtgccatcgaggacatatgggaacttgactatggtcctctcaaggttcctctgttccggtgccaatgggttaggttgactggtggaggcgtaatgattgatgacagtgggatgacaactgttgaccttaacaaggttggatactcggacgaaccttttgtccttgccaatgatgtaacgcaagtctttttcgtgaaggacatgtctagcaaaggaaagaagggcagagggcctgatgagcctaagcgtcaagtggttctcccaggcaaaagaaaaatcgtcggagttgaggacaagactgacgaggattacgatcagttggatgggcaaccccctttcacggtgacgattgaccctagcatcctcctatcaaatgaagacaccccttactcacgcagcgatcacaaggagggaacaatagtgaggagaaagtacgtgcggtcaaccgtcaccgccgatgtaatgccgtaattattgtgtacacgatgtaaactattttggatgtattgattatccatataaatcaattgatgtatggcatatgttaattacgcacgattattagaggtttcaacaagtttaaatcatgtatatgctagttatatgtgatacttacaatttttaaaagttttaaatcacacaggtggcaatttcatatgtatgttaattagagtttttaacatttaatttactagcattcatatgctaattataattgactagaggatttttaaaagttttaaatcacgcaagtggcaatttcatatgttaattagagtttttaacatttaatttactatcattcatatgctaattataattgactggagaatttttaaaagtattaaatttaatatatttttaaaactatcattcatatattagagtttttcacaatttaatttactatctttcatatgctacttatatatgactattcgaatttttaaaaggtttaaatcatgcatgtggcatttacatatgttaattagagtttttagcatttaatttaatataattcctacgctaagtatatatgatgattacaatttttattaattttaaatcatgcagtatgtacatacatatttaattagagtttttaccaatataataatatcattcatatatatgctaagtatatatatatatatatattggaatttttattaattataagtcatatatttgcttattacgatttatccacttaatttattacagacaaaaataatttttcgaagtaattgtcattaatctttgtactttaaataatgttaatgcattaacttctattttataaacacatatgtaagcgaaaattatatgcagtgctataatctttagtcccggttcttaaccctaaccgggtttaaaaagaatttcgaaatagcgggaaaagatatttactcccggttggtgagaacaaccgggagtaaagatccgggggtatatatattcccggtgcgccctcgtcttcttcaccaacacttagacgttttcggccgatcgatctttctcggcctctctttcgccgccactgcctagggcaaatccccgcgccgacgccgccgtatctcgccgtcgtctcgagctcgtcgtcctcgccgccgcctccgctcctccgctgccgccgcatctctggggtgagagccgccgccgccagatctcccttcatctcgatctctccgatctcgatctctctccgtcgcgccgcccgccacgagacgccgtgccacgacgacgacgcgccacgcggacgccgcgccaagccgccgccggcacgccacgccgccgccttcgccggcgtgcgc

SEQ ID NO: 18981 - DNA, 4502 bp, Oryza sativa
agacggtgagacgcatctacgagacacaagccatgccattattctatggcgcaggcggtacatcatcctccctgggcgacaagcggcgtctcgtgcaccatctcctccggctccgccatctcctcctcaggatcctgcaccgtctcctcctcatgctccgccagcaccgtctccacctcaggctccagcatcgactcctcctcaggatcctgcaccgactcctcctcgtgctcctacacctactcctccgcaagctcctcttccggcaccttcaaagtcaaaggcccccccagctccaccgcctgcccacacaagggcaacgaagaaggcaaaagttgacgccgccaagaacaaggacccggggtacgattgcacgcaagaggagcttgacgcttacgttgcgtcagaagtcaagagacaattcaagcctcgaagtccagaaaagaagattcctatagaccccagtgtcatgaacttcttcaggggtatgtctgcacttgtcaaggaggccatcaagctatcggactatgagcgaacgctgaagaaagcatcttctggaaagtccaaaccagtccctcagcttggagagcaaccaaaccaggagatcgagccgttggtgaccgggaaagacatgacgatagaagaatttattattgacaccggtctaactacggatcaattgctaggagttgaaccaatagaaaaggcggaattgaaatacatgtacgaactcggtaaaccgcttgtcaagcctgagctggtgcagtccctacccacacaaatgtacaagttccatcagctgtacgtggagatgagcgccaccggtagagagatgatcggagcgaggatcagggacccggacttcttgcaaggagatgatattctctggatcaatttcaagggaatctacgaagtataccagctggacgccctcgatgtctctattatgagttgctggactttgtaagtatattgttcaattataattcttaattactatgtctcctttaattaattaggtccttgtatataagtagactatataaaataaaatactcccttttatcgttgtagaatggagattcaaagggcccgacggcggagggttttcgatactggattcatcgaccctcggagagtaaacgttggaatgctcgaccaatatccgcaggaaacagaggacaatctcgtccatctcctgaaggcgcagcattacaagacgttcatactgttaccgtacaacacagagttagtttaattttactgtcttcctacataccaaatttcattcccgtacgaacttgctaagtgtttcatatgtaatgcatcccacgcacattgcagattccactgggtgcttttactcttcgacctgtcggcctgcaccgtcaatgtatatgactcaatggataaaaaagagtctacgtttgacaaggttttcgaacttatagacaggtactggcataagtttctctgttaattaagaaattcttgttatgttaattatttctactacgaatcatatctttaaactccatgtagggcttggtatcggttccgtcatttggtccgcggcaactggagagaaagacttaggcggaggttcaaatttcctgtgagtacacatgctctacatttatatttctccgattcaaattaatacatacaactgtatattaattagatctcacgccgttaatttgtcatttatttgtaatgcgcaaagcaaaagcagggaactaacttgtgcggctactacgtgtgtgagtattgccactgccttgcagaccaaattatcaccacagagagctcgatgtacgtacaaataaattcaaaatttcattacgtaacgatttcttgtttaattactaatcaatttcatacattcatatagtttattcgcatgagggataacctgaccacacacaaggaatttatcgcagcggttcaataacaactcatgggattcatcaacgaagaaatccttgatcccaagggtgaattctactacgacggaaacacaattcaccggtccttagcttctgagctagcagcgactactactacgtcgaaatcgtagctagctaggacatataatggattgtaattaatacatgactacatatgtttctatatgcatgtgtacacattttctataatgtaaatatattttggtcatatatatatctatatacatatgcatttgcataacatatatatgtataaatacatatatattatgcatgtatatacatataatataatataatatatatatatacatatatatatatatgtatgcatatatatgtatatatatatatatatatatatatatatatatatatatatatatatatatatatatattacttcacatttatcctaatacatctttttgtatcttgcagaaaagacgtgttgtcggagtcgtccgtcaagcctgagtggaacagctagccctagaaggaattggagcaggcaagtgacgtaataatataaatgattgttatatttgtaatgcaattaattaagattattagacctgtaattagacttatcatataagattgcgtagtgttctaatattatttgagttttaatataagattattttattgcaaattagacttagtatgacattattgactacggaattggtgcgactcctagcaattgactattgtagtcttaattagacttagcatatacacacgaaacacttagcatacatgactattttagtcttagcatgcaatattatttgagttttaatataagattactttatttgtaattagacttagtatgtaattattgactacggaagtggtgcgacaagtagcaattgactattgtagtcttaattagacttagcatatacgcacgaaacacttagcatacatgactattttagtcttagcatgtaatattatttgagttttaatataagattactttatttataattagacttagtatgtaattattgactacggaattggtccgacaagtagcaattgactattgtagtcttaattagacttagcatatacgcacgaaacacttagcatatacatgactattttagtcttagcatgtaatattatttgagttttaatataagattattttatttgtaattagacttagtatataattatttactagctagggttgtataatatacgtcacctagacttagcttatatcacgatttgtaattggacttagcacgtaaggttgtgtagggttctaatgtacgacatttacattagcatacaagacttagattgttaaaacataaatgtctcgtgacttagcagatgtttcttgtatcaacagatggctgaccgcgatgaggaacagatattgtacgatacaatcgcggagggaagcagccagtactggaatgaagaagaggggaacgaggatccaaaccagtacttgaacgaggaagggaacgtggagagggatgcggaggggaaccagcaggggcacgtggaaagggatgtggaggggaaccaggaggaggaggctagtggtagtcaaccctccgttggacagaagagggcacgcgggcaacgaggtgcagcgaagaagcttgagggtcggcacatcataacggaagtggaagaagatggacgtcctagtgccccggccgaagccgccaagaactatgtacgtcacagcggttgggttgtgcgggataacgtgcctgtcagtacggtgtactggcgaagaacaagtgcacgcggagatcatgagagctttgtcccagattcggagaaagagatgctgtggaccagaatgctcgagacattcacccttcctgcgggtacagaggacaaagtgaaaaggtggactctgaagaaaatggcagaacagtttcagagcttcaagggagatctgtaccagaagtatatactgaaggggcagacaccgaacttcgacacattcccaaagctaagggatcactgggacgagttcgttgcatataagacaggtgaacaagggcaggcgatgatggaaagaaacaaagaaaatgccgccaagaagaagtaccatcaccacttggggtcaggaggctatagcgtcgcgatgccgaagtgggagaagatggaggctagcttgattgagaggggtatcgaaccggcaacagccaattggccggaacgatcgaagttctggtactatgctcacggtggaacgctcaacccagctgatggctcactggtcttcggcgatcagatacgagaggctgcgcgacgactaacagatgcagtggaagcctcctctcagggcacgttccgaccagacagagatagggacgagctgacactcgccctgcagactccagagcatccaggacgaacacgagggaaaggggtgattccttggaagattgatttcaaggaggacatccacacgtacaggagtcggatgaggagcaagagagataccgaggcgaagattgcagacccagagttccgggtatcgag

SEQ ID NO: 18982 - DNA, 11289 bp, Oryza sativa
ccaccagtgactactgatctagaaatagtggtatatactactgatccagaaaaaagtgaaatatagtaccgatatagaaaaaaaaagtatatactaccaatagccaatgtatggtggtacatagtatgatctagaaaaagctgtatgaagtgctatgcaaattttaaacgtgcccattcctcggcagtgtgcatgcatgcaaaaatttgaaaaaatagaacacctacggatggacatgaagaaatttgaaaaaataatattatttatttctttttaatctaactattcattatcaactaatggatatccaacaaggaagagggagtacatacacatacacctaggtatacagaagagtaaatgattccatacacctaggagtacgtactccactagtggagaaatcatctttgcccggtcgaacaaaaaccacaatagtctcggatgcagtaaaaaccaggactaaagatggtttttagtcccggtttataagtagaacgggactacgtgatctttagtcctggatggtgttaccaaccgatctttagtcccggttcacatgctatcaggtgttgtcaggcctaatcccggttcgtaacaccacccgggactaaagatcacgtgatctttagggccggttggtgttacgaaccgggattaaagatcaaacacactatataatccctattatttatcatcttttctcgtccactcttttctcatccacacccactcctctctccctccatctctaatcttatctcttcccttcctccttatctcttttccttcttatcccttcccaactccccttcccaactcgatccagtgtgcgcagcaggaggcggtgggcggcccggcgcggccgccgtcgtggaggggcggcgtggagggccgcgtggcggcggccggggaggaggggaggtagtagccggctcagccggccggcggctttgcttcgttttttttctttttttttcaaataatttgtgatccatgtgtagtttgagatgaagaatctgtggttcattgtatggattgagatgtatattttttttttgaatcttatggtatggatctgagatgtacatgatttgtgtatgatttatatatttgggatgtttctttgatttggggtttgacttgggttgtataatctgtagtgtatatgattgatttttgtacttgggatggtatgcatcccacctaatttgggagaaaataaattagagattaaatagtaagtaaatgaaaaaaaaaactattgcccactcccatctttagtccggttggtaaatcgatctttagtcccagatatttgaaccgggactaaagattagggatctttagccccgaattcgtagtcccggtttgaaaaccgggactatagggggttatgaaccgggactaaaaacgatttcttgactagtgctcccgctcccatctaccgtccatcatagccaccccgaagaagcccgttaccggattcacagaacggacccgttttcatttttaacaagaaaaaaaacataatcttaattaacccgcggtaatcggaaaaccggatagataaatcccttttcccagctcattagatcgataaatcagttatcagtggagacctcgatcttcggaggggttggcatcgttgccgacaagggcagcatatctacatcattgatttggcgtcaacgacgagtcggaagcgacggcgtgatccatcggcctggtgtcttctgccctaccggcgtcggaggaccacggaatggcattggctggctccgctcgacagaacgagaataggtctaggtattggcgatgcgctgatctactccttttctccagttcgtttttctttccgttgtttctcgcttattaagcggagatcagaacgggttataggtcagctgctagagtgccgcaaggattaaaacgcacagagatcacggtggccaggtattttgtctaatccaattgatcgtctcgatctcgatgagatccggtaagcacctttgttagttaatttcaccattagttgtgatttgttttcatatatgtctagtcaaggcagccgtggcggcctatcgctactaccagatctccaggatggtggtgtgtactgttcttagtttatatatgaaattctgaatcacagatccacactcagatgagtatacactatttcttattcttcttccttttaatctctgtacgtacacgtagataaaaattaatcctagagttcagaatgaaaaatactgtgatttggatgagaaaaaatgtcatcaacagatggtagattaattgtcctttgcatgcgtgaatgttgttccaggatagtggtttgtgatggatttctttagttccttgaaatttgaatgaataagcccctaatctttttgttgcttgcaggtggtgtccggccgcgccggccgtctgcagaacatgtcgactcaacgccacaatccaacggcaccagcggagagaatatacacgcaaggggaaggatccttgtttgacaaactgtgatttggatgtacattattacttttcaatctgcgattcagcatgttcaatttgtgttcttgatcatgttttctcgtctgtgaggctagttcttttggaactacatatatctttgagaatatactaaaacttttggatcataatacgtgcatgcagcacgaacactgagttctgcgacagggtaaaagcaagtaataaaaatagcatatatactgctactatcttaaaaaatagcatatactgctactgctaaaaatggtatatactgcaattatcttaacaaaagtataaacctgcaccttaaaaaggtatatgttactaccaccttaaaaagaagtatatatgtatattgctaccacctaggaaacagtatatatactagtcttaactgaagcacagtacttaaactactttggtgaagcacagtactaagtaaaaaaaagaagtatatactattaaaaaaaataagtatatactgtcataaaaaacacgtatgtgggatatttatctgtatatatttctctacatcaaaatgaagtatatggcagctgcctataaactgctgcctactacaaataaaaaaaaacagtatataccgttgcttactaaaaacaaaaacagtatatactttcatgcagaaatggcagcatatacatagctaggaaatatactgcacgaaaaaagagtataaactgttacctactactaataataaaaaacagtttactaaaaacagtatataccctatatgggctcttctggccccagcttcctccaggagacttccatgtgggcccctaaatcagtgacatacattctaggcccatttgtgattgttaaattggacttttgggccttctcatgcaattgcagatcaccagcagactttcgactgattgattgatatatttccacatccttctcttcatttatgagtgcttctcctgcatacatgttagtagcatagcatatagtggaagtaattattttatttgggaattatgcattgcaaccataggtagtcttcatatattggataatattgacggtcgaaactggtcgacaacgaccgcttgttcttgtacataagcgaggttgacaccggcctcaacatcatcgacgtcttcgccaagctaatcctacagaagttcaccgacacgatgaacaggagggagctactcctccagagcgacaagaaggcagttgcggaggccttctggcggggcatcatggatggaagggtcgatgacatggtccccacggaaacgatgaggactccgtggcgtagtggcagccttttacctcacacgcaggggtacacacatgaggagcagcagcatgattgcgcagctttggccgtggagccctcgcggcggagcggtgtagcagtgaggacggggcagcggggcacacgtgcgtggtctatgaccttacgcacaacagggggcgcgtgagaactgagaggagcgtcggaagaagaccggaagaagggagaaacacaagcacaaaactattgttttatgtggtttctctctcatcaattgggttgatattatattggcagggccagaaagttttacaatatagaacggagggaataaaaaaaattgatagatggaaaataaattggtaaaaattagtagatgggaaaaaagtagcactaagttgataggttgggtataaaatatcgtcgcggatcacaaaatatatatcttacatttgggacaaatttaaagggcaaaatcatttatattgtgggacggagagagtagttatatagctgaattttgcttctggcctgtggtgcagttgcttccaaaataataattctctccgtctaacaatatatttggagctttttttctggatattaacaatgagtatgtgaataaagagttagtattgaatgagatgagtagttatgtgagaaaattaaacgagcagtagtagttgtgattggttaagataaatagattgttgtagatattcgtatattatattaaataaattttaaactatatatcattatatttctagacctaatgattaaccaaggaaaaatgcaaggatttgacaaaaatatagaagccaatgctaggcgcctaagtgaatggatatgaaacaaaaagcgagcaggctgtctatatatgggcaattagttgcattaatatagtagtttataattgcaagcatggcactacatcacaacaccaaaaagacatgccgtgatgctagaacagccattgaataaattagaaagaaaggttgtggttaattagttaacgaccaatcgagcctactagtataaattgtacctcgttgttatgaagtaattcatcctgtagtaacgaaacaagcagagagagagagagagagagagagggagagagataaataatatacagaaatgagcaggtcgagctcgagcatggccaccgtcctcgtggtgttgatggtcgtcagcgccggcggcttatccccaccatgtgcggccgctgcgaaggaggagaagccagtggtggtgctgccacctgcggcggcgccaggggaggcgccctccgcggacgcggcagcgttcgtccgctcctgctgcgacaccgccctgcaggccgaccgcgacggctccagcttctgctatgaccatctcctcccctacgctgccttcttcgagggcaaccaggtgaaggtcgccgaggtggccgccaccatcctaagcaccaacctctgggtctacgcatgctctctagctacctactaagtggaagtacattattttatttattatacttgttgttaattcccatgatcgattagtggtgttgtccacgatttttggtaacattgtttttctcaattttctatttcatatattcccaactctcaattctacattatatatcattttttcattcaacttcatacatacaattcctcagttctttcttatatataggccttacgctaaatttcttttggatacacaccaccgtcgattatatcgtgcatacttttgtatttcaattaattaattgtgatacttgcttcccacacattgatcgcatgcacgccacatttgtaacattgttatcaaatttcggaaataaatttatctatcgtgtgaattatttcagcttgcatgaatctttctttttattttaagcaacctttttctggtcaaaacaaactacacaaaaagatgacaaccaaaatatgttgatatattattaggagtatcctgattcacaccaatgctaaaacaaaaacataaaattacaatagaaaaatgtaagtaaacatcaaggctagagctaggcatttaatgctaaaaataaatgtcaatgtgtagctgtgtgaaccaaaatagaaaagagaaaacagatagttagttattgatcgtccttgttcctgtagagaaacttgtggagagtatgcgtaccgggtaccgacacggcctccatattcgactagagataggagtgggccggatccatctattatgtactagagtgggctgtctggcttgttttctactttgtaaccctgccccccaacctatataaggcgggcaatgagcccctacaagggcatcagcacggataaccacaatcagatcatcagatcaatatccacctggcggatacaaatccccaaacaggtgtagggttttacctctcatcgagagggcctgaacctgtctaaattcttgtcttcacatccatccacttttatgtctcgtgcgatactctttttcatattgccgaattccagtttaaacagttggcgcgacaggtaggggaagcgtcgaattatccatcaagaagtgcaatggaaacaacttcaggaatcaaaggcattgtttttgctcgagggcaatctcaatgagatcgatgattctaatctctgacgtcgattggtttgtcgtttcaatctatatgaaatcttttttgacctgaaatactgccagggctttgccgagcagtgtaattttatataactcaaaaaatatttacaaagttacagtcgaaggagttaaataaaactataaagcttgcaaccaatcaaaaacaatttgctttaagggatccttcattctgcacatatacagaagaacttctttcacaatctatataatattattagcttgatttataatcatggattgatctgtcgtacgatgtcttctttgcatgcatgtacgggtggctgatgaggtccatgggccgccgaaccagcacgtctgcccgggagggaaagtgaagtcggtgatgcccgaaacgaatcccatcgcactagtcggcgaaaaacatggcgcaacccctacctgacgcgccaactgtcaaaacaagattccggcaatactaaaaggggtagcaatcaagctggaaaagtggataggttaggacgtaggaggcaaaggtttatacagccagggaattattccaccgagtgtattattgatctgatgatctaggagaaaagttatgcccctaggtacacttagacccgaccttatatagggagaggagccaagattacaatgtacagcccatatggcttacgtactaggctaacgaatatgtattacaactgtagctaactggcactactggatatttccttgacatacaagttaacataattcccgagtcatttcctaaacatattctatctatacaagctattacctataaccagtcggatatacgtgccatgtgggtatgtggtacccaactacccataatctccactctgtgtgtaagatgcatcccttcatttgtaggagtcaagtcactatctttcttcttgtgatttcttctagcagtctttgtcacatccttattttcgtattaggatttataaattatttaataaattattattaaaatttatattaaatgtacattaataaacaagtgaagttaaatgtgggaaataaaatttcctaaatataaagcaaggatggattaaatttttattaaattctacatggttaattatactctctgaaattttctcggattttttagagctcaattactaattttaataatacaaagaacattttaggaattatttaaatattaaattagtcattaaatgatcttatcttaagtttgttaaatactctaagtgtccaagcagttgcgagatttttcttgaacatatttcagtatttgaagtatttttaacaattcaaatatcatttcagtgattaatttagttggaaaagtaattaaaatactttccaaagctcaggtcttaatatggcccatctctctccttcagcccagccgatccagcagcctctttctctctgtcgaagtctgctttgggcctgtttgggggagctttagattctgagaagcagctgtttggtagccagcttctgagaatgtggaaaagctctgaaacccagcttctccagcttttggcttcttagttcattttttagaatctataactacagattctcagaagctgtggactgtttgaggcagcttctaacagaagcagcttttgggaaaagctgcagctgggagaagctcccataaaccgggcatttgcttccctctttaatcaggccttggaagatgaagcccagctgaaagtctatacgttttccctccagctacagtgtcgtcttccagctccagatagagcccgtgcagctgccgagacgctgccgtttcctccgcctgattcgctcgattctctcagccgtttcttgaattggttctcttccgtttccctagactttatcccttttaattcgacacggaatcgagctcggattgagtttatctctgcaaaaacaaaccctaattttccttcaacgaatccatccgttcccgagccgatctctctttcccactcctataaataaagtcccctccctctcctctttcggccgccacctctccctatctctgccgtcgcttgtagcgctgccgccgcgttcgcctactcagtctaccgccgaccgccgctccagccgcatctcgccgtcgccctggccgtcctcggtcttagctgcttcctccctcggctccgcaaggtcaagagcaagcccggcagccatcttcccgaagctgaaacccattggaatcccctcatcgacgtgaagccgatctactccacctccggtcgagccctgtcgatgactccgtggtggtcggttttcgccgtcgtcttcctcagcatcgcagcgccaagctgaagcccggccatcggttttccttcgccgaagattgccaaaatgtcgccgtcgtcttctcttgtccccaaagcagttgttgcttctatggtggatgctagttgttgagctggaagtagtgggttcctaacaatctggtatcagagccagcctggtttcccccatctagctcttggtctagttgagaaagttctcatcaagtagggtgccatggcaatagaagacaaattggacttgctgttgaggcggatagaggagtacgagctgaggcgagaggaggctgatcggagaactagagctgatatacggtctctcatagatgtggttgaagcatgcacaccggaagttgggaagaaggcaaaagacttgccagcgtcaattaagaaagagcagtcaaaggtgacgcccaccacatgtttgacgaaatgctctagtcccgacatcgagcccaaactcacactggttgcgatggtcaaatgtgccgccactgccatggcctccatgaagttggtagctgataatggtgcaaccagcaccaccaaaattcccaccactgactattccaaggagacgcacgccaagtgttcgatgttgggcttcgatgtcaagtgggacgccaacaaagccgacatcgcgttcctgaccaagacggttgtacttgagaccgttccagcatccattgcatcattgagcgccttctcaccaaggatgatcgccgacatcaagcattacacattgatgcccaccaggtattcagcgaaatgttctgggtctaacaactctcaagttgtgtcttatttgtccttcttaagcaccccagtgttagtggaatcagttgaaggacatttgttagttccatggcaactgctgttgcaacactttgaggttgatccatggccacccataacatcaagggatcaagagttgatcatattggagtcacagttaatgtcatggctggcattcaactgcagctgttgtaaagtacatatactgccaccttggccccctccaaccgaagcgaaatggtttcaactctttgtgggcaagcaattttcattggtaaactcgctgaacattatacatgtcatgtttgggccactagagtgggatccaggtgatggaaaggtccaccttcgcaaaatattaatatggatggatgattggttcccacaacattattttcattggaggtaaattttgtggagcaataagctgaaattcaatgttggagtgaaaagtgagttgtcctttttgatcaaccttatagcagccactagcaaggaaggtatctatgctgctggtgaacctgaatatttacttttggggctatcttttgttgaaatggaaagaaagggcaactgctacttaagttggagtcacttacttcttgcaagagtgatggttgtggagctgagcagtactgggcaatttggttctgtgaacttttccttcaaaggaaaacatgttgacaagctcagactatttgtcatgccaccttggctgccattagtttgtttgctggaagttagagaagggaaatgttgcactactgattctgctgcaagtataattccttggaatgagcaaaagaaaatgatgattactgaaacttgcacttgctttgagcaaaaaatgcagaagttttgggatctgactttccaggtcagtttgacatcacttgatagcaaggaaagcaatctagttatttgtgatcctaaatcattatctgtttggttatcatctgttgatcttcaggggatgttgctcaactactaccaaactagagtggagaaatggaatatgagaataatttgcatggtgatatcagaatctgagtcatgtttggaatcaaattacattggtttgaatgttgaaggagatttgctatatgtgattgctgatgaaaaaggccgcaaaagggtgaaagaaatggaagaagatgctaattcaattcatgatgagaagtatacttttgggttagttcctatagtggtgttgatcaagcgaggttgtcactgtttgcagcatatcaaattgttgggaatcaatgttggcaagcgattcgtaacagtgctattgtcatgcatcacccaggtgtactttacatggagtaagcagttattcaagctaaagctacttgctctattcttcttcaatgatggttcattgtctaacaccaaatatttggaggaaccatgggatccgagaggtgtattccatcggcttttggacaagccaaatttcaagaagaggggattgtcaggatcccgggtgggccgcacacgggctggtcagcccatcgccatgaggcccaagcaaacggaagggagcagcatataagcagcagcatcgacaacaccagggggcatcgaaagatcatttggacttggcagagcagaacctcccggcggcggaggcgacttgggtggccggtgggcaccctcgtcgatctctctcccctacctctcctccgatctccagccttccctctcccctcggttctagaagtttccagcacttgtattccatagcttcttcttctcttg

SEQ ID NO: 18983 - DNA, 2938 bp, Oryza sativa
tggtcggttttcgccgtcgtcttcctcagcatcgcagcgccaagctgaagcccggccaccggttttccttcgccgaagatcgccaaaatgtcgccgtcaccgtggaccagtacctccacgccagcgtgggcaacagctttaccttttgtatagcatagttcgttgcggggcaccagactgtgaagtagcgagaagtccatggggatcgctgcggagtccatgcctctggttattgagggggtgattatgatccaggtatggtgcgctgtggtggattgtgttgtatgaggggtattgtcacagtcccgtttcgaggtaccgtggtgatactgagggcatggtaacatgttttggggctgtgtcttgtgggtacagtggtacatctctggccagagtaaaactattcgaatagtcgtgcccgcggttatgggcgggttgagcaatgtttttcgttattagtctcacacctctcataataattattgatgctatagcaggtaataatttgcttagctcctagtttggaattagatctgtacagctgggtatggttgtttaggatggttgggcctgtgcagcatggttgtgctgttcagtgttgattaatattgatgattaattactctattgttttactactcctaaatgtttgctaaatgctacttttgcaaatgagcctatattatgccatccttcggaatccttgtgcactcacatatttgctgtgtggcttgtggagtattccacgtactcatcttgcaataatcaatcaacctcagttgaagaaattaaaatgatccagagggagaaaacgtttggcttataccccaattgagctgcctgtgggagtggagccgaaccttcgctagaccgtaattccgccgcagcttttcttttcttttgtaagtatgtaacgatattattatgatggattggtatattaaattgtcagtttatgtacctcagctgattcctggacgaggattttatgcacaaataagttcagaaattaccagaaaatttccggcaagacggtcttgctgctccttttcatcttatgattccatccagttgtgttaccacacgacaggatatggacctgttctgaaacaacagtttcgcagtataaattaattcgttactcctttcgataaaatgattagattaatgggcacaccatttttccatatcctacacggcctgttgtctttgtgtttgatctgagtgaactaatttgattactctctacgatctcaataaccatgaaatggtcatctctgctcatgatgaatgggtttactgtatcttcctacttcccccatcttaatcgaattgcttgacttacggcctcttcttgcacctaatccacaatgaatgtatgtcaggatcccgggtgggccgcacacgggctggtcagcccatcgccaagaggcccaagcaaacggaagggagcagcatataagcggcaccatcggcaacactagggggcatcgaaagatcatttggacttggcggagctgaagctcctggcggcggcggcgacttgggcggtcggtgggcaccctcgtcgatctctctactctacctctcctccaatctccagccttcccccccccccctcggttctagaagtttccagcacttgtattccatagcttcttcttctcttgtccccaaagcagttgttgcttctatggtggatgcttgttgttgagttggaagtagtgggttcctaacaatctggtatcagagccagcctggtttcccccatctagctcttggtctagttgagaaagttctcatcaagtagggtgccatggcaatagaagacaaattggacttgctgttgaggcggatagatgtcacgcccagaaattcccgaatagaattccaagcagaatgtgcattaaaatccccgtccaggaccggccggggtacacaaacgacaatgttgacattcagatccacgtcttacaaacatcataaaagtctcacgtaaatgcagcggaaagaaagaaagaaaacaggagctaagccttgactagaactgcagtgggaacaccactccacaggcatccttgacggcacggacgaagcctactcctcagagaaacctccatctgacacatactcgtactctggggttgggaaaaatagagcaagactgagtactacccactgtactcagcaagtcataccggaatagaggcatgatgcagggaattatcaaagaagagctaaagtggttcgtttgcataaagcgagcattaaaaaaaacagaagttgaaagatttaaacagttgtaataattaattaatattaactatccactgtccaacgctatcccacattgcaacaggcccaaacctcaacctaaactatccaaattcaaaagattacactagggtgagactaatcacggtgaatctggttgaccgcccataaccgcgggcacggctattcgaatagttttactctgatcagaggtgtacaactgtacccacaagacacagccccacgacacgtttccgtgcaccgacatgccaccacgacataccggaaagaggccgtgacaggacccttcgcataaccccctctaaccaagcacaccacacctcaggtttcacccccactcctcgcaaggcagcgggcagtcccctctcgtgcctaggtgaatccggaagccgcataggccgtcgcagggcccatccaaactccatcacgcccacccttgcctggatgcgtcggctagaggaaagctacgttacaagcccagccgttgcccatgctggcttgtggtaagtacgataagttcttccagggcatcccacgaacctgtccttaactgccatgggtgcgaccagcaaaaccatgcacccacagcccaccatgtgatttattttaattaaccaacaccaaagcggtggcactaatccaa

SEQ ID NO: 18984 - DNA, 2049 bp, Oryza sativa
ccccattgtgcactagttgaactaagcatggcaagcaatccctagtccaatctctagtccaaacggcctagatcgccctcggggtcgatcggacgggcggcgacgacccggctcggcttggctcaaggccggcctaccggccgcggtgatggcgacggcgtgcgcgcgcgaacgcgttgccggcgacggcatcaggcggcggaggcgacggcgcaaaggcgacgcgaaggcggcggcactaagcggcggctaggaaggagagggaggggaatggatgggagaggaaacctcaccgagggtggccggcgcggaggaagacgacggcgaacggcggctgcaagccacgggaggacgacggcaaccggcggacgggtttcggggtgccctaaggaaggaagagagagagattagagagagggagatgaaccacgacgaccggcattcatggccgaaggcggcgatagcggttgaactcaccggagcgcgagggggtgcgaattccggtgacgaaactcaacggggaaggagcggccggggtagagcttagcctcgcgaacccgacggcagcgacggcgcggcacggcggcgaccctagcggcggctagcggcggccggagtagcggaaacggcggcggcgggtggttgcacggcgcgggagcgatggggagcacgagggagttcggcgagatgggcaaaaagcgagagggggtgacggggaagcctaaatagtggaggggagccccggatgtggctggaaggggcgggatttcgccggccaacgtggggagtgggggaggagagagaggcgggattcgaaaatcgaatcccggccatctcgggcgcggggcgcgggcgcggatgggagtgagaggggagaagtgggtgcgggagatgcggcgcacgcgcggacgtggctgacgtggcccggagaaggcggaggcgtgggcgcggcggcggttgcaggcgcggcggcgccggctggaggaaggggacgggtccaacaggtggggcccacctgtcggcgtcccggggagagagggaggtgcggcttgggccggcccacaaggaggaggacgcgcgtggcggggtggactgggccgacggcccaagaagaggaaaaggaggaaaagaatttccctggaattgaaaaaaaaaaatttaattttggccaaggcctccaattttaaaaatggttaaaattatttcgagagctctgaaaattccactaaaaatcctattagtgaatttcgacatgtagaactcaagaaaaattccacatgccaattttgattattgtttgcatttctttaatagggtttactcttgctttgcaccggtattttcttagggtctcttattaattcacttttaggcttaggaggagaacttcagggtgtgagaaacctatccccccttaaacggaatctcggccccgagattcggaggagctggcgaagaggtgcggatgggcggctttcaactcatcttccctttcccaggttgcttcctcttctgaatggtgactccactgaactcggcaaaacctggtgaccttgtttctagttcttctttcgctggtatcaagtatatgaaccggcttctccacataggttagatcctcctggatatcaatgtgttccgaatcagcctgttcttcatgtacccttaagcacttctttaattgggacacgtggaacacgtcatggatgccgatcatattggatggaagttctaactgataagcaacttctcccctttgttccaggattttgtagggtcccacgaagcgtggtgccaacttgcctttcgtctgaaaacggtgtactccccggagcggagtgacacgaagatacacgtaatccctgcctcaaaagtgagttcccttcggcggttatccgcgtagctcttctgtcgagactgggcaatcctaaacctttccctgatgattctgactttctcttctgcttccgttaatacctctatcccgaacagttgacgctcgcctgtctgatcccagaagagagaggtgtgcggcacttccggccgtat

SEQ ID NO: 18985 - DNA, 654 bp, Oryza sativa
tgatccataacttgagaaactgtgtttattttgtatctttttgtggcaatggattgaaagaatttggtgttttcttctcccagcatcatccatttatattagtacatctttttttccaataaattttcctgaataccaactttctcccagaagttttaagatgtggtgcttaactgcctccccgaaattctattcaagtaaagaaaggcatctttcttcctctagaagatcaagaaaatcaacgactttattacaatttgtcaagagaagcatgagtctggacaagttcttactccaaaggatcagtttcttcctgagaattttaagtttgaaggaattgcattttgcaggagcatcaaagccaggatccaacattcaaacttgctggacaatatcaaagaaaccttcagcttccacccagaaattttcaaatctgaagattggggacttaaggatttttgtcaatcttgaccacacatggaacatgatcagagatattcctggtcaaagggaggacagttgtgttggcgaaagataaagtccaagatgcagatgtaaatacccaatacagtctttccagtaaaggatcttgttgcatattactccatgtgaacctctcccttttaaagggatttcaagcaaacctagggaact

SEQ ID NO: 18986 - DNA, 4966 bp, Oryza sativa
ccatcacgctcacccgctcgaagatcaccgtgttcttctccatgttctccggctggaatcttggtagatcctggaagaaacagaaaatggccattcattgagtttgcaaattttggatagtgtcatgattgatttaagagagatgacggtggtcaaatggattgttatatactacctccgtgttttaatacatgatgccgttaactttttatcatacgtttgttcatttgtcttattcaaaaaatttaactgattatactttattttgttgtgagttgttttatcacacaaagtatttaagcataatttatatcttatacatttgcttaaagttttatttatatcttatacatttacataaaatttttaaataaaatgaatagtcaaatatatgtataaaagtcaacggcgtcatctattaaaaacacggagagaaaatatatatgggcaaaagaaaccttccggtaatcttgttcggactagggatgaaagtggttcggatactttccgtctgtccggaccaattttccgattcggccggccgcctgccccgctccgcaccgctctcggccggccgccgcccgacccgacctgcgccctgtggatgagaggaagtgagagagagagagtagaaagtgtgtgtgtgagagagaggagaggaagagtcaagaggataaggttggggtgaagaaaatggtggatttttttaatgtaaaaatcaattttcattttacatgtggctctttaaaacgaatttaaaggcactaaatcaactcatatgaaaaaagttgttaaaaacaaagttgtataacttattgagatctatcatttttattttggtcatttctccatccgagtttgattaaaccatataaaatttgaatttaaaaatataagaaattcaaataatttttcgggtagtaaatgatttcaaatgaaaaaattttcaacaataaagttgtataacgcatcaacatctacaacttttgttttggtcatttttctatatgactttgtttgaaccgtttgaatttgaatttcaaaatatgacaacttcaaacaatattttgaaatactaaatgatttcaactgaaaaagtcatcaacaataaagttgtataactcatcaagatctataacttttattttggtcattttttcatccgacaaagtgatagtaacattgttcataaaatttacatctatctcatttgtttctataaactataagagagatgtgtaaactttttgaataatactactatcactttatcggatgaagaaatgaccaaaataaaagttgtatgtcttgatgagctctataacttttatgttcatgactttttcagctgaaattaattacagcttcaaaatattatttgaagttttgaaattcaaaattttaattgataaaataaagtcacaagaaaaaaattgccaaaataatagcagtaagaacacaataacatgatagagcatgattttaaaaacatttaggaaaaaaaaatcatccaatttggagttcatatgagtgagataaattagtttcaaattttcaaattttatttttgcatacggcttcttaagtcatccgtatggaaaaattgatttttccatgcgggtccttaaatggtccacaaacaaacaaataaaaaaattcaattctgaaaaagaaccactcaaatttttaaaaactttcaattgaaatgttcaacccaaaatttaaaatattcaaccaattttcaaaaatttcaatgtgcttacgaaaatttcagctatacacattaatttatttgtttcatgataacataaatttgtatggaaaataaacataacatttaagaatactgataaaatttgagaatactgatgttttgtttttgaaaactaatggctacatctcttcctcgttttaagaagcttattttgaggggtcttgatattttgataattatacattaccgtattcgtttcgattcatattcgcttcgtatttgtattcgataatattcgattctgttttcgtatccgggtttccgattccgattttgatttcgagaaaaaatatgaaaacgaatatgatagagctagtttccgagcgtattcgatccgttttcatctctagttcggacattgtgcctactatttttgggccactggacaaaaagccgacaattccaatgccgagttccctgaaatgttcagaaacatatgtccaattgaaaatattatgaaaattcactctgggcagattaatatatattgtttgttatgttgacctgcaagttgggattatgtcttcttcagcatctcttgaccacagagaccactcaagctggacagctgtgatgggatgcactgcgtgtgctcttctgattgttgatgccgacgcttcagacagtccaatgtactttatctttccctcttcaaccagtttcttcagctcccccatctgcatattaacacatccaagtttgttgaaaacttgagcacttgtttctgcctatgcggactgtgatatactcccttcagtttgactgttgttcattcatttaactgctattttatttaaaacttttatacaattacgtaaaaattgtaagccaagcttaaagcacctttaaaaataaactagatcatatcaaaataaataataattatgtgagtttctaaaaagataaatggttaaatatatatacaaattaaggtccaacattaaaaaagtggagcgagtatatattatactttcttttcaaactcatttttttgtgcttttacatcctatccatgtgcatgggccaggaagatatattaattttagtgttcagaacattttgacggtgaagaaatcgaaatctgtcgacagatatacagcaattccacggaagaaaagatcattctcatacactggtggagaaatgctttgtattcccagttggtaaccccctgtagtcccggttttccaatcgagactacgaaggtttaaatacttgacactaaagatcgatctttagtcccggttggtaacccctggactacgaagttcaaatacctgggaccaagttttttttcttttttttttttgctattttgtatatctcacgcccattatatcaaatcattcacagcaacatagttcaacataaatcattcagaacaatatagttcattctcaacacagatcgaatcacactttaagaaggaaaaaagaaaaaaatccgtgtagccgcgccggcctccaccgcttgccgccgcgcgcctccgtgccggccgccgcctgcagctgccgggggtggtctggccgcctcccctctggatccaccgcgcgaggctgcctccgccgccgcccggccgctgccacgcgaggccaccgccatcaccgcccggccgcctgagatgtgagcaggagggggaggagaggggagggggcggatccggaggaggaagaggaaaagatggggtgagtgaggagaggaggagataaatgtgagggaggagaaggagactaacttattaactgatcccatgcgcctcctcctcgatcacgcgcgcatgcctggtcctctccgcgcatgccaatctttttttctggttgtttagcaaccgagactagaaatagatctttagtggactaaagataatagaggggtctgacaccgcctaccgttttttaaccgggactaaaaattgatctttagtcttgattggtataaaaaaagtagctctaaccttttgatcgagactaaagaatatcgttagtcccggtttttattgcatccggaactattgtggaatttgattgaccgaccaaagatggtttctcccgtagtgagagaagatgcagcgccattgcactgtagtgtgtgctgctaaagtgtcttgatgaacagtagggtgatcacctgaatttgttgttaggcgtcaccaaatatgtcaccagccggctaaggacaataaagaaatggtcagggatggcagacggacagtagtgctttgtagctcgatccgtatatttgcaccataatttgtgacaaggtaacgtcaaaaggcagatctaattatattgttcatagatccaattaattatatatgctcgctccatttcacaatgtaaagtagtgtttttagttttaggactgtctaggtgattctcacacatgacattcaatgatttcaattgcttcatcttttttttcttatcgaaaaggatgaacaatatattttaacatatagaaataataacaaaaattacagctcataacctttacaaaactagttacaaaaagttcaatcttagataaaaataaagtaaagccatatctaacatcataagtactgttaaaaaaggtaaacatacacacgcataccaagtacaattttagacttaggagtgtgcaattttaggctttatttttttttaatatatgatgtctggttttaagcgaacatgcatgtataaggacgttacatatgtgacgcagtgtattagtgaattattaaattaaattagataactagaaaccaattaaatctctccttcgaagtagacttttgattagtagtacatggacactccagccaatcatttattaattctacacactactctaacaaccattgtgcgggtaggtataatgtttctttctttttactagtcatgcgcattaccatggagaaaagtgattgtatgacatactatgtttacatatttatccgacattgttttttgaaatagataattcattattggttaatgaatatgtgattctttcatgagaatctttatgttgtatgttactatttataaaggatcgctgatcaaatatcatatatggaacaaatatgtttaaatgatcaacacatgtattaattgatgatcatgtctcatggatcatggtattgagatattaaattaataatatggacacatgttggggaatatgttattggatagccccaacatgaga

SEQ ID NO: 18987 - DNA, 1851 bp, Oryza sativa
tagtattgccggaatcttgttttgacagttggcgcgccaggtaggggttgcgccatgtttttcgccgactagtgtgatgggattcgtttcgggcatcaccgacttcactttccctcccgggcagacgtgctggttcggcggcccatggacctcatcagccacccgtacatgcatgcaaagaagacatcgtacgacagatcaatccatgattataaatcaagctaataatactatatagattgtgaaagaagttcttctgtatatgtgcagaatgaaggatcccttaaagcaaattgtttttgattggttgcaagctttatagttttatttagttccttcgactgtaactttgtaaatattttttgagttatataaaattacactgctcggcaaagcgacggcgctcttcggcttgacgacggcgacgatgctccggcggtcttcgacggcaacgaaggagcggacaaggacggcgacgacttggcgatcacgacggcggtcttcccgagcgacggcgacggctgaaacgacggcggcgcacggctggagcggcggcggcgacggcgaagctagggcacacggcgctagagcgattccgacgacgagaggcgaaggcgaaggtggcgacgggtagaggagacaccgggggtccttttaaaggggctcggaggcggcggcaaaggcccacggcgacggcaacggcgaaggaaagctcgggcttgaaggaaagaggccgatccgaatcgaactcgattccacgaacttccaaaacgaattagccgatgattccaaaggagaaaaggtagaggagatcccggagattgtttcccctctaacaattcggccggagaaggaaaggaacggccggatttggaaaggaaacggcggcggcgcgaaactagggtttcggcggcggcggccgaaggtagacgacgactgacaggtgggccccacctgtcagcgagcgagggcgcgcgcgcgggcggcggactgggccggctgggccgaggagagagaagagaggttttgggccgactttcggcccaaagccaaaagaagactttttaaaacctttttcaatttaaattatttcttaaatgcaattccatttattaaaaatactttcttagctcaaataaaccccagaaaaatctaggaattatagaattaagcaaagtatttaacgaaattttatcttgccccattttatattggaatttatttattaaaattaaatcttcttttcaagacttttaaaattatttctaaaaaaattccatttaaacaacaatttatatattttgaattttcagggtgtgacattagtttatttataatcagtataatcttagtagttaaaccttctgggatttgcattgatgctggtataatgtctgattaccaggtcataagtctgctctggctaggccgagaactatgccccggggactcagatgctctacaccgattgcaaggctgtagagtaataagtagtaacttaagcatggggtttaggttatcacttatcattattttgggatatattcaccgggagagtagcaggccgctgatggtgacagcttaatacgtgcgtcttccccacagtttatatttctacgtacaatttccttgggtaggatacacctttgtatcctactttggtttgagggttatgacaggttgtcataagaaactcgtcaaccagggtaactttgcgatgcatcatatcgggagggcatagctgtcacgccctgaagtacccctcccttgctctaaattcataaaataaatcgttcgaagaaattgtttaatttaacctagagagaaaccctaaattaataaatgcaaata

SEQ ID NO: 18988 - DNA, 5305 bp, Oryza sativa
tcttattggcaaccgctgtgaagtttacactgatcataagagcctgaagtacatcttcacccagcccgacttaaatctccggcaacgaagatggctggagttgattaaagattatgacatggggatacactatcatccaggcaaagcaaatgtggtagcagatgctttgagcagaaaaagctattgcaatgccttatgcaccgaaggcatgtgtgacaaattgcagcaagatcttgagcacctaaatttgggcatcgtggaacacgggtacgttgctgccctagaggcacggcctacgctcgtggatcaagtcagagcagctcaggtaaatgatcctgaaatagctgagctaaaaaagaatatgagggtcggaaaagcccgagagttccatgaagatgagcatggcacaatctggttgggagaaagattgtgtgtgcctgacgacaaagaactgaaggatctcatactcacagaagctcatcaaacccagtattcaattcatcccggcagtactaaaatgtaccaagacctcaaagagaaattctggtgggctagcatgagaagagaaatagccgaattcgtcgcactctgcgatgtttgtcagcgagtcaaagcagaacatcagaggcccgcaggactgctacaaccccttcagatcccggaatggaaatgggaagaaatcggaatggatttcataacaggtttgcccagaacatcgtcagggcacgattcaatctgggtggtcgtggatcgactcaccaaagttgctcattttattccagtacacactacctatactgggaaaaggttggcagagctttatctttcaagaatcatgtgtttgcatggggtacctaagaagattgtatctgatcaaggaagtcaattcacttcaaagttttggcagaaactgcaagaagaattggggactcgtttgaatttcagcacggcttatcatccacaaacagatggtcagaccgagcgagtaaatcaaatcttggaagatatgttgagagcttgtgcacttgactttggtggagcctgggataaaagtctaccgtatgcggaattctcttacaacaacagctatcagtccagtttgcaaatggcaccgtttgaagcattgtacggacgaaagtgccgcacaccacttttctgggatcaaacaggtgagcgccaactgtttgggacagaagtgttaaccgaagcagaggagaaagtcaggaccgtcagggaaagactgcgaatcgcccagtctcggcaaaagagttatgctgataaccgccgaagagagcttactttcgaagcaggggattatgtgtaccttcgtgtcactccgcttcggggagtacaccgcttccaaaccaaaggcaaattggcaccacgctttgtgggaccatacaggatcttggaacgcagaggtgaagtcgcttaccagcttgagctcccatctaatatggttggaatccacgatgtgtttcatgtatctcaattgaagaagtgtttgagggtacctgaggaacaagctagctcagagcacattgacatccaggaagatctgacttatgtggagatgccgatttgtatcctcgagactagtgagagaaggaccagaaacaaggcgatcaagttttgcaaagttcagtggagccaccactcggaagaagaagccacctgggaaagagaagatgaattgaaggccgctcatccgcacctcttcgccaactcttccgaatctcggggtcgagattccgtttaaggggggtaggtttgtcacgccctgaagtacccctcccttgctctaaattcataaaataaatcgttcgaagaaattgtttaatttaacctagagagaaaccctaaattaataaatgcaaataataatcggaatcggcatgtggaatttttcttgggttctacatgtcaaaatacgctaacaggatttttagtggaattttcagagcattggaaataattttaaccaattaaaataagcaaagtgcaatattaaatcgctgggaaaatcctttttcctttttatccttcctttttccccctcttttcctcctttgggccgccggcccatctctcccgccccctcccgaagtccaggtcgcctccccctcactccctcgggcgctgacaggtggggcccacctgtcagcaccttccccaacctccagccggagggacggcctccctcctccctaccgccccgcgctccctgccgccccgggccacgtcgcccactcccccgcgcgcccgcactccccgcgcccacgccccactcccgctcaccccgcgcccgcgagatggccgggattcaaatttgaatcccgcctctctctctctcctcctccacctcctccactactccggcgaaattgcgccattcccggccacgactcgccgcctcccctcctatttaagcacgcccgcaccttcctctctctttttcctttctcggccgagccctcccgagccctccatcactcccgcaccgctacacccgccgccgccgccttttccactcctccggtcgccgctcgccgccgctggagccgccgccgagccaatctgccgccgccattagcttcgccgccgccaaagctaccccggccgccgcatccccatccaatcccgccgtcgggacccgcttctccccgcgcgccggtgagtaccaccatggccgccgccttcgaccggcgaatccgctcgccgtagaccacccctctccctctaatcctttccattttgttccctaggaggccccggagatcgttcgcccgtcgccgtcatcctcccgtcgctcgtcgtcgtcgttcgccgtcgtctccactcgcgccggccaacctcggtgaaaaactccccctcctccctctttccctctctcccgtgtgcgtcgccgtcctccgcgcgcgcaccgtcgtcttcggccgccgacgccgcttttcgcgccgtctgccgtcgccgtccgcgccgccggttgccgtcgccggtgaccgcgcgtgccgccgtcgctcgccatgcttggcctgccggctttgaagccaagccgagccaccagcggcgcccctcccgccttgtgccactgccagtggggcccacgtgccggcgcccctccctctctctcttgagccgccgctcggtggggcccgcttgccagccgcccctctctctccttgagtcactgacccgcgggtcccgcatgtcggcgccgccccaccccttgctgacgtcagccctggggcaatattgcgcaataaatcgattaagggtttttcttttatagtaaaaacacagagaatcttctaaaaatcataactaattcatccgagctccgattaagtccattcaagtctcagtaaattcataaaaatgtgtagaatccattaaaaatggttttgcttcctgtttcagtagtcttatagcatgttttgcttgtgtgctttgtttgtcgcgtagatttcggccgtttcgtcgattcgtggtttctcgaagacgttgctgtggttccatcagtgcgagagcaaggcaagtcatacattgcaattgatcatattgtacctaatttacaaatgtcccgcatttctattaaatattgcattgttttacaatatcatgtgggatgggtcctattactcagctatatgttgtttcccttatgccattgataacttgggtattaaaatgactagatgttggtttaggagatgcttagccatgcttagttcaactagtgcacaaaaggggaccacattaaagcatagacttgattattggcaatagctttggattagtgccaccgcaatggtgttggctaattaaaatacactacatggtgggctgtgggtgcatggttttgctagacgtgcccatggcgattaaggaccggttcgcgggatgccctggaagaatttatcgtacttaccacaagctagcgtgggcaacggctgggcttgtagtgtagcttttctctagccgacgtacccaggcgagggtgggcgtgatggagttgggtcggccggggtgtccggttgatcggctgccggattcaccgcggcacgaaaggggggctgcccgttgcctgctggggacgggggcgaaccctaaggtgtggtgcgatcggttagagagggttatgcgaagggtcctgtcacggcctctttccggtatgtcgtggtggcatgtcggcgcacgggaacgtgtcgtggggctgtgtcttgtgggtacagttgtacacttctgatcagagtaaaactattcgaatagccgtgcccgcggttatgggcggtcgaccagattcaccgtgattagtttcaccctagttagcttttggaactggttagttcaggtggtggtttgggcctgttgcaacgtggtgtaacgttggacagtgattggttaatatggattaattactacaactgttttactgctttcaactactgctttgaaatgccggctttatgcaaaagaacctttagcctcccttggatatatcttgcatcatacctcctcttccggtgtgacttgctgagtacagtgggtagtactcagtcttgctctcttttcccccacaccagagttgaagtccttcccagttgaagatgtctcgaagaggttggtttcgtcgctgccgtcaaggattgcctgtggaatggagtcgcccgctgcaggagtcaagtcttcaggcttagctcgcttttatctttttccgctgcatttgtaatcttttatatttttgtaagacgtggatctgtatgtcaacaattgtcgtttgtgtaccctggctggtcctggacaggggtttaatgcacattcagcttagaaattctggttcgtgaatttctgggcgtgacaatagctgagttccggcttagctatgctgcattgttaaagggaatatactacatagagtatactagctagaatagactaggatgttgtatactagaagtacatgagtgagacatttctattctatttccacttattcatatttaggataaggaggagttagcggaatccttggctgtgtgtcactctacccttaagcttaacttacccctgcatagaccttaatgtatacaggtaatacataaactattagcatagtactcttttatcatatatttccttgggataaaataaatacgatatcttcgaatactcccgggtgaaatgctacaatggtatatccgtgcgtttgcggatcatatttgtaaccataatataccaggattatttctaatgctattgctgggaattatatttccagtagtgttactaagaaataccaaca

SEQ ID NO: 18989 - DNA, 835 bp, Oryza sativa
gggataactacgtggcgacccgtctagatgcaacggaggttacttgggcagagttttgtcaaagtttcaggaaggcacagattcctgaagggattatggcacaacagaagagagagttccgtgcgctccaacaaggaaccatgtcagttacagagtacttgcatgagttcaaccgccttgcacgctatgctcctgaggacgtgcgcaccgatgctgagaagcaggagaagtttttatttgggctcgacgatgaattgaccaaccagctaatctccggagtttatgaggactttgagaagcttgtggacaaggctattcgtcaggaagagcaacgcaacaaaatggaccgaaaaagaaaggcagctcagatcagctttcctcaggggaacaatcagaagcctcgcttcatgacgggacagctaggtgggccttccaccctgatcgtctgtcagcaccgtccctatcacccgagtaacttcgacaacgactacaacggtggcaggcacaacaacagtaagcagcacaaccacaactcgactccacccccactaatggcaccagctcagtcagatccgccagctgtgtcagttcagtcagaacaacccaagaagggggctgtaggaaagccaggaccctgcttcaactgtggcaagcacggcccctttgctggcaagtgtccgaagctgaatcgcactggacccaggttcatccaggcccgcgccaatcatgtgtctgcagaggaagcacaggcagcaccagaggtcgtgtagggcacgtttccagtgaactcatatccagcaacagttctctttgattcaggtgcctcgcattcttt

SEQ ID NO: 18990 - DNA, 665 bp, Oryza sativa
ttgtccaggctgcacggctggtgcaggaggacggggcgcacgagtcccttgctgactctgctgttgctgcggctgtgagacgcgcaccacgaattgaggtcggggcgcggagcgaggttgctgctgctgctgctgcgaggaggatccccctgggtagggattagtgtagcggaccctttggttagccccctgttgattgcggaaattcgccaagcgacgcttgtgcgactccagttccttgtgcttggcttccaagcggatgctcttgtccaccaaacgctggaaatccggataatccccggagaccagacgcacggacagctcagggtccattcctgccaagaacttctcctgcttctcctcatcttcatgaacatcttctggggcgtaccgggccaggttgttaaactcatgcaaatactccatcacagagcggttgccttgcttcaactctcggaatttccttttcttaagggccatgactccggcgggcacatgggtcctccggaaagctgcggtgaagcgggcccaggtaataggctgcccctctagctgtgtagcctggaagtggtcccaccatagagatgcgggcccctgcagttgatgggcggcaagatgactttctcctcatcgttgcactgcacggtatccaactttttccccac

SEQ ID NO: 18991 - DNA, 3412 bp, Oryza sativa
acgaacaagctcgggcctggaggtactcttgcgggcggtgatcttcaggctgcggcagacgcggcggcgcttggggcgacagacctctccctaggcgatcttgagctcacatgtcacgcccggaatttctatccaaaattccaaacgcttacatgtgtgtgaaccctcgtccaggaatcagccgaggcacacaataacaaattgataatagagtacaattattactctaattaataagtgaataaaatgtcattacagaggtagatagttcctgtcaatcaataaagatctaagcatcggaaagataagataaacggcgcagacgactccactccacaggcagcttgaccagggctacacctaattctccacaccatcagcttcactgtagaactcttcctctaatgaatgattgcaaggtgagtatatgacatactcagcaagtcacgcagcaaatatgcaagtgcacaggataacaaaggatggcataatagggtttcatttgcataaacaacatttaataaacatttcagaatttaattaaacagttgagtaataattaaacaatatcaatctaacgctatacaacataccctgttgtataggcccaacctttctgaacaaccatacccggctgtacagatctatctccaaaccaggaatataccattccaaaccaggagctaaacaaattattaccagttatagcatctgttatcatgatgagaggtgtgagactaatcacgaaagacattgttagaccagcccataaccgcgggcacggctattcgaatagttttactctggccagaggtgtaccactgtacccacaagacacagccccacaacatgtcactatgtgcctcaataccaccacggtacctcggaaaggagctgtgacaatacccctcgcacaacacaatccaccacagggcacctttcctggatcataatcacccccttataaacaaggcatggactcccagcgacccccgtgggcttatctccgccacttctcagtctggtgctccgcaatgaaccatgctatacaaaaggtaaagccgttgcccacgctggcttgtggttggcacggttaatgtttcacaaccgaaactcgtgaaccggtccttaattgtcatgagcacgactctcaaaaccatgtgctcacaacccaccattatcaagttttagttggcaagtaattaattaaccaatcacgattgaccatcgtgagctatcattaagccatcattaaataatagtgaatcataagttatcccaatcgctgcactgcacggtgtctagctttttccccacggcatgcaaccaatccaacgcatccacggggttgttggagctagagaaggtaggtggacggatgcggaggaactcggcgagtttagagtgttgtgggggtggtggtggagcattctgttgtggcggattttggaggtggtggaggaaagcagtcatcatgtaggcctgctgggcgaggatttgggtgagaatggcgttggtgtctggtggtggtggtggaggcggaggaggaggtggaggtgggctgccatggttgttgtggttgctgccctcaggttggttgccatcaccggtattagcacttctcctggtcgtcaccatctaaaaaccccacacagaaccagcaaacagagagagctgacaattaaagctaaccatccacgactaccataattcttgaatttattactgctattaaattggttaattaaagttcaaattgcttaagcaaataaaataaagacaggctccgacacagttatgccacacaccggcataaccatgccccacacgactccaacaagaagacaaacgagaaagaacacacgcgcaagcctactaactgctcgtctaccgctgcgacgggccaggacggaaggtgagcaacagcgcatcctccgtgctaccaacgccggaggcttccccctcctgaggaaccacgggcgcgggctcggcacgaggggtctgaacgaagcaagtccacgccagggactgacgaacaagctcgggcctggaggtgctcttgcgggcggtgatcttctggctgcggcagacgcggcgacgcttggggcgacagacctctccctgggcgatcttgagctgatgcagctgcgcctccactgcgtctaggtccttcttcagctgcagattctcctgacgcggctccaggatcttcatgttgttctcgaccatcccacggcgcaccatctgatggaagtcgatacaagtcgcgtcgtacgcctccaccatgcgcgccaggtgcatgatggtagcgtcatcctccgagctagcatcccggaaggtggcgaagtcgcgggctcctccgtggcgagggtggtagcggtagggcgagtgctgcaactcgtccgggtagcgctggtgaagagtgccgatggcgaggagagcggcgttctggcaagcggcggagaaagaatctccacccgcggtgactgccaacgaagtcctctcgggtgagctagtgaggatcactgcagtaacctcccaagcagcgtggggctctgcatcgtcaccctcctgctccgggagcggcctgccctggtagtccactctatgcggataccccaggacaactcacatgccccacagctccaagacgaaaccagtcaggtccagaccacgacggctgatgctgccggccatctacaaacaaaaacaaaaagaaaagcaacatttaaaagtcagattttggcgataaatgaagcagcaggacagagagagactagagggttttcacaattaagacaggatttttatttttgaaaatattgctaaggcttgggatctaaggctcgtcctagggtcaagggggctctgataccaacttgtcacgaccggaaataacccaacgggcgttccttacgtgcgtgtattattccttgtcccaggaggcaaggtacaccaaaagttgatacaattcagagtttaacaagcggaagcgtaaatagataatttattacatgggcagcgaaggcccggcacacacaaagacaaacgagaaacagcggaagactagggcgacgaccacaggcgcttgacggcaggcacgagctagacaccaaagccttcatcttccagggactcctcttctgggtttgggaaaaattgagcaagactgagtacaaccaccgtactcaacaagacacacccacaagtgcagaataaatgcaagggagtacaagggagttataatataaagggttagggtttgcagtaaacagcgttaaaagacacttagttgctcaaagctattttgtaatcacgattctagaattatacaatattatttatcaaggccgtgaacccacacgaacctgccttaacccaaggcctacgatgattcagaccgaaccggcaa

SEQ ID NO: 18992 - DNA, 9637 bp, Oryza sativa
cctttttaactttgtttatttcttcttaattattatttgtgctctgaaaattccactaaaatttatttacgcattttaggcttttaggaaatatacaaaaatcctccaagccttatttgacttttaactttgcacattttaattgtggaggctttcacacggattttaattattctcggcataatttagaggatgtattttagggtcgttttgggacgcgacatcggccatcatacatcggcaaaacacaaccaattaagataataaaaactgctaagggcaatataacttatatcggccatctctaggcggtgtcaacacatcagctaacatgtatcggcagcatccagccgatcatgaattgacccaaacacttgggtaatatttcttcagatattttccattaagcgctcgttcataaatgtcgcgtcccaaaacgactctaaaatacatcctcgaaattgtgcaaagaataattaaaattcatgtgaaagcctccaacaattaaaatgtgcaaatataaaagtcaaataaggcttggaggatttttgtatatttcctaaaagcctaaaatgcgtaaataaattttagtggaattttcagagcacaaataataattgagaagaaataaacaaagttaaaaaggtttataaaaagaaaaaccctaaaagaagtcttctttcccccccttcccttcttgggccggctcggcccaacttcctccctccctctcctctcccccgcggcccatcggccttcccccgcgcgcgcgccgctgatgggcgggcccgcccgccaccctcgctgacgggtggggcccacctgtcatcccctacctcgcgccgcgcccgccgcccgcccgtgccctagcgccgccgccaccgccgaatccgccgcatcccgccgtccccgcgcgccataaagagggggaaatcactccccgtgattccctccctcttttcccccacttttccctctctctctacctcggattcgtccggatttgctcccgcaatcctcgccggcgccatcaatggcggccggatcttccgcggccgattccccctcgtccggccgctctctccccctcccaaccctatataaaccctccccgtgcctccctccaccgtttccgccactcgccgctctttctccccgccggaatcgagctcgcgccgtcgctctctctctccgccgtcgccgccgagctccggtccgccgccgttgtcgccccggaccacccctcccctcggcgccgcctccttcggcttcgccgcatcctcgccgacctcgtccacccctccgtttcgcacgccgaccaccggagcaccgtcgaccccgtccacccgagccgcgccgccgccttcctccgctccggtcgccgttcccgtcgtcgccgttcccgtcgtcgccgtcgatccagggtgagccgtggaccgcctattcgtttcccccttccctcccctctctcggccgccgctccgccgtacctatggccgccgccggcgaccataggggcgcgggcgcgccgcctcccgtcggccgtgccggcaaggccgccatcgggcgcgccccgcggctgccaggtggggcccggccgtcagccgcccgcgcccacgggtgcggctgacgcgtgggacccacggcgccggccggcgtcagccgcgtgggcccggtccaccgtggaccgtgaggctgacgcgtgggccccactcccgtggacccggtccgcgcgccctctccctcggctgacgcaataaatccgatttttaattaaaatttaaatgaagaaattcgcaaatatccatttaaagagcatataaacttcaaatggccataacttggccatttgaactcggaattggaccgttcaagtctctaatttttccttaagaagtcaagaacccatttttgtgctttgtttcttcttgttatatggagtttattagagtaaaagccttttcttttccgttggtcgtgtagatgctgcagcttcggaagatctgctcttcgtggaggttgaagccgatgtttgggaaagcgagcaaggcaagtcacatcatctttgaacatattgaatcccagtttataaaattatgttgctttaaattattgcattatcgctttatttaaattcccgcgttatcactgttttatctagccatgcctatttacctttgttatgaccttattattgttattgttattatttccttgttcaccctagaataaacaaaaccccactagtggacactctactcatggtaccactagtatgattttaggtagatgcttcgctatttaattagttaacattaggtggttttacaactctagactttgggatattcatatcacctggacactttggaattgttggattattgtgaaattggattcacaccgccccctctattcaaaatccccaaaatggttttaggctgggctcggggtgcatggttttgatagtagcacctcggccatataaggaccggtcttcgggcctctgttgcaaagcactaccgtacttccacatgtctagtgggtaaggcttagtttgtggctcagtctggttataaacaaaagtacacggatggagatggacgaagtcgggggtcgatggacatctccagggcaaatgaaggctacacgagctgcggcctggtagtcgagatgtcatggcacagggccggtgtcctgctgctaggggctcagtcctgcctacctgtcccgggggttccggccgtaggtgggattgggtcggtactcttgtctatggctaggatgggttggaaactatgtcacgtcttccgtctgtataccgtggtggtatgtggcacgtggttgcacgtgaggaagattgtgtcttgtgggtaaagatgtacacctctgatcagagtataatctattcgaatagccgcgccctcggttatgggcaagccgagcaatgtacccaagttagtgtttcaattcttaaaacctgcttaacaactaaaaggtggaatggttggcctgggttggcttgggacgagctgggacccagggtcgggttgccagttcggtcttaatcatcataggccttgggttaaggcaggttcgtgtgggttcacggccttgataaataatattgtatagttctaggatcgcgtttacaaaatagctttgagcaactaaatgtctttaaatgctgtttactgcaaccctaaccctttatggtataattcccttgtactcccttgcatttattctgcatttgtgggtgtgtcttgttgagtacggtggttgtactcagtcttgctcaatttttcccaagcccagaagaggagctccttgaagatgaaggctttggtgtctagctcgtgcctgccgtcaagcgcctgtggtcgtcgccctagtcttccgctgtttatcgtttgtctctgtgtgtgctgggccttcgctgcccatgtaataagttaactatttacgcttccgcttgttaaactctgaattgtatcaacttttggtgtaccttgcctcctgggacaaggattaatgcacgcacgtcaggaacgcccgttgggttatttccggtcgttacaagttggtatcagagccacccttgaccctaggacgagccgtagatcccaagccttagcaatattttcaaaaataaaaatcttttgttatttgtgaaaactgtctagtctctctctgtcttgctgcttcatttatcgccaaaatctgacctttaaaatgttgtttttctttttgtttttgtttgtagatggccggcagcgtcacccgtcgtggtttggacatgactggcttcgtcttggagctgcggggcatatgcgtggtcttggggtacccacatggagtggactaccaggccaggccgcttccggagcaggagggtgacgacgcggagccccacgctggttgggaggtcactgcagtgatcctctctggctatcccgagcggacttcgctggcagtcaccgcgggtggggattccttccccgccgcttgccagaacgacgctctcctcgccatcgtcactcttcaccagcgctacccggacgagttgcagcactcgccctaccgctaccaccctcgtcgcggaggagcccgcgactacgccaccttccgagatgctagctcggaggatgacgctaccatcgtgcacctggcgcgcatggtggaggcgtacgacgcggctcgtatcgacttccatcagatggtgcatcgcgggatggtcgagaacaacatgaagatcctggagctgcgtcaggagaacctgcagctcaagaaggacctagacgtggtggaggcgcagctgcatcagctcaagatcgcccagggagaggtctgccgccccaagcgtcgccgcgtctgccgcagccagaagatcaccgcccgcaagagcacctccaggcccgagcttgttcgtcagtccctggcgtggacttgcttcgtcgagacccctcgtgccgagcccgcgcccgtggttccccagaagggggaagcctccggcgttggtagcacggaggatgcgctgttgctcaccttccgtcctggcccgtcgcagcggtagacgagcagttagtaggcttgcgcgtgtgttctttctcgtttgtcttcttgttgagtcgtgtggggcatggttatgccggtgtgtggtataactgtgtcggagcctgtcttattttatttgcctaagcaacttgaactttaatgaacccatttaatagcagtaataaattcaagaattatagtagtcgtgggtggttagttttaattgttagctctttctctgcttgctggttctgtgtggggggttttcagatggtgacgaccaggagaaatgctgctaccggtgatggcaaccaacctgaaggcagcaaccacaaccaccagggcaacccacctccacctcctcctccacctccaccaccaccaccagataccaatgccattctcacccaaatcctcgcccagcaggccaacatgatgactgctttcctccaccacctccaaaatccaccacaacataatgctccaccaccacccccacaacactctaaactcgccgagttcctccgcatccgtccacccaccttctctagctccaacaaccccgtggatgcgttggattggttgcatgccgtggggaaaaagctagacacggtgcagtgcagcgatgaggagaaagtcatcttcgccgcccaccagctgcaggggcccgcatctctatggtgggaccatttccaggctacgcagccagaggggcaacctattacttgggcccgcttcaccgccgctttccggagaacccatgtgcccgccggagtcatggcccttaagaaaagggaattccgagagttgaagcaaggcaaccgcttcgtgatggagtatttgcatgagttcaacaatctggcccgttacgccccggaggatgtgcgggaagatgaggagaagcaagagaagttcttggcaggaatggaccccgagctgtccgtccgtctagtctctggggactatccggatttccaacgtctggtggacaagagcatccgcttggaagccaagcacaaggaactggagtcgcacaagcgccgcttggcgaatttccgcaatcaacagggtgctaaccaaagggtccgctacaccaatccctatcccgggggatcctcttcgcagcagcaacaacagcagcagcaaccccgctctgcgccccgacctcaattcgtggtgcgcgtcccacagccgcagcagcagcagaatcagcaagggactcgtgcgccccgtcctcctacgccaacggtgcagcctggtcaaggccgcagggacgctcaaggtcagcagcgtctgtgcttcaactgcttcgagcccgggcactttgtggataaatgcccgaagccaaggcgccagcaaggccaagcgcctccccgctccaacaacggtgggaaggatgtcattcggggtcgtgtgaatcacgtgacggccaaggacgtgctgacaactccagacgtcatcgttggtacgttcctcgttcattccatccctgctaccattttgttcgactctggagcttcccactcgtttatatctgtgccattcgtggggagaaatcagttgggggtagaaaggcttaggaaccctctgctcatcaccacccctggaggggttatgacagcaaagtattatagccctgccgtccctatagaaattcaggggattccttttccctcggatctgattctgctagacaccaagaatttggatgtgattcttgggatgaattggttggctcaattccaaggagtagtggattgcgcgagacgcaccgtcactctgtaccgagggccggaacaaccggttgttttctttgcacccccaacctctgtcagtagttcagaactgcattagataggactgtcagaaatccccatcgtcagggagttcggagatgtgtttccggaagaactacccggtatgccgcccaagcgagagattgagttccggatagatcttgctccaggaaccactcctctgcacaagcgaccctaccgtatggcagcaaatgaactggccgaagtaaagaaacagttggaagagttgaaagaaaaggggtacatacgtccgagtacttccccctggggtgctcctgtgatttttgtggagaagaaagacaagacgaagaggatgtgcgttgactacagagctctcaatgaagtcaccatcaaaaacaagtaccctcttccccggatcgatgatctgttcgatcagcttaaaggtgccactgtattctccaagattgatcttcgttccggatatcaccaattacgtattcgcgaagaagatattccgaagaccgcattcaccacgcgatacgggctgtatgaattcacggtgatgtcattcggtctaaccaatgcacctgccttcttcatgaacttaatgaacaaagtgttcatggaatacttggataagtttgttgtggttttcattgatgacattctgatatactcacaatcagaggaagaccatcagcaccatctccgtctggtgttgggaaagttgcgggaacatcaattgtatgccaagcttagcaagtgtgagttctggttgtccgaagttaaattcttaggacacgtgatatctgctaaaggagttgctgtggaccccgaaacagtgaccgccgtcaccgattggaagcaacccaagacagttactcaagtccgcagtttcttaggtttggcaggatactaccggagattcatcgagaacttctccaaaatcgctcgacccatgacacagttgttgaagaaagaagagaaatttgtgtggagcccgcaaggcgagaaggcgtttcaaactctcaaggaaaagctggtttcctcgccggtgttaatcttgctggatactcgcaaggatttcatagtgtattgtgacgcttcgcgccaaggattagggtgcgtgctcatgcaggacggtcacgtggtagcctatgcctcacgtcagctatggcctcatgaaggcaactaccctacccatgacttggagttagccgcggtggttcatgctctaaaaatctggcggcactatctcattgggaatcgctgtgaaatatataccgatcataagagtttgaaatacatcttcacccagtcggatctgaatcttcggcaaaggagatggttagaactcatcaaggattatgatgtgggaattcactatcatcctggtaaggccaacgtggttgccgacgctctaagtcgaaagagccattgcaacactcttggcgtccgtggcattccacccgaacttaatcaacagatggaagccctaaacctaagcatcgttagccatggattcttggctattctggaagccaagcctaccttgctcgatcaaatccgcgatgctcagaagaatgatccagatatgcatgggatcctcaagaatatgaaacagggtaaagccgctggtttcacagaagatgaacatggaaccctatggaacggaaatcgtgtatgcgttctggacgacaaggaacttaaacagctaatactttaggaagctcacgaaagtccttattccatccaccctggcagtacgaagatgtacttagacttgaaagagaaatactggtgggttagtatgaagcgggaaattgcagagttcgtggccctttgtgatgtgtgccagcgtgttaaggcagagcaccaacgaccggccggacttctccaacctctacaagtaccagaatggaaatgggatgaaattaggatggatttcatcaccggacttccaaaaacccaaggcgggtatgattctatatgggtagtcatggatcgactaaccaaggtagctcgatttattcctgtgaagaccacctatgaagggaacaaactagccgaactctacttcgctaggatcgtgagtctccatggcgttcctaagaaaattgtatctgataggggaagccagttcacctctcatttctggacgaagctccaagaagagttgggtacccgattaaatttcagcaccgcgtatcacccgcaaaccgatggacagaccgagcgtctaaatcagatcctagaagatatgctccgtgcctgtgttctagatttagggaagacctgggataagagtctccccattgccgagttctcctacaataacagctaccaagccagcatacaaatggcaccttatgaagcgttgtatggccgcaaatgccgaacaccactattgtgggaccaagtcagggaaagccaagtgttcgggactgatatcctgagagaagctgaagctaaagtcagaaccattcgggataatctaaaggtggcatagtcccggcagaaaagttatggagacaaccgacgccgtaacctagaattcgcagtggacgattttgtgtaccttcgggtcacgccattgcggggcgtacacaggtttcagacgaaagggaagctcgcacctcggttcgtgggtcctttccgtatcgttgctcgacgtggagaagtcgcttaccagttggagctgcccgcatccttgggcaacgtgcatgatgtgttccatgtgtcgcaactcaagaaatgacttcgagtgccatccgagcaggccgattcagagcaaattgaagttcacgaagacttgacctacgtggagaggccagtgaaaatcctggacaccatggagcgccggaccaggaaccgggtaatccgtttttgcaaggtccaatggagcaaccacgctaaggaagaagctacttgggaatgtgaagacgagctgaaggcagcccatcccgatctcttcgccagttcttccaaatctcggtgtcgagattccgtttaagggggtaggtttgtcacgtcccaaaacgaccctaaaatataacctttaaattatgcctagaataattaaaatccgtgtgaaagcctccaaaaattaaaatgtgcaaagtaaaagttaaacaaggcttagaggatttttgtatatttcctaaaatgtgtaaataaattttagtggaattttcagagcacaaataataattaagaagaaataaacaaaattaaaatgattttataaaaagaaaaaccttaaaattttccccctctccccctcttgggccggctcggcccat

SEQ ID NO: 18993 - DNA, 11511 bp, Oryza sativa
gtcgccgccgagctccggtccgccgctgtcgtcgccccggaccgcctcccacctcagcgccgcctccttcgacttcgccgtatcctcgccgacctcgtccacctctccgtttcggtcgccgaccgccagagcgccgtcgtccccgtcgacccgagccgcgccaccgcctccctccgctccggccgcctcccccgtcgccgccgtcgccccggggtgagccgtggaccgtcgcctcctttcccccttcccttccctctctcggccgccgctccgccgcgccggtggtcgccggcggcgaccatcggggcgtgggcgcgccgcctcccgccgaccgcgccagcatggccgccctcgggcatgccaagtggctgccgcgtggggcccggccgtcagccacccgcgccctcgggtgcgactgacatgtggggcccacggcgccggccggtgtgagcccgggtgcacctggtccaccgtggaccgtgaggctgccgcgtgggacccactcccgtggacccggtccgcgcgcccctccccctcggctgacgcaataaaccctttttaaattaaaatttaaatgaagaaattcgcaaatattcatttaaagagcatataaacttcaaatggccataacttggccatttgaactcagaattggaccgttcaagtctctaatttttccttaagaagtcaagtcatatcatccttgaacatattgaatcccactttataaaattattttgatttaaattattgcattatcgctttatttaaattcccgcgttatcactgttttattcagccatgcctatttacctttgttatgaccttattattattgctattgttattattattactttgttcaccctagaataacaaaaccccaactagtggatactctattcatggtaccactagtatgaatttaggtagatgcttcgctggattaaataggcaacattaggtggttttacaactttagactttgggaataatcatatcacctggacactatggaatggttggattattgtggaattggattcacacctccccctctattcaaaaccctcaaaatggttttaggctgggctcggggtgcatggttttgatggtagcacctcggccatataaggaccggtcttcgggcctctgttgcaaagcactaccgtacttccacatgtctagtgggtaaggcttagtttgtggctcagtctggttataaacaaaagtacacggatggagatggacgaagtcgggggtcgatggacatctctagggcaaatgaaggctacacgagctgcggcccggtagtcgagatgttatggcacagggccggtgtcctgctgctaggggctcagtcctgcctacctgtcccagaggtcctggccgtaggtggggttgggtcggtactcttgtctatggctaggatgggttggaaactatgtcacgtcttccgtccgtataccgtggtggtatgtggcacgtggttacacgtgaggaagatgtgtcttgtgggtaaagatgtacacctctgatcagagtataacctattcgaatagccgcgccctcggttatgggcaagccgagcaatgtacccaagttagtgttttaatccttaaaacctgcttaacaattaaaatgtggaatggttggcctgggttggcttgggacgagctgggacccagggtcgggttgccagtttggtctgaatcatcgtaggccttgggttaaggcaggttcgtgtgggttcacggccttgattaataatcttgtatagctctaggatcatatttacaatatagctttgagcaactaagtgtcttttagtgctgtttactacaaaccctaaccccttatatgataacccccttgtactcccttacatttattctgcacttgtgggtgtgtcttgttgagtacggtggttgtactcagtcttgctcaatttttcccaaacccagaagaggagtttctggaagatgaaggctttggtgtctagctcgtgcctgccgtcaagcgcctgtggtcgtcgccctagtctttcgctgtttcccgtttgtctttgtgtgctgggccttcgccgcccatgtaataaattaattatttacgcttccgcttgttaaactctgaattgtatcaacttttagtgtaccttgcctcctgggaaaaggaataatgcacccacgtaaggaacgcccgttgggttatttccggtcgtgacaggcggtgacgaagcgagccggccgcgtggcggccgtgcggcagacggtggcgatggccatgcggcagcggcggagcgaggccgccgcgcggtcaggcagcggcggcggagcgaggccgcctgtcgggcggcggacgggcggcggcggccggtggggccgcacccgatggcggctggcaggtggccggcggccggcggcaacggcatcccatttgcacatttgtgtggataattttgtgattcattgcacgtttgtatggatctgtgatgtatttgatatgtttgtaatttttgtaggatttgtgatatatttgaattgtatgtataagtaactttaagatttgggatgttactttgatttggggatttgggtttgatttgggatatatcccactcaattcgggagaaaataaaaaagaaaaaaaaagaaaaggggaccatcttactgccgcttccctcaccaaccgggactaaagttccctttctttagtcccggttgataacaccaaccggacgtgaacgaaaaagaaagagattagatagatagattacgcggttgaaccaggactaaagatagcgatttttagtcccggattggtagttccggttttaaaaccgggactaaggggggttacaaaccgggactaaaaagcacttctccaccagtgtactacacatgttgtgaaccatgataatctcaggtctaaggattcaacagcaacactaaatgagatcactgatgacacaatacatatggctcttgcagtgtctcatgttgggtctatccaacaacatgttcaccaacatgtgtccatattattaatttggtatctctataccatgatccatgagacatgatcatcaattaatatatatgctgatcatataaacatatttgttccacatatgatatttgatcagaatcctttagaaatagtaacaaacaacataaagagtcccatgaaagaatcacatatagattaaccaataatgagttatctatttccaggaataatgtcggataaatatgtaaacatagtatgtgatacaatcatctttatgattgcctctaggacatatcactaacataaacccgtagcaagcagcgagcggcagcctccacgcgctactccgcgagcgctgcgaagctccggccgacgcggcagtccgcctcagtgccgagccgcggctccgccgcctcctccggcaatgcgtggagcgtcgcgaggctccatcacctccgaggccacgcgcgactccgccggtcgcgtgcggctccgagtctccgacaccctccactggctgcccgcgaccccgccgagtcgacgtcgcgaccgcgtgcggtccgtcgcctccgcggccacgcgcagctccgcacctgacgcacggctcggactcctccgccggctaacgtatagcgatgccgcgtgcgcatccgccgcctccaccggccacgagcggctcgagccgcggccactttgcgcttccgccggccgtatgcggcttcgtcgcgtcagcggccccgcgcggccggcttcgccgcctccgccggccgcgtgcgccgccggtcgcgcgtggcttcgccgcctccggtcaccggcgccggcctccgttggctccgccacgccggccttcgcaccgtaggcaatgccgcacccgccttggccaaggccgcctccgcaggagggccgtgtgcggttgcctggtctcatgacggccattgctgcgccacacatcagctgcacgaagtgggctcactcgtgcgcactcggcgccagcaggccctgagcaaagggaaataggcggcaggtatgcatgcaaatgcatggttgcatgcatggtcctgttcacgtatagattagaaaagaaaacaaacaaaaaaaagaaaggagaaaaggagggcgtacatatgggtccgcggcatgaccaccctcgtgggacgtagattctaatcactcgagtggatgtccactcatttagtgtatgttaactaaatgatcatgaatttttttttaaaaaaattacaagatagattaatatataatatatcactacataaacatgtaacttaaaattcaacttttataagttgtaaaaaaagtaacaaatcaaacttttgatttgttatttttgttacaacttgtagaagttgaatttaaatttgcatgtttgtggggtgatatattgtatatgaatctatcttgtcaaattttttaaattttttttatacccatttagttgacaagcaacaaataggtggatgtccacctaggtgattaaaagtgtttccccaccctcgtgcgatccacgccgcagcatgtagccgcatgcggcttcgcagctccgcctccgaggccccatgcgcctcgccaccaccgcggacaggcgaggatccgccggccacgtgcagccgcgagtggttccgcctgccgtatgcggcttcgtcaccacctctgcggcgaccgcggtttgccgcccccgcacggccccgcttgcttccgccgatcgcgccagccggctccttccgctcggtgtgcgtgcggccccgccgcctccacagcctggcgcgcagctgcgcccttctcgaatggtcgcgcatgcgaatgcatggcactgttcacgtgattctctctctctctctccatatatatatatatatatatatatatatatatatatatatatatatatatatatatatatatatatatatatatatatatatatagtaaattataaagagtgctccactcgcagcaaggtccagggcggcgctgccacggccccgtgcggttccgccgagctccgccggacaagcacggccttgtacggccccgccgcggggccgcgtcatgtgagacctcccccctgcggcctcgccgacgcggcggttgggccgaaggccacgcatcccgagccttccggcagacctgagcatgggcacacgccatgcacggcctggtgatggcgctgtcccagccactctgcgcagggctcggcacagcgaccgccgacacggccaagggtcagcactaaagttgcatttatctccctagtggattttggtgattaatgataaataaggttaagggactaatgtgtttattgagatattcaggtaattagtccctcccaaggtgaacttaggacatcaaaagatgcttggagacccctacaacattcattcaaagcggatttgaagctccaaggtcaataggatagtttaatttttgaaatcgagttttaggaaaaaccgtactattaagaggggttccaagtgttgttctgagatataaaaagtgctcttagtgggttccttgtggtagaatatttttgggagccatttttgcaaatgggtccagaccggatagagaaggctggccggaagttccggtccctggacccggaacttccgaaccttgcgacatgtgaaattttcctaagtgttgtctggaagttccgaatgtcaggaacttccggacctcttccagttcaaaaatgtgagtaacggctagatgtcgtcacctagccgttatatatatccagatcgcaccttttggccattttcacttcagttctttcatgccctaggttgttctagactctcccaagatccctttgcttcctccactcaaatctagagccattcttgtgagattgagagaatagatgagagtgtaggagtgatttggagaaggtttgaagactaggtgtgtttgagcacttggatatcttgtgggctgttacttgggcttattactcttggagatcttctcctaaacggttaggtgccacctgagagcttccaaagatcatgtggatgtctcgagaaagtttgtgaaggttttccttacctccgcaaggaaacgaggtaagtgagtaaagattcttgtgctgagatttcagaggttctcctaggtagagcaacttgcacttgtggtcttttctagaaggatttgtgagttagatcttggtggtcactcaaattctagaaaatgacctagaaatgttgagttgaaggcctcggacttcttcgaggttctttgcacgggtgaggcaagaggttaatcgagacccagctctttggagcacctcaacggagagtaggattgcaagattcgaacttcgggaaaaaatcgcctttgtcttctctgtgatgattctatgcatgttgctgtgattgtgtatttgctctttcttcctgtagtttaattcgtgcaaattagtttaagtctctgctagatcttcaattttttctgttgcccggaagttccggtggttagaacaccggaagttccggacagtctgagcagatcggaagttccggtgttccacacccggaggttccgaacctgctgaattttaccgctgtgatttgtttgtgaatttcaggaaaacctatttaccccccccccctctaggctacatctttgcgcgttcaagcaccacctacgcgctcaagatcggctcgcaccaccgctgttgccctgcctcgggcaatagtaggtacaatatcatgcaattacatttcaaatcacatgtgagacctccacgtccaagagactgatgaagcaatctccgcggcggagtcagtgttgagaccgtcctagctccggccggatggagtagttcaccatgactcttgaaaacaaaaggaaaaaaaggtcatgatgagattcacgtggcctctggtccgcgaaccaatttccttggccaagtcatgtgagacctccgcgtccaagagacctgtgaagcaatctccgtgccggagtcagcgttgagaccatcttggctccagccggacggagtagttctccacgactcttcaaaacaaaaagaaaaaaaggttatgatgagattcacgcagcctttgccccgcgaagcaatttccttggctaagtcatgcgagacctccgcgtccaagagaccagtgaagcaatctccgtggcagagttagcgtcgagaccgtctaggctctggccggacggagtagttctccgcaactcttcaaagcaaaaggaaaaaaggtcatgatgagattcacgcagcctttgcccgcgaagcaatttccttggccaagtcatgcgagacctccgcgtccaagagaccggtgaagcaatctccatggcggagttagtgttgagaccatcctggctccggccggacggagtagttctctgcgactcttcaaaacaaaaaggaaaaatgtcatgatgagattcatacggtctccggtctgcgaagcaattttcttggccaagtaatgtgagacctccgcgtccaagagacccagtgaagtaccctccgtggcgaagtcagcgtcgagaccgtcctggttccggccggacggagtagttctccgcgactttaaaaaagataggttagcaattgagatatatatatatatatatatatatatatatatatatatatatattgcagtcttaagctgtgtaggtttgcaattctaagcctcggctaaggctccgcaagttgctccaaattccgagcctctctacggtaggctctgcgttcggagcccgtggtaggctgaattcggagccactcaaaaaaaaaaaaaactacgtacgctcatgcacatcaacccgtgcgttcaacttcggctggcctccggcgcggggcatgcctccacatcgagctccggcttcgaccttgtgaccccgctgatgcgcgataggccgtggctccttgccggctccacccaacggcgccgggagctagcgccgcgccgcgcttcggcctcgcgtggtgggccttgaggcgccgacaatgctccgcgtggactcggcctcgtcgcgccgccgctgttccatgcttcggccatggcgaaacagcgtcaggccccacgacgccgcttccgtgtcgtgcttagactgcttcgcggaggcttcgtccttgtgcgccgccgctgaacaacggcgcggctactagcgccctcaggccgtcagaagcacaagaaaaagaagaaagaaacagagaggtggtgcgcggcacagcatgcatcgcacatgcgtgtgcagccatcacgatcgtgtgctgtcctgcagtgctagctagaatagctaatacgtactgccagcatggtcaggatggaacccacaaccacgtcaaacttgacgaccacgcgccatgcaacgcgcgcgccggggtactccgcctcctgctctgccagcacactcgggaaccgccgcctccgctagccccgcgtggctcggaacgctccggagctgccgctagcgcgccaagcttcggccgctggtcaccgcgcccggcgcggcaagggaactccgtgcatctgtcgccgcctcggccagccggcatcgtcgcctccacgagcgccgcggggctccggccgtcgcggctccgtcgcccacgagcgcctccgctgagtcgacgtcgcaaccgcgcaaggctccgtcgcctccgcggccacgggcggctctgtcgcttccgccgttcgcgtagggctccgccgactctgtcgcctccaccggttgcgcggggctccgccgcccgcacatagctcggcgcggccccgccggcgcacgcgcctccaccgctcgttcgtggctccgcacggtcccacgccggcgcacgcggctccgtcgcttccgccggtcgcgcagggctccgccacctccatggccccgcgcggctgcgtcgcctccgccgccagtgctcccgcacctatctccgacgcacgcacctacgcgtagccccccgcgaagccatcctttgtgaggcggcggcaggcaacatgcagttgcatggtactgttcacgtagaagtaaaaagaaagtcgggactgcctatacatcatggcaccatggtatctaggtgtatgcatgcaatttaaatagttgtataaaaattttataaaatttggtaagatagatcatgataatataaaacactatacaaacatgcaagtctaaattcgattgatatatgaagaaacaaaaataataaattttatttgcactttacgagtactattcactgtctgattttattatttttgtttctctaatggtagatcaaatttagtcctgcatatttgtgtatagacttgtatcatcacaaaggatgttactacattttttcaatttttttataactatttgagtcacatacaaataatgagtgccatggcacctaggtgtagaaaaaccttgtctgatatattataggacaagtgacagattttttagcctcatatcatgcaaaggaatagaaaaagaagcctccacgttcgctctcatggcctagaaattctcacattaatcggagaaaaagaaaaagaagagtccatatagaaatacaatttagaaattgttgaaattcggaattgaaaaataaggaatattagaagaggagactagagtccatatagaaatacaattaggaaataactgaatttcagaattaaaaataaggaatattagaagtagagtatatagttcatatagaaatacaattaggaaataatagaaattcggatttaaaagtaagaaatattagaagtagagtatagagtccatatagaaatacaattaagaaaaaatagaaattcggaattaaaaaataaggaatattagaagttgttaacaaccaaatttggtaacattagcagcggagagaagattagatcgaagcaaagtcggaagcggagatcgagtttgaaaacagggtaggaatcggctgaagtccagatcggctacgacaagatcggctgagtctgagtcgagctaaataagccgatatagccgattccgacaatacgacttgtgcgcgacatcgggttcaagttaatgtacttcaagatgattgccacacatggatagagtcctggaaaggcaattgtatctattaattagaatattttatgtgaattccttatagataagtgtgggcaaaagtctgccgcaaagacttgtggtatcttagagtttgttagagataatggttgtgtccggtatgggcatatcttgtaatcctcgggtataaatagaccccgagccctatgtaattttgaacacacacattcaacataatttcggcgcatcgccaccctttttgctttagttttgtttcgacgagttcttgctttcgggttgagctgcatcgatttcgatcttcaacaagaggtaaaattcgtcgtgatggattgcgttcttaggattagtgcttccatcttcatgacactctaatcttgtttatttaattcatcaaattatcatatatcttacataatctctagcaatatcgccatctagactactatccgccaatatctgtatgcagaagacagccgattaggttagatcttgacgttgatctagattatataagatatctatcattctatgaaatttctagtggcttgattgtctagatattgttcttctttttatacttaatgttgcatcagttgagtttgatctgttaagtcgtgcttagaatatcgatctctagcctgccttctagttgccgattagaatagtatcggagtttcagccgatcgtatctgatttaacttcatttgttctatatgccttattgatatgttaaatctgccctttatgttaagatattgccgtatctaagtatgttaggcttttgctcaatatattatacttgctttaatatcttgatatagagtagtatcggagtattagccgatacatgctagatctatctgatcggctatgctataaacatatatagtcttgttattgacatatatttcgatctaagtgatttatactgtctcggcatgatgaccgatctatcccaatcacttgatttaagtagacatcgatataaggagtatatattgttaatatctacagccgatcgagtagatttagtccttttttacttattcatgactgccgatcgacgcacagatgacatcggctcaaagataaatgatatgtcatcggcatctagccgatcggctatcgtttataaatttaactacggtttctttgtttctatttcttgttgattacaggatcaaatcaactggcacactaatacatccgaaggcgaattttggacctgcactggagttaagcagatctcccaagccacgtgttttctgtcaacacgcttttggcacacccggtgggacctgattagaagtcagacgtcagtccctcctcatggccgagaaacagccaccgccaccatcaagcccaggttccgttaaaggcaaggcgccgaagccaggattgaccgacatcattgatgacaacgtcatg

SEQ ID NO: 18994 - DNA, 6868 bp, Oryza sativa
ttagatctgtgcagccgggtatggttgttcaggatgggtgggcctgtacagcatgggtgtgctgttcagtgttgattaaaatttctgattaattactctactgttttactactcttaactctttgctaaatgctgctttcgcaaatgagcctatattatgccatcctttggtatccttgtgcacttgcatatttgctgtgtggcttgttgagtatgtcatatgctcattcttgcaataatcatcaaacctcagttgaagataaaggatccagaaggagaagacgtttggcttataccccagttgagctgcctgtgggagtggagcttcgctagaccgtaattccgctgcagttttcttttcttttgtaagtatgtaacgctattattgatgattcagtatattaaattgtcagtttgtgtacctcggctgattcctggacgagggttctatgcacaaattagttcggaaattactagtgaatttccgggcgtgacaagttggtatcagagccatctcgactgtaggataagccaaatggtcaaaccttaaggactaattttccgaaaacataatttgtgaaaatttctcctttcttccttatctagaattctttgcaaattgtttcattgtctactctcctctctcgttcaacttgaagtagttctgaaactagtggttgaaacctgaagacgccaatgaggtctactgatggaggttaagtaaagtggatcgaggaagaactgaagtgccaagtggtcaagatggaatgaagtttggatcctgtcttagcacctataccgccaaagtaattttgaagaatagttagtagggtagaacgtttgttgtttgctttgtgtgtaggtatggttgcattcccatcattggagaagttcattgatgagtgtgtgactatactaggttgcttgcttaatcaacttgaacaatataatggtctacacacatcagatcagtgttaacctggttaaggtcttatctttagtgtaacccctctccttctatcctttctaatctgcaacagatggtgaacactcacgctagtggaagtggaaacaataacaatgaagagaacccaacccttgctcaagtgctggctcaacagacccaattgatcaacatgttagtgcaacaaatgcagaaccagcaagggaacagcgggtgtgtttcaaatgttacaagccagggcactttgcaagagagtgtccgaagccgaagcatcagcagccgcaaggtcaggtgaacaacattgttgtcacaggagccaatgcagtgccagttgcgtcttcatgagttgtgtcttcaagtgttacagctcagccaccagtttcaaagcggcattagttttctttaaagctttagaataattatcggagttatggaataagatagactgcagtttacctatgcctttttctttctagccgttccgaatctcgggacgagattctttgtaaggggggtagatttgtcacatcctgatttttgtttcaggatttataaattatttaataaattattaatagaatttatattaaatgttcattaatttacaagtgaagttaaatgtgggaaataaaatttcttaaatataaagcatggatggatttaatttttattaaattctccatggttaattatactctctggaattttctcggatttttcggagctcaattattaatttttatcttacaaagagcagttcagcaattatttaaatattaaattaatcattaaatggtctaattataatttaaatattaaattaatcattaaatggtctaattataatttttttaagtactttgagtgtccaagtattttcaggatttttcttgaaattatttgagcattggaagtatttttaacaattgaaagatcatttaagtgattattttaattggaaaaagtttttaaatccttccctaagtcgttgggccgattttggcccaactctttctctctccgcgcggccgaaccggcccaatcggcccagctgcagccgagccgccctcttctctctctctgtcaaagtctgtttgtggtccctccttcaatcgggcctagcataggaaaccacacagaaaagtctagtttgcctccctgctacagtgtcgtccctaacctccagccggctgcctagctgagcccgagccgcgcgccgcgtcgcctttccgcctccaagtccgctccaatccgaccccgtttcttccggatttttgaggggttttgatcctctcatcctcctctatcttttcccccaagaatcggagcaaatcgttgggtattttatccgaatcaaactcgttttcgagtttatctccaaaaccgagttttgattttcccggatcgatttcttgcgggaggagtccgatctcttcaatccaaggctataaataggaccccctagtcctcctctttcgtttgccccctctcccgtcctctcccgtgacccgtagagccgtcgccaccgtgcaagccgccgccgccgtcgcttcttcgtcgccggccgtcatccgtcgtcgttcgtcgcgttggtgagtaccatcgggttcgtctcgtcgtcctctacgtgtacatgccctccttttccgcagccggccgctctatctccggcgaggtcgccatcttggttcggccatgggtgatgtcagcatgacgtcatcggtttatctttttcccgtagattaaatcttcggaaaatcataactaaataaccatagatccgtttcaggtggttcaagttgctaaatttttctaaaataaagatctacatattaaaattatccataaattgaattaaatttatttaattctttttaaatgggctttaattagatttaatcttgtaaaattcataataaattcatttgaagtcagaatgaggccgttcaagtctcataattcatctaaaattatgatctacatgtttgtttattttttatatactgtttatttggtttttattagtctttttcttcgttttgcgtgttagcttgtcgtttccgtcgttgcgaaggttcgtgagtgcgtcggaagtgatcaagaagattaattgaagaccgattattgcaaggcaagtcacacagatcctaaacacaatcctttgagcatgttgatcctatatttaaattctctatttgtttcaactgtgcatttattttcgaatgtcaccgggtggtgtgaacctattcctttgttatggccaatttgcattgaatgccctattccttgataccttgggtaataaattgattagcttgaaccttatgtattggtttggttcagctaaaagttatatatataattgcttagcaatgcttagaaacattagctcactaatgggatgaatcatatatactacattattatttatggttatatttaatggtagctcacgatggttaatcgtgtgatgttaattaattgataattaaaacctggttaaggtgggttgtgagcatatggttttgatggttgtgctcatgacaattaaggaccggttcgcgagctactgttgtgagacattaaccgtaccaaccacaagccagcgtgggcaacggctttatcctttgtatagcatggttcattatagtgcgccagactgagaagtggcgagaagtccacgggggtcgctggggagtccatgccttgtttataagggggtgattatgatccaggaacggtgcactgttttgagttgtgttgtgcaaagggtattgttacgattttcccctttgcaatgccgtggtggtatttcggggcatggcaacatgtgtggaatcgtgtcttgtgggtacagtggtacacctctggccagagtaaaactattcgaatagccgtgcccgcggttatgggcgagttgagcaatgtttttcgtgattagtctcacacctctcacaataattattgatgattaactggtaataatttgcttagctcctggtttggagttagatctgttcagccgggtatggttgttcaggatggttgggcctgtacagcatgggtgtgctgttcagtgttgattaaaatttctgattaattactctactgttttactactcttaactctttgctaaatgctgctttcgcaaatgagcctatattatgccatcctttggtatccttgtgcacttgcatatttgctgtgtggcttgttgagtatgtcatatgctcattcttgcaataatcatcaaacctcagttgaagataaaggatccagaaggagaagacgtttggcttataccccagttgagctgcctgtgggagtggagcttcgctagaccgtaattccgctgcagttttcttttcttttgtaagtatgtaacgctattattgatgattctgtatattaaattgtcagtttgtgtacctcggctgattcctggacgagggttctatgcacaaattagttcggaaattactagtgaatttccgggcgtgacaccagccaatgaaccctcggttgttaatgagggaacatccacaacctactgggcagattgcgaatcaaccaacccaagatcaagttgctgccatgcttttgccacctccacctattgttgatccagtgcagcagcagccgattcagcagacatcaccaatccagccagttgtacagccgatccaacaacaggtcgtacaaccagctcagcaaacaccatcaaggcagcagcctctgcaactgattcagcagacgccaccaaggcagcggcttcagccgatccaacagactccgatgcgacagcagatcgttcagccgattcaccacccggggtcggcaaatgcatcggcagggtttgcagcacctggtgggcaacctgcgcaacaatttgtaaaccaggtcgtcccagagcatttggttcaccatgcacaaccggatggcacggtggtgtctcagatggttcctaagcacttggtacgcaacatccagtcgaatcttcataactaccaaggaggtaacttgagctatcaatatcagcctccttccccgcaagcccaatatcagccggggggattggctcagccccagttcgcacctcagtttggtcaagtcgagcccatgcagcaacaaccacaaggagcagctcagcaacgaccatgggccgatgtgatcgcctgtcgcgaccgagaaaatttgcattttcccgaacgctagtgtattaatccccgtcccaggaaaagctggggtacaccacacaaacatgatacaaacggcacatctttattatatcgataatatttacattattacaaaggcacttcaagcctgacaatcaaaaataaacagcagcggactagcgggccaacggctccatcttcacaggcgctcaactggggtataagccaggactccacctaagacttcttctccaaagcttctcttactgaagggggggaagatagagcaagaatgagtacaaccacagtactcagcaagtcacaccgggagatgcatgattaatgcaagggaaacaaggggtaataatataggggattaggttttgcagtaaacagcatttaaaagacacttagttgcccatagctattttataaagacgatcctagagctacacagtattattaatcaaggccgtggacccacacgaacctgccttaacccaaggcctacgatgattcagaccaaactggcaacccgacctaggtcccagctcgtcccaagccaacccaggccaacctttccaccttttagttgttaagcaatttttaagaattaaaccactaacttgggtacattgctaggcttgcccatatccgagggcacggctattcgaatagatttactctgatcagaggtgtacatctttacccacaagacacatctttactccgcattccatggccttggaacccgtcgtaaacatgtgacataacccttcacccatcctagccgtaaacaaaagtaccgacccaaccctgcctacggccgatatcccgggacaggcaggccaggattgagcccctagcaacaggatctagaccgggtgcgccacacccataggggtgagaccacccgtgtactagtccagtgccatggcatctcgactaacgggcaccgacccgtgtagtcttcatttgcctagacatctcgattaccgagccgcagctcgtgtagccttcatttgcctcagagatatccatcgtcgcaacgacttcatccatctctatccgtgtctttttgttcaggactagactgagcaccgagttaagccttacccattagacatgtggttatagtgctttgcaacagaggcccgaagaccggtccttatagtggccgaggtgctactagcaaaaccctgcacctcgagcccaacctaaaaccattttggggttttgaatagaggggggaggtgtgtgttcaattccatcacaagccaaccattccacagtgtccaaatgatatgagaattcccaaagtctaaagttataaaaccacctaatgttgcctaattagtcagcgaagcatctacctagattcatactagtggaactgttaatagagtacccactagttggggttttgtttatcctagggtgaacaaggtaataataaacaatagcaatgataaggctataacaaggattaataggaagtgctaaataaaacagtgattacgcgggaatttaaataaagcggtaatgcaataatttaaatcaaaataattttgtaaagtgggattcaatatgctcaagggtgatgtgacttgccttgctcagagagaacagccttccgaaccttcggcgacgaccgcaaaccacgcttcgagaaccttcggaacgacagaagctacgcgaagcacacaagcaaagctacaagcctat

SEQ ID NO: 18995 - DNA, 1148 bp, Oryza sativa
ttttcgagacaagagggcgtgtcgacttatgagcacatcagccgattccttgctcagtgcggtgaagcatcggctgtagacaccttgagagttaggttgttccggttatctctgtccggatcagcttttacttggttttcctctttgccatatgggtcgatcaatagttgggccgatttggagaagcaattccacagctatttctacagtggggtccatgagatgaagttatccgacctgacagcgatcaagcagcggcatgatgagcctgtgcacgagtatattcagaggttcagagagatgcggaacaagtgctttagcttgagtctgactgatgctcagttagccgatttggccttccagggtatgattcctccaatcagggagaaattttcatccgaagacttcgatagcttatcgcatctgatacagaaggtaaccttgcttgagcataggtcggcggaagtcaggaaaagctcaaagaaagttaatcacgtttgtccatatatgtatgggtcggatgacgaagaagatgattctgaaatagctgcagccgaatgggtaaggagcaaaaaaggttataccatgccaatgggtaaagagtcccgggaaagaggagaagtatgactttgatatcaccaaagctgacaaaatttttgatttgctactccgagaaaagcagattcagctccctaccgatcatacgatcccatcggctgaggaattaggcaagaagagatattgcaaatggcataattctgggtctcattctactaatgattgtaaggtctttagatagcaaatccaggttgccattgaagggggaaagattaggtttgatgattccaagaagccgatgaaggtcgattggaatccttttcctattaatatggtgcatacagctggtcaagcagccgatagagcccgtgcaaagggttttcaagtaaattcggctaagattatcaacaagtatcagaagaagtatgacaagcagcaggagaggagttatgaagaatacgacgatggttttgatcctcattggggttgcgagttcttcagattctgctggaatgaggggatgaggttgccatccattgaaaactgccctggatgcagtgatatcatcgagagctcaagccgcacacata

SEQ ID NO: 18996 - DNA, 1149 bp, Oryza sativa
agatgttgcaggacgctagggagaactgcgaaagtgaaaaggaggcccataaattggacaagatgttggaggaccacagaacttcgttgtacccaggttgcgagcaggggcacaaaaagttggataccactctggagttgttgcaatggaaggcaaaaaatggggttagtgacaaggcatttggcgatttattgaaactcgtcaagaacattcttccggggggaaacaaattgcccgagacaacgtacgaggctaagaagatagtctgcccgttaggactggaagttcataagattcacgcatgtccgaacgattgtatcctatatcgcggtgaggagtatgagaacctagaagcatgccctgtttgcaaagcactatgatacaagattagacgggacgatccaggagaagttgacgggcagctaacaaagaagagaattcctgctaaggtgatgtggtatttccctataataccacggctaaggcgtttgttcaggaacaaggggaatgctagaatgttgcgatggcacgctgaagagcgtcaacaggacgggatgctgagacaccccgccgatggttcgcagtggcgaaacatcgacagaaaatttaaagaatttggaaaggacgcacgaaacatacggtttggtttgagtacggatggcatgaatccttttggagagatgagcagcggccatagcacttggcccgttacgatgtgtatctacaacctcccccctggctatgcatgaagaggaagtacataatgatgcccattattattcaaggccccaagcaacctggtaacgacatcgacgtgtacctaagaccactggtcgaagatgttaaacagttgtggaagaaggaaggtgtccccgtgtgggacgaggacaaacaggaggagtttaacctacgagcgctgctgttcgtaaccatcaatgattggcctgcacttagcaacctatccggacagtccaacaaggggtacaaggcttgcactcactgtatggatgaaacagaaagtacgtatcttaagcactgtaggaaggttgtatacatgggtcatgtcgattccttgcagcaaaccacccggtacggaagaaaggcaagcacttcgaacataaggctgaccaccgtacgaagcctaaacat

SEQ ID NO: 18997 - DNA, 3172 bp, Oryza sativa
attgtgtgtttgcatggtgttcctaagaaaatagtatccgatcgaggtagccagtttacttcaaagtgttggaagaagctttaggaagagatgggttctaagttgaatttcagtaccgcttatcatccgcagacagacggacaaactgaaagggtaaatcagattttggaagacatgttgagagcttgtgctttagacttcggtggaagttgggataagaatctgccttacgcggaattctcgtacaacaacagttaccaagctagtcttcaaatggctccttatgaagcactatatggtcggaagtgccgcactccgctgtcgtgggatcagacgggagaacgtcaggtttttgggaccgatattctgagggaagcagaagagaaggtaaagatcattcaagaaagattgtgtatagcccagtctcgtcataagaattatgctgacaatcgccgcagggatttaagttttgaggaaggagatcatgtgtaccttcgtgtcacgcctcttcggggagttcatcgttttcacaccaaaggaaaattggcaccgcattttgtgggacctaataagattgtcagtagaagaggagaggtcgcctatcagttggagttacctcaatccttggcagatgttcataatgtgtttcatatgtcacagttgaaaaggtgtttaagggtacccactgaagaagccaatcttgagtagatagaaatccaagaggatctgacatatgttgagaaaccaatccgtatcctggagacagatgagagaagaaccaggaatcgagttatccgtttttgcaaggtccaatggagtaatcactcagaagaagaagctacttggaaacgagaagatgaattaaagtcagctcataagcatcttttcgccagctcttccgaatctcgagaacgagattctgtttaaggggggtaggtttgtcacaccctaaaaatcctgaatttataaattgttgtttaaatggaattattagaaatgatttaaaaagcctagaagaaaagatctaattttaaataataaattccaatataaaagtgggctagataaaattttattaaatacttctatagttcctagatttttctggaatttatttgggccaaggaaatatttttaataaatggaattgcatttcatgaataatttaaaaaagaaaaaggttttaaaaatcttcttttggctttgggccgaaagtcggcccaattctctccctctctctcctcggcctgcttgcgcccggcccaaccagccagtcgagccgagccgccgctcgcgctcctctctcccgctgacaggtggggcccacctgtcagggccatcgtcttcctcgcgccgcccagccgcgccctaccgcgcaagccgccgccgcccccttccaaaattcgcccgcgtctttatatctcggatcaaatcaatagaggggaaatgatcctcgggatccccctccttccttttctcttttgaatcttcggctaatttcgtttggaaatcgttgaattcgagcttgattcgaattcgttttttcctcctaaccctagatcttccatcgccgttgccggcggccgtgggcctccatcgctgctcctagcccctatataaggacccccgggacctcctcttttcgtcgctacgctcgcctcagctcgccgccgcttgtagcaccgcctccgcgacaacccgtgcgccgctgtcgccgctgcgagtccagccatgcgccgccgccgctccggtcgtcgtcgtcgctcaggaaggctgccgtcaggttcgccaagtcgtcgccgtcctcatcccatcctccgtttccaccgaggaccgccggagcactgccgtcgtcgtcgacccgaacgcctccgccgcttcgacctcgtcgccgtcgccgtccgttgccgtccgccgttgtccaagctctcggtgacttcaacgcgtcgccctctacgcgtaggcgccctccgtttgcgccgccgcgccgtcgttcgccggtgagcgtgagttgccgagccgccgccggtgatgacgtcatcgccgtgtcatctgtagacccgtggtggattagatcgatctcggccgttcgttttgtctagattagatctcggccgttcgttccgtagaccgtccccgtgcacctggtccaccatgaacccgagcccgctgacgcaataaatcatttttccttttcaaaaataattctttattccgtcataattcaattaaaatctaaataattgatttaatccgatttaatctttaaaaactcataactaattcatcttagctcggatttagttggttcaagtctctaaatttttctaaaattgagatctacaggttaaaagtatccacatgtactgttcatgattgtttatgtgctgttttggtgattttgctcttttatgcttcgattccgacgttcctggagagtccgattttgcaggagaagactttgaagagttccaaggccaacaaggcaagtcacacatatcccaaacaatcctttgagcatgttgatcccgtttaaagctattgtttctattcaactactgcatttattttcgaatgtcattgggtgggaataacctattgcctttgttatactttgtcgtttgattaataattggattagctagaacattatatagttttagctaaaagtgcataggatgcttagccatgcttagagacattagctcatataaatgggataacttatgattcactattatttaatgatggcttaatgatagctcacgatggttaatcgtgattggttaattaattaatttgccaactaaaacttgataatggtgggttgtgagcgcatggttttgatggtcgtgctcatgacaattaaggaccggttcacgattttcggttgtgaaacattaaccgtgccaaccacaagccagcgtgggcaacggctttactttttatatagtatggttcattctggagcaccagactgtgaagtggcggagataagcacacgggggtttctggggagtctatgccttgtttataagggggtgattatgatccaggaatagtaaactgctttgaattgtgttatgcagagggtattgtcacaatctctattcgggtacttgttaagtatcgcgacgcatggttgacatgatgttgaggttgtgtcttgtgg

SEQ ID NO: 18998 - DNA, 6830 bp, Oryza sativa
tcttaatgccactagaatttcaccaattcccttatatgcacttaaaattggcttctcccttatatgccactagttcaagtttttccacccttttatgccacttccaccactatagtgttagttgactgttagtcaaaggttagtttttttcataaatgaccaatatgccctctcaactaaaaaatgtgtaaacttcaaaaaaatcataactagtttattttaaatcttttttaagtgaacaaaattttgtcataaccagtgaaaaatgctctttatattaaaaatattgttggaaaactgcatgtttcatgcttacattgaaaatttatttgtgatggtaatggtaatggctaaaattgcatgtgatgcagaaaaaatcaattttcatatgttatatccagtagctatattagtactaaaatacctattattggttgtatactaattctcaagggcaaatgcatctttttacaatcaagttaacggtcaactgacggtggattgacggtaatggcataaaagggaagagaaacttgaaccggcggcataaaagggagaagccaatttaaagtgacatataagggaaccagttaatttagagtggcatataagggattctctctatatacttatatacttagtacactagaaaagcatatactggtaagaaaaaagttaccgccgctcaggaaacggcgagatggatgatggcgccggaagcaagatctatgcatgcatccaaagaaaattaattaaacagaagttcacaatcatatttggaaacgaatgatttggtgcatacctatagagatctaacaagaaaacaaaaagaaaacagatccatcttcttgatgatcgatgacgttgctgtatgattcagcgagcagatcgatcacgccgtcgcctccggcttgccgatgggctgcgctgtggacaccattgccactggatcgtgacgtcggctccggcttgctaatgtgactgcatcgtagatgcagaaacgccgacagatcacaccgtgaatgtacgccgaattgccgccgcggacgccgagtcgcctatcgatctcacggtcaccgccgaattcgtccgtaaatcaaggtctcgccctgggatcgatctgtggtttgatttggcaccaccgtctacgaacgagagtttttaaaagtggttttcacggttgttcggatcgctatatccacgaaaatcaaaacgggtccggtagttagacccagtaccaggtttgatcgggactaggccgctgatgtacggtggatgagagcaggagtacgtacacctgggtgtatatatatatatagaatcggatctctcttttgtactcccaggtgtatgtactatcttttcttaatggatatccattagttcaaaatgaataattagattaaaaaaagaaaacaccattctttttttcaaattatctgcatgcaacggctggtgcgtaggactaggttaaaaaaaattaatggtagctcgttaggagtatatacctttttttctcattataagtatatacttaggctgcttgttgttagaagtatatatacttgttttgcagtattagtatatcctttttttttaagtagtagtagtacataacttcttttttcatttagtaccactatacttaggctgcttgttgttagaagtatatatacttgttttgcagtattagtatatccttttttttaagtagtagtagtacataacttcttttttcatttagtaccactacataccactttttaatttaatgtcagtacatgtatacctttttttccggatatattatgatatcttggaatgggtatatactgattttttcttggatgaagtatatatactgatatcctccctgaatgagtatgtactgatcttcccttggaggaagtatatatactgatctctttttgagtgagtacatacttatctcttctaagagtgagtacatacggatctcctctgagaatgagtatatactgatcttttagattagtagtggtttatatttctttttaattagtaagtggtatatgcctcttcttagtcagtataatttttttttaatcagtatatactacattcctgagaagtttatatacttctgtttgatctgtatttactgcgtttctcattgaaggagtatatgctagaacgttttttagtcggtatatgctagtattttttttgtttggtcagtacgtacatactatttttacctggtagtatcaacgatcaaagaacagtacgtatataccactaagcagtgcatgctgtttaaacaaacgagcagtgtgtaatcatactgattacaataacgagtggtatgtaagatataatcgattaagaagtacagaaggttaagttataatcaactaagaagacggtaacagtacatagatacaactgagattaagaaaaagaaatcatagctacagaggaaaaactgcatcactgcatcgccatcgtcgtcagactataatcttaagctaagctaattgttacatctctaccagaaaccaaatcacaatgggagatgtgcgtacatgttcgtatctgcggtcttccaccgttgccgcgtgattcattagctgggaataactctacaaactggcatcatcgtgcatggtcgatctgtggcagccgccggccgaatcgttcgattcgtttgcctcgaccagccgtactgattttagttggaggagagttcgcgtttcttgctgcggtagtggaactgtggaagccgccgccgaccctgatactgttgccatgggaatcctgcgaaaggggagtaatggatgtaaacaaccatcaatgataattcaagcattgaaaggacgtaaatctagtcgatcggcaccatcgacggggagcacaacccaactacctgatgtcgttgctaatcccatccgtctgaggactgtatgaggaagcgggtggtcgaactggttgatggagcgcgccgtccacccgtccgtggctgccgtggcaagattgctccagttcttccaccgccggcggacttcgcgacctccaaccaagctaccgtcaaggaaccgtcgccgcctccgcctcgcgtcaaaccgcaaatgtcgcgagagctgttcgatctgttgagtactaaccggtgcgatttatataattaagcgctaattaaggatcatggattattattttacaaaaggaaaatcaaaacgggtccgttcggtgatccgctaaggagcttcatcgagatggctgtgatggacggtagatggaaccgggtgtacgtactcccgggagtacataatcattttcatatatatatatatatatatatatatatatatatatgacatatattaataatatgtatttatacatatatctatgcatatgtacatgtacaaaatagacatatatgtatatacttaacattttatgtgcatatataatatatttacactaaagtaaatgtgtacatatataaatatagatatgtattacaattcattatgtcctagctacgacttcgacgtagtcgttatctcagaagttaacgacttatgaattgtagatccgtcgtagtagaattcaccctcgggatcaaggacttgttcattgatgaatcccatgagttgttcttgaacagccgtgataaagtcctcgtgtgtgaggttgtccctcatgtgaataacctatgaatgtatgaagttaattagtaaacaagaaatcgatacatacgcaatgaaattttgaatggtttatttatacgtacatcgagttctcttgtggtgatgatttgggttgtaacgcagtggcaatactcgcatatgtagtagccgcacaagttagttccctcttcctgttttgcacactatatacatgacaaacgacgagagattttatatttgaattagagattcgatataaattttgatcatgtactcactacaaatttgaacctccggcgaagtttttctttccaagtgccacggaccaaatgacggaaccgataccaagccctacatgaagtttaaaactatatatgattcgtactagcaatagcaaaattcgtaataattaataacactggaacatatgacattacctgtttataagttcaaaaatctggtcaaaagtagactcatctttattcattgagtcatagacattgactctacattccttcaagtcgaagagtaaaaggacccagtggaatatgcaatttgtgtgagatgatatatgaaacactgtgcatctatatgtacgggaacgaaatttgttcggtagatagtaaaaactaactctgtgttgtacggcagtagtatgaacgtcttgaaatgctgctccttgaggagatggacgagattgacctctgtgggttgcggatacttggtgaccatttcgacgtttactttccgagggtcgatgaatccagtattgaaaaacccccgctgtcgagccctttgaatctccattctacaacgatgaaggaattgttatatatggtgtacatatatacaaggagctaattaaaggaacgtaagaaatataactcaatgatatgtacaaaatccatgcgctcagaatagagacgtcgagggcatctagttggtatagttcgtagatatccttgaaattgatccagagaacatcttctccttgtaagaagtcggagttcttgattctcgctccaataatctccctaccgctggcgctcatctccatgtaccattcatggaattggtacatctgtgtgggtagggactgcagctgctcaggcttgacaagcggtttaccaagttcgtcaaggtgtctcacttccgcctttggaggtgcacctctaagtaactgagccctagttagcccgatatcagaaatgaattcttttattccaatttcttgcccagtcaccaatggctcgacctcctggtttggttgctctccaagctgagggacttttttggactttctataatatgctttcctaagtgttcgctcatagtccgttagctttaaggcctgcttgagtggtcccgacatcttctggaagaacttgttggcactcgggtctataggaatctgcttttctggacttcgaggcttcaattatctcttcacttctacagccacataagcgtcaagctcctcttgcgtgcaatcgtacggcggctccttgttctcggcggcgtcaactttcgccttcttcattgcccttgtgccggcaggcagtggagcttggtgagttcttgacttagaaggtgccggaggacacggcgcaggagcctgatcaggaggagacggtgcaggagcctgaggaggagacggtggagccggaggggatggtgcacgagacgccgcttgtcgcccagggaggatgaggtagcgcttgcgccatagtataatggcgtggcttgtgtcacgtagatgcgtctcaccgtctcctccagggtagtccaattcgaggtcctcgtacgtggcttccaccagctcaacttcgactctcgagtatcctgcaggaatcggcctacagtggtaagtccctgaagggtccgttgggatggccattcccgacacaaccttcacgtgatgagaggttatctattagtaatcaacctaagcagaaacttgcggaatgtacaagtccaaaaaacataaactacgggcataccttgattgataagttcttgaagggaatatgcagctcacgtggtgtctactgcgtgatttcatcaacggggcaggtggttacgtcctgagtttgcatagcatccatgctctgtgatcctacctgccccgttgggtcatggatcaattcaagttccttcttataaacttgtttatggacacgaagcggttttgccatgggaaactaaaatcggctccagacgattagatttacaagacagtttagcagccgatgagtattacaatctcatggtagatgaaacagaagatttggtccaatccagattgagagcccttgccaaggtgagtaaggataaggaacgggttgctcggcattataacaaaaaagtggtgcctaagtctttttctgaaggagagttagtttggaaattgattttgccggtaaggactcgagacaacaaattcggcaagtggtcacctaattgggaatgaccatttcaaatacataaggttgtgtccaagggagcttacatgttgcaaggacttgacggtgaggtttattgtcacgaccggaaataacccaacgggcgttcctgacgtgcgtgcattaatccttgtcccaggaggcaaggtacaccaaaagttgatacaattcagagtttaacaagcggaagcgtaaatagttaacttattacatgggcagcgaaggcccagcacacacagagacaaacgataaacagcggaagactagggcgacgaccacaggcgcttgacggcaggcacgagctagacaccaaagccttcatcttcaaggagctcctcttctgggcttgggaaaaattgagcaagactgagtacaaccaccgtactcaacaagacacacccacaaatgcagaataaatgcaagggagtacaagggaattataccataaagggttagggttgcagtaaacagcatttaaagacatttagttgctcaaagctattttgtaaacgcgatcctagaactatacaatattatttatcaaggccgtgaacccacactaacctgccttaacccaaggcctatgatgattcaaaccgaactggcaacccgaccctgggtcccaactcgtcccaagccaacccaggccaacaattccaccttttagtagtaagcagggtttaagaaatgaaacact

SEQ ID NO: 18999 - DNA, 1065 bp, Oryza sativa
ccggaacccccgggacaggcaggtaggactgagcccctagcagcaggacaccggccgtgtgccatgacatctcgactaccgggccgcagctcgtgtagccttcatttgccgtggagaatgtccatcgacccccgacttcatccacctccatccgtgtacttttgtttataaccagactgagccacaaactaagccttacccactagacatgtggaagtacggtagtgctttgcaacagaggcccgaagaccggtccttatatggccgaggtgctactatcaaaaccatgcaccccgcgcccagcctaaaaccattttggggattttgaatagaaggagcggtgtgaagccaattccacaataaccaaaccattccatagtatccaggtgatatgaatatttcccaaagtctatagttgaaaaaccacctaatgttacctaattaaattgcgaagcatctacctaaaattaaactagtggtgccatgagtagagtgtccactagttgaggttttgtttattctagggtgaacaaggtaataataataacaataacaataataataaggtcataacaaaggtaaataggcatggctaaataaaacagtgataacgcgggaatttaaataaagcgataatgcaataatttaaatcaacataattttataaactgggattcaatatgctcaaagatgatgtgacttgccttgctcgctttcccaaacgtcggcttcaacttccacgaagagcggatcttccgaagctgcagcgtctacacgaccaatggaaaagaaaaggcttttactctaataaactccatataacagcagaaacaaagcacaaaaatgggttcttgacttcttaaggaaaaattagagacttgaacggtccaattccgagttcaaatggccaagttatggccatttgaagtttatatgctctttaaatggatatttgcgaatttcttcatttaaattttaattaaaaatcgtatttattgcgtcacccgagggaaggggcacgcgggccggatccacgggggtggggcccacgcggcagccccacgg

SEQ ID NO: 19000 - DNA, 1210 bp, Oryza sativa
cctcctctcccgggcctctcctcctcctcccggcccacctcttccctccccctcccggcccagctccctcccctcccctctctctcccgggcctgcctctccctcctctcctcctgggccgcctccgggcccaagccgagcggcgccctcccacccgtgccgcgcacgtgcgtgcgctgaccgcgcgcctggccgcgtggggcccacgcgccggtcgtcttcctcctcccgcacgggctcttctctctcccgtgcaaacctagcgccgttcctcctccaaatccgccccaatcaagccggctctttccaaattaattggggggttttaatccccattgattcctcttcaattccccccaatttcccccttgaatcgtgcccccaatcgccgggaacggacgcgccaaccccggtcaccttgcaaggccgccgggcgcctattccgccgccgttccccgcctctcccatggccggctccctctcctcccctataaaatggaatccccatcctccgttctatcgttttagccccctcccgcgttctcccgtggcctcaccacccctccccgccgccgcccttctctttcccccgcgccggcctcctccagccgcctctccctcctcgcccgagcgccgtccggccatgccgtcgccttccccggcgtcgcagccgcctcctcttccccggcgctgcctccgattcgtggggaaatcatcggagacgcgcccccgccggcgtccagtggcgtcgccgccactacaccgtctctggccggctgctgttcgtcgccggtacgccgaccgacgtcgccgtctcctccgtcgacgtcgcagcgtcgtcctctcctccggctgctcctcagtttcgccggaacaccgccgccgccgcgccggcctctcgtttctcctcgtcgacgtcgccttcggtagccccttccgccgtgcccgtgcgccggccgacgtcgccatctccacctccggcatcacagcggcaaggtcgccctcggcctcgcctcccctccacccgaacaccgccggtgtctgtcgtcgttttcaccgttcatcctcgccggctcgtcgtctcgcggcgccgcctccgtcctcgtctccgtgcagccgctgccggctgccatcgtcgtctcctcgccgtccccggtcgtcgtcgtcgtcgtcctctcgtcgatcccggttttgctcgtcgtggcgttcg

SEQ ID NO: 19001 - DNA, 4373 bp, Oryza sativa
agggctcgtgcccaagtcccagtcctcgaatggctcgggtcggggctagtgcctggggagatccacatgtcgagactggccagcccgggaacgtggtgaccgaggggtatgggtgacccgattgtgggtttttgtcgattcccccccggagttcaccacgccccggggcacggctcggttctgggccccgtttggcgattttagctgaccggaccgaacccccgatggcaaggttgagtacgagtgaccttattttaagccaagattcttcaaaaggaaagaacagcacagacacaacctttaggaaattgaaactgcttctattgaaatgttgaaaaaagagaaataagaatgtaatgcatgtgtggtagcccccggccaaccctacacacccgaggggggtgcggggttggcctgagccaaaacctgacacccgaccccccctcctcaggggtagaagcgacgaaggtgttcgatgttccatgggttaggcagctccgtgccgtcgcccgtggccagccgtaccgagcccggccgggggacaccgatcactcgatacggaccctcccacattggtgagagtttgctcaatccagcacgcgtttggacgcggcgtaggacgaggtcgtcgacgcagagtgatcgggcccggacgtggcgctgatggtagcgccgcaagctctgctggtagcgcgcggctcggagggccgcgcgccgccttcgctcttctaagtagtcgaggtcatctctgcgaagctgatcttgatcagcctcgcagtacatggtggcccgaggagacctcagggtgagctcggatgggagaaccgcttctgcgccgtagacgaggaagaaaggcgtttccccggtcgctcggcttggtgtggttcggtttgcccagagcaccgctggcaactcctcgatccatgaatcgccgtgcttcttgagaatattgaaggtcttggttttaaggcctttgaggatttctgcattggcgcgctccacttggccattgcttctggggtgggcaggtgaggcgaagcagagcttgatgcccatgtcttcgcagtagtcgccgaagagttcactagtgaattgggtgccattatccgtaataatacggttaggcactccaaaacgggccgtgatgcccttaatgaatttaagagcagagtgcttatcgatcttgacaaccggataagcctcgggccacttagtgaacttgtcgatcgcaacatacagatactcaaacccgcccggggcccgtttgaacggtcccaggatatcaagcccccagacagcaaatggccatgacagtggtatgatctgcagggcctgggccggctgatggatttgcttggcgtggaactgacacgctctgcatcgccggaccagatcgactgcatcattgagagctgtcggccaataaaatccttgacgaaaggccttgccaaccagggtgcgcgaggcggaatgggctccgcaatcgccctcatggatgtcaacaagaagctcaacgccttgttcctgaggaatgcacttcaggaggattccgttagccgcgcgccgatagagggtcccttctaccagcacatagcgtttggaaatgcgttgtacgcgttcactcccttcgcggtcctcaggtagagtcttatctgtgaggtatgtttggatctcagagatccaagcaatcaatctaagggagcttggagcgctcccttcgggtcccgaggcctggactccgacgggcctcgggggccggtcaggcgcatccgtctcccctaaggggtcgggtcgcgccgacggctgggtaagcctttcttcaaaggcgcccggtggggtctgggctcgcgaggacgcgagccgtgagagttcgtcggctatcatgttatcccgtctgggcacatgccgaagctctatcccgtcaaaatggcgctccatacgccgtacttggcgcacgtaggcgtccatctgcgggtcagagcaccggtactccttacagacttggttaacaaccagctgagagtcgcctaacaccaggaggcggcggatccccagcccggctgccaccctgagtccggcaaggagtccctcgtactctgccatattattggtcgctcgaaagtcgaggcggaccagatatctaaggacgtctccggtcggggaggtcaacgtgacccccgcaccggcaccctggagggacagagaaccatcgaactgcatcacccagtgggtggtgtgaggcagctgcgaggggttcgtgctggcctcggggattgagacggtctctggagccggggtccactctgccacaaaatcggcgagggcctggctcttgatagcgtggcgtggttcaaagtgcagatcgaactcagaaagctcgattgcccattttaccacccgtcctataccctctcgattatgcaagatttgaccgagggggtaagacgtaaccacagtgaccctatgtgcctgaaaataatggcgcagtttcctcgaggccatcagaatagcgtaaagcatcttctgggcctgagggtatcgggtcttagcgtcccggagggcctcactaacaaagtagacaggccgctgcacccttcggtggggctgatcctctctgctaggggccgtacccccggggggttcttcgttcaagtggcctttgggggcgcacttgttttctgtgccgatgacctcggggtcggaggatgaaaggggcggccttccctcagtggcctcggggccgtcctgggggtcgggggctcctggcatcgtcggacaagcgggcaaagggccaactccggtcgtcaggggcctctggcctccgttcggctcgggggcctcttctccctgctctttcccgggtcgagtcagcacagggttagcctcggggtcaaagggcgttaagtgtggccttcccgcagtggccttggggccctcctgagggtcgggggcacctagcaccgtctgacaagcgggcagagggccggctccggtcgtcaggggccgtaggccaccgtccgactcgggggcctctcctccccgctcgctcccgggccaagttagcacagagtgggggtgcacgaaatgaggattgtcttcatcgcgtccacaaccaatgctgcactaactacttgggggttcgccgctaagtaaagtagcaggggctcatttggctccggggcgactagaaccggggagagctgagatatgcctttaactgagtgagggcatgttcagcttcctccgtccaagtaaacggccccgagcgcttgaggagcttaaacaagggtagcgccttctctcccagccttgatatgaaacgacttagggcggccatgcaaccggtgacgcattgcacatccctaagtttgctgggggggcgcatccgctcaatagctcgaatcttctcggggttggcctcaatgcctcgggcagagaccaagaacccgagaagcttgcccgcaggtataccaaacacacacttatcggggttcagctttatgcgggcggagcggaggttctcaaaagtttccgctagatctaaaagtaaagtttcttggttgcgcgtttttacaaccaagtcatcgacataagcctcaacattacgtcctatttggctacccaaagaaattcgagtagtacgttgaaaagtaggacctgcattctttaacccgaagggcattgatgtataacaataggttcctacgggggtaatgaacgcagttttttcctcatcctccctagccatgcgaatctgatggtaaccagagtatgcatctagaaaacacaaaaggtcgcaccccgcagtggagtccacgatctgatctatgcgaggcagggggtaaggatccttaggacatgccttgttaaggtcggtgtagtcgatgcacatccgaagcttgccgttcgccttgggaacgaccaccgggttcgccagccactccggatggatgacttcacggatgaatccggcctccagaagtctcgccacctcctcgcggatgaaggcttgacgttccggggcctgccgccgcactttctgccggaccggccttgcgcccggccgcacggcgagacggtgctcaatcacctccctggggaccccgggcatgtccgctggtctccatgcgaagacgtcagcgtttgcccgcaggaaggagacgagcgcgtcttcctatttgccatccagaagaccaccgatccgtgtggtcttggatgggccgtcgcccaaggcaacctccttgaccgggacctcgtcgcatgtggcaatccgctgcctcggggcggtgggggcggaagtgccaagcctctcgtcaccaccctcgggcttggtcgccgcagcgaggtggtccgcacgctgctccatgcaagcg

SEQ ID NO: 19002 - DNA, 2509 bp, Oryza sativa
ccaagtttttgactgcgcgacagtccgcgagatcgtggagggaggtgttgtggacggagcaccacttgctggctgggcgctccctgctgggagtaccagcctctttctttttgtcgctcgcaggcctcccctttcgggtggcccgcggagcgccctcgacggcgaggacgtgaccctcgtcgccggaatggaccgaccttttcttcctcctcctgtcacgccgccctgtctgagcggcggatccgggggcggccgaagctgccacaccggaactgaaggggttccaggtccaggcctcctccttacgagccactcggtccgcgagctgaaaaagctctgcggtagtctggggctctttggaggcaatcttttcgagcatgcggttgtgccgcacaccccccctgaacgcgtagatcaccgcgtgtgcagggatgcaaggtatagtattgcggacttggcagaaacgctgaatgtacgagcgaagggattcatcatcccctcgctgtactgcgtgcaagtccgcttcttcacctgggcgtggataggtgccttgaaagttcatggtgaactgctggcacagatcctcccaggagtggaccgacgcgggtggcaggttcattagccaaccccgcgcctgtcccttcagggccatgggaaagaaattcgccttgaccctgtcgtctcccccagcggcctcgatcccggtcgtatagacctggagaaactcggtggggttgacgctcccatcatacttctcggtgatggtgggccggaaccttgggggccaacggacattccgaagactcgccacaaaggctctacagccaacaccaccaaccgggggcacggagggctgatcctcacgtccatgtcgaggtgacaccctggacgaagaggcaccctccgttgcgcggggagtacgccgatcactacgtcggcgctcaatgtcgaggcgggcatccggctcttcatgctgatcctcccgagtcggaggcgccgacgagggagtggtagccgaatggcgtgcagcggccgccgctcgccgcgctctccgtcttgacgacgcggaaccggtagtggcggcgccggaggtcttggtggtggcggaccgtccgccagcacccaggcgttgctgtgccgtcatgaccaagttggccacgtcgtccagccatcgctgggctggagactccgggtcagggacgacaggcgggtgacgtaggagcgcgccaacagcctgaagcgcgccttgaggcgtgctgcagtcgccgtagacgaggaggcgacgctccccatctcgccgttctcctgcaccacccgcgactggcgatgctgcggatttttcgactctctcgagcgcctccccccgcttgggactttggcgtggaggaggtgggggagtacgagctcgacggcgcgggtttggctccccgtcgtcgccgctcacactcggagagaggtcgtgcgcctttgcttgctcggccattaggctgaacaagggaaacttggtgcacacggaagagtatgagagctcagaaaacacacgctgagccccttacctggcgcgccagatgacggagctcgttgcccctcaccgggagactgcgcaagcccccctttgccggttcgaccaggggcttagggtgcaatcccaagctctctctctctctctgtatgtggaaagatcacccgcccgcaagacacacgagacacggcgatgtatacaggttcgggccgctgcgaagcgtaataccctactcctgtgtttttgtggatttgtgtatggaccagttacaaaggattaacttcctttcccctcagccttccaaaagggaaaagtcccctctctaaatgggcaaggtcctccttttatatctcaaggggataccacatgcacctttctctttccaaactggactgttctttttctctttaatgggcggagatcggtacggtttccatccgggagcccttctgatgggacagcccacacctacccccacctcccccgaagacagagatgacgcgggaccgtggctgtctgtcgatgacgcgaccagtgccagaccggtcattcttgtccaccacgcgtcagcttaacaacgtgcatgtttgcccttcttcgtgtaacaccttgcctgtaatggttaggatgaagcctggtataaatctgaccagggctaacgtgccatctctaagagataacacgctagctccggcttgagacgagtgcctagaggctttcgtcttgacgggatggggcaaggcgtgcgtcagaccgccagtcgccacctaacccgtgatctgaccggtctgtgactggtcacagaccggataaaggaacgcgctgtactgcgttgcatgcagcgtgacacgctttgaccagactgcaataaatgctgttaggtgagcacagctgtgctcacttatcccatatatgtggcgcagacttccttaaggggtcggggtgcctcggccctcggggccggggcaagcgcaacccgaccccccc

SEQ ID NO: 19003 - DNA, 696 bp, Oryza sativa
cacggaaccctatgaaacggaaagcgggtatgcgttccagataacagagaacttaaacagctgatacttcaggaagctcatgaaagtccttattccatccaccctggcagtacgaagatgtacttagacttgaaggagaaatactggtgggttagcatgaagcgggaaattgcagagtttgtggccctatgtgatgtgtgccagcgtgtcaaggcagagcaccaacgaccggccggacttctccaacctctccaagtaccagaatggaaatgggatgaaattgggatggatttcatcaccggacttccaaaaacccaaggtggatatgattctatatgggtagttgtggatcgattaaccaaggtagctcgatttattcctgtgaagaccacctatggagggaacaagctagccgagctctacttcgctaggatcgtgagtctccatggcgttcccaagaaaatcgtatctgataggggaagccaattcacctctcacttttggaagaagctccaagaagagctgggtacccgattaaatttcagcaccgcctatcacccgcagacagatggacagaccgagcgtctaaatcagatcctagaagatatgctccgcgcatgtgtcctagattatgggaagacctgggatcagatgtctccctatgccgagttctcctacaataacagttaacaagcc

SEQ ID NO: 19004 - DNA, 3461 bp, Oryza sativa
gaatagagcctgctggttgtagttgtgatacttggatttgatgattcagaattgaaaaccctggttgtgcatgattccctggttgagttcttccattgacattattggccccttctggtgcagtggttaaaggcacctaatcaagtaaacatatagaagtcaaataccgagatgtctcaggttactagacctaaagaagtaacaccttattaccgaaaatgtagtgtttgtcatgccaccaggcgtcgcaagacctagggagccaaggatatcccgaacactctgcagataacaggtgggaggaaatcacatcaataaacatataaaggttctggtccccatttagacaggtacatataacactagaacaaagcatataccctagccaggtcatctatcatcccctcagaatgcatagcctctataatttcctagaagagagttaatgaaaaagaattcaaagaaaattaaagttaacctgtagttgttgctaagagttaagcagattggaaattttaagtatacgagacaaagcgatgttagaagcataccctggagatatctcctaacagtccatttccagcaacattaactgcacgtaaaaagattatcagacccatacccagcatattgctgtaatatacctaaaatcaggtacagaggaaatacactctggtaccacaaaaggtagtgccagtcaatataacccaagttgatttgttatgctctatctatatattgtaataactagaaacacagtaatgcttacataaatacagttaaataatggtgtttttagttcacaaattaaatgaaaaataaagcgaaggactgttcaagccttcatctacttagcctgaaatgcttacctagctattttttacaataactagcaataactatttttctgcccttcaaagggcaataatattttatccagtatgagcttgacacaattaatatatagaacagacacatggaaacatggtattgaagagtgaaaacgcacataaattgtttacgatactacgaaaacttgtgcagcacatggctctgaggactaataggtcataggcatatcaggtgcgttctatattgatagtatactcttcaaagcaacccccaacttaacttaccattagcatgggtgttttcatcagaagtaccagaagaatgttggccttcagcagctgcacgccgagcaaccaaatgcaatgtgtacccatcttccaaatcttgaggttgtcaaagatataactatcacaactgtcgtgtttacaaacgaaatatcacaagaaaaccgaaaatgataaattacatcatgtggtgatgaaaatcgttgatccaaggaacccctcattaccaccaacgatgcagttaaatactggtgttcaaccacctcaacttaacaaatatcatcaaggtctacaatgatttgaggttcttgcccatatttgcaaagaattaatgcttagatacttcaatttgacattttactactttattttgtctcattggaaggccattatgaaatcactaccaaagcaagcagccctaatcccaacaaaagcatcaggcactctactcttctagcagtaacgaaatcacccttactggcccaaaagagttgtgtatcttcccggcctatttataactaagcaactaaagatgggaaacaaaatgcaggtaaatagtgtatatagctcaagttctcaacagcaacaagcgaggtgagtctctagatggtttgattgtcttcaagcattcaaaagaagaagcatgaacaaaaaggatacgatattctgatagcaggtgatcgtcctttaagactcttcctctaaaaatcaaccgctgttggtccacaggaaccccggttgcctctactatcttctctttaaggaccagaacaggtacctaaaaatttttcagtgattagattgtctcaaaacaagtacatgggagaattcatcttgtcgttctaactataaggaactgacattctatagcatttctagtatctctcaagcaagcaacactcaacagacacacagagacataatagcaaactgtcaaggtggggcgaagcatacattcttcttaacacggagcttatgaacttgtgaatccagggttttgatgttgatctcaatggtagcctctggatcatcgccagcttttactgttgaactgctggccccgacagacgcatcttcagacatcctacagaacgaggaactgaatagtatcagatgctgcataaaccacaagctacaaaattcgaaattatgattcctagacatgttcagaattcttcatagtcaactcactccacgcctaagattacacagccagttaaacccctgcatttaagcacaagatctcaacagagttccggcagcaacaagtagagcgccttccatctacgaagaaaccagtaccctcattcctagcttaacattagagaaaattccataattttaggttctaggactccatcaagcatttaaaagcagattacgggagaccctaatcgttctgtcctcttatcagaagacgctccgtaccgcaaataaaatttttagcagctcagaatggctaggaccgatcccttccaaaaggagaacttcgcaagcaattacagcctcaaaatcatatcccttccccccttagctctgaaatgcgtcgccattgtcctctccgccaagtcgcgtatgcccccaataggatgaggcttcaattcccgaataattaaaaaaaaaaaaagaagaaaaagaaaagcagaagatcgagccatacgtggaatccggagagggcccgagccgccgaggccacaagtagagagtcggctgcgccccgcgcgaggcgagctgagctggcggcggcgttggggtgggggactagggttgctgggagcggaggggttggcaagcggcggatgaaccgggcgagaggcggcggcgaccggatcgggggccgatgcggcggttgctcctgcccgatggggggcagcgaggatttttccgtggcgatttttctttttccttttttgcgctttattagggttgcgagttgtgtgagaagtgagaactgagaagaggagggcgccgcagtgaaagaagaagaagaagaagaagaagagggggaggaggtgaggagggagggggcagtggggcacatgtccgggctgttccggaaagttccacggcggtttcgttcttggggatgctttgccttgcttatcactcgatccaataggagcagccaaatgccactcacgggagaaggctcaaaggctgattataattactttgttttttgtttaatgaaaaaaaccttaaaattagctccaaatttaaagttacgaatttatattttggttgataagtattagcataagcgaaaagataaggcctttcaaatttttttacatgcatcatttgttttatagaaatagatcacat

SEQ ID NO: 19005 - DNA, 4106 bp, Oryza sativa
tcgttagtatttttatgattaaaaaatttcatttggaaatagaaaaacttcatataagaaatttttgaacatggatacaaactttaactataaataaaacttcaacggaaaaacttccaatacgaaatattgagcatgagaaagttttgctataatttgagaaaccttttattttttagaaaacttcccattgtgttcagtgagctaatcttatgacttatgagacctatggagcggttggttatcctatgtgaagccacataacgagtgattatgcagaaggcaaaagaaaagccatgctgagttattacattaatatttctaggtaaaaattacacacataattatatcatatcgatctcacgtaaagggagaagttgtatcaggaaaattggttgtttaaccgatgatgatgaataatattaatgcgaaggttaaccttggcattcgttaccgtaagagactaatacaattagttggaggtaaggaaaggaataggatgtagctagagaaaattatagcttttagtccattacttttaagtaaatcaccactaaaatattagaatttttaattgtccagacatggtccaccttggtgggtctaatgcgcgaacgcgcgctagcatcgaacctagcgaacagaaaacgacaaaaagaaaaatagagccgcgcaaaaaaaattgttttcctgtttctcgttttcctttcacgcgatggtaaaagataatcttttcctttttatcgtttttctgttaggaggtttgatcagattggattatactttttttttgaaaaatatattagtatttttaggctgtgtttagttcacaccaaaattaaaagtttggttgaaattgaaacgatgtaacgaaaaagttgaaagtttgtgtatgtaggaaagttttgatatcatagaaaagttggaagtttaaagaattattttggaactaaaaacggcattagttttatatttctagtaaaatttatgcactaaactttttaattatagatttaatttgtatataaagtttgcatatacaaagtctacatatacaaagtttatatattcaaagtccatatatataaagtttacatatatgaagtctcactttatatagaaaagtttccccagaaattgtttgtatagaaaatttccgttaagaatatataaaaaatactatgtataacgaaaaaagaaatatgagaaataaacagaagtgaaggaaagaaatagaaatacctattacagaagaatcacgtaaaagatgcaacggattacataagagaatcacgtaaaagaagggaaaaaatgaaaacggaagaaaatgatgtgtcctcatgtttggcgtgtcccttctgactgattcgccggacacgaaacgttcgttttcgctccaccttcatcttctaataaccaaaaagcctgcattattcggtttgtcacccttcccatttccttcataccagtgatatgttcataccagtacttaccaattttagcgatcttgggcccagcccaccaacaaaagtacttatgatggcccagcagtagcctttttaggcccacacggcgatcgactcgcgtcttcgcctcactccgccgccacgtcaccggatcccccacgcctcgcttcccccaccgcgtatgccgccgccggcgaggagcccggccgccggcgtgcggaggcgaggcgcgctcctccccctcgctttcctcctcctcctcctcctcctgctgctgcacctgacctcctcgcctgcccgctcccccaactccccgctgctccgcggctccggcgacggggagccccggcagcgcgggccctgcgactacgcgtccggcgagtgggttcccgacgacgacgatcccgcggtgtccggcggcctgaggtacgaccagacgtgcagggagatcttcaaggggtggaactgcctcgccaacgggaagcgcaacggccgggagctgctccgatggcggtggaggccacgcgggtgcgagctccccaggctcgacccgctccgtttcctggagtgccacaggaacaccagcattggtccgtgctcgttcccatttcgtgtgttttttaccactgcagcttgttctatggtgactagaatagtagaacttgaggagggagttatgtgcaaggtaaatgtggcgctgcaatttacaagctagatgcagttcattctgtagcgaggatcatttgacattgccaatgaaggcatctttgtggagtgtagcaacgtgcattgtgcgtgccgcttttagcttggaaagatcagcatggaaggaacgtggtttccacctgattaatttgcaattcaaggtagtatattttgccatgcgtgaattgtatgtcaaatatatagaagacgtgtaaatttttacctgcaatcttgtagtttgattatgtggcggagcatgttcagttgttgaggctctcatacatgtaaagaatcttagttggacaagaagtctcgacttgctgttcatgatttatgtttaatggtttgttgcaggatttgtgggtgattcattgaaccggaatatgtttgtctcgttggtctgcatgcttaggggggcgagtggggaggttcgcaagtggcgtcctgcaggagcagaccggggtttcacattcctgcgctataacctcaccctcgcatcccacaggactaatcttttggtacgctatggtaggtaagaagtgtcatttgagtaataccaaattatagttctttggaagtatggtgtactccacatcatgcaattcccttttgtgttacaactgatttaattatataagtacaattctgtgcccagtagtacatatttttgttctgcagctttgggcatttgctatttggctttcagttttggactgtagctgttacttactagtagtattggaatgcttaccagtagccagtagtaaacttttctctggtctgttgacaacggttggtcttaatattttcattaatttttaaatatagtagactctgccgctttcttaatgtttttcactgcgtcatagtttttctttcatgaggttgtggctcatatattgctgaggttattactcaaacccgtataatgctgatgttgtaggtggtcagccagtccaaatgggggtcccctagaatttcttggatccaagcaaggctacagagtagacgttgatattcctgaccaaacatgggcagaggcaccaagcttccatgatgttcttattttcaacacagggcattggtatgtgaacatcaatcataagccagataacatttttttcacttagatgcccaattaagtagatcctgatccatgaatgttatttcatgtttgaaaactttgagtaaccagttaacagcagaaatttattacgttaatcttccttgtactgtagttccaatatttgccttctccctcaaacctcggatatctaactagatattatccaccaatcaagatttgtgttgctattgatctagcttattaactaatttttgccaggacatatagtaatttggaaatacgcctacctttaacaaacactttccaagtatgagaaattaagtctggaagcttctcttggatatgattggccaatgtttttgcaataatttttgtaagaaatgttacgaagacttgtaggtctataatcagcaggagtggcaggactggatattttttggaattaaaacaatgttggtagcgtccatacctttttgcaaatttaactgcattgtagaactcctgtaccattttggtgacatcattctcaatccattgccaagctgctctataaaacgccacatttagcccatctagtcctggagatgcatctcttcgcatttgtttgaggatctgaaaattttgctcctctgttggaacttccggtggctcaaaagtgtgttgcccttgctgatcttgagaggatgtgactccttaatctgtgtttgaagtctggaaaagatctaaataagagataaatgttgagcaatttcgtcaggatcagttgttagatgattattatgcatgacaattggtatcctgtttttccttccccttttttgagctgcttgctgaaagaaagctgtgtt

SEQ ID NO: 19006 - DNA, 4164 bp, Oryza sativa
taacaaataacttaaaacaagtgatttaagtaactttgatgcagaaagtttctagagaaatcatactattaaaagcatggtacgaataattcgcaaataatcctggccccatcaaccaaaaagaaaggggcccaacattggatgagctgacatgctggaatgcaacgaaattcaatctttgtaaataatctgtaataaatatcttaatatttattaaaacagggaatgtttgatatctagcaaaataacaagccagcaattgtttcaacatggcattatgtggcatgtgggatgtgcccggcttcccctttttctctgaaatcttgcttttgtgataagccagcaagcagtgtgtgggctatgtatatatatacatgggaaattgagatgtgtttatgtctctatcaaatggttactgttcggccatgagagcaaaaaagcatgggcaagtgcccacactttggcgacacaaacagtgactgcacactggcactttgctgggtaaagaattaacagcatacttagtttggtacatgtaaagattcttagaacaatatgccagtttgaaccaaaaaaaaggccctcaggaatatcatgctttaagtagctagtaacagaaaattgactataacaaatcaacaagatttactcttttctatcttttggggacaaggtttgttgtattgaggtgacaaaaaaggagaaaattaccggaggaattagtttgtgcttttctctgaataatcacgcacattgacagtcatttagaaagtagtcggaattattgccatagctggtcttgatgattgatctgtcacctcattctgaagtttacatgtttgccgaattgacacttgcctagattcaagatccgacaaggaggtcttgccgatcaacaagaggatgctgaacaatgacattaggctggcaatatctgaaaattcagagttcacaagcaaaaaacgctgtaaactatgatcgaaacaagcaggtaatgccgacgttgtgacgcgtatcgtcatctgatccttgaacaaacttcatcagaaatattcttccagggccaaaccagacaatgacaactcttgatcaaagtaaaataggttgaaaccttcattcatatccattgttcttggtcagatggaaacatagaatcaagtgtacaccgaacaaagaagatgcagcgtaagtagcaaaagaggacagaagtagcaacatcagatcagcctgttgcgtgatttggatcgataaacaatgccaatcgctgctcctttgtaagcttaattgcgacttttgctgtatgaactgctcgattcagagttaaaattaggtcatgtcattatattttaagatctcactgatgaagagattaagcgtaacatgtagtcgagttttccttgttggctttgtcgtttgtattaacttcatgcacaaagatataagaattttgcactcggattaccgacgccgcgtacaacaaatgcgttttcacatgattgatgctgaatgttttcagacgaggacttcactgaattactgcaaaaattacaagttttggtatgaatgttggactacagaattgcgaaaactgcagatgctaccacctgaaattcgtacagaatataataaaatgctgcgaagtcagacaaggaaacctggagtagtaaaagaactgaacaaacatttcgtttctcaccttgataacgtgttttacaactctcacaagttccattcttcggaagtaaatcacattaatcaggtgtctgaatgttgtttatacaaaaaaatatgctcacatttgaatgctttagtttaaacagaattgccagcgagcaaaacactgagttgaccagtatgataacattttagccttgaccactgaagatatatgcaagagcttctttagaaatccatatttgcaagagcatcttcagaaatccttttgatgtggccatcgtcagaattcttttccaagaacacatcttcagaactctgactagactcatatataagtactacttttacaaaaggcaaagtcagatttgagaagtgggagcaaaaaaaccacggataaaaacacggcgcacggcgatggcaatgcgctttttcagctggaatttgtctgttccagcgtcgtctcatgcagaactgcggagaattcaaaccaagatgtttataaactccacatttgtacacactgctcctgtcctgacaatcagagaggcagcaaagtcatgggattagattagaatcattagatattgttgagattagaatcattagatgttgttgggcgaggcattcaagtcagtccaggcaggtaggacgacaccactgaaagaaatgcaggtgcagccatggggttcaactgactgaaacaccgcaagagacaaggacatcagaggacagatgggactgtgagtctgtgacattcagtgtgagctcgagaaagtcagtgtgagtttatttttttctgctcccgtttgtccaaaattttaagtaatcattgtatcaaagtttgtcaaagtagagaatatcggagtagataatgcagggaatagttgtattacaatttgataaagtgagattattctattctttctcattttgtattggtatatgtaggatggcttaaaaatgaacttatttgtgacaaagtgagtacttaagtgagcactgtttgtttggaggacaagcaggtcacaggaactgccatcaattagtagacgatcgatgaatagtgtttgattttgttttactaatactaatatgccagttttgtgaggggcaggattgggtgatgcatgtatagcgaggtggtcaggttagcctgggatgctgagaaactgcaacgtaacgttgcattcagtagcggtcaatgtcagctggcagctgctcgtttggtttggtcaggaaccaatgcgaacgccgtctgtcgcgtaaacataagtgaaatatgtcaacggcttggcttggcttggggtggtcctgtagagtcacgggctggcattcatccatgcgtgtcaggaactcagtggtcagtaggagtagtaactcggtgcagttgctgggtgcaggtgagtcaaaccggcggtgggtcagcgtaacagcagcagcctcattgtttgttggatcggcccgcgctgccggccgtggtttcggttactgttcgcgtcaccgggcaccgcacactatagcagctagtcacgcacgcacacgctttttcccacctccttttcggcgtcggccggccgctctttgcctcttttccccggacaagccacggccccgttgccacacgcggcgcggcgcggccaccgcgccacgacccctcggcgctcgctgcgactgcgaggcgaggctgcagcgagtagcgacgcgcggtggcggcagcaagcaaattggcaaatgcgcgtgcgggtgggcgccgggctcgccaggacgggacatcatacggcggagtcgcggtcgatcggtcacgtgggtcgatcggccgtcgcgtcgcgtctcgatcggcgacgacctttttgactcggaggggaaggggacatgctggccaaaccagctacagtggctagctgcgctaatgctggtcttgggcttggcagcctggctgctaggggtacgtgcagatcacaggctcaacagtgacgactcaggggtgttcagtttaaggggctgtaaagttttgacgtgtcatatagggtatcgtatatggtgttcggatactaataaaagaaaactaattacagaattcgtcagtaaaccgcgagatgaatttattaagcctaattaatccatcattagctaatgtttactgtatcaccgcattgttaaatcatgtagcaattaggcttaaaagattcgtctcgtaaattagtcgcaatctgtgtaattaattattttattaacctatatttaatacttcatgcaggtgtttaaacgttcgatataatttttgtgtgtgaactaaacaggcctcagttacttcctactacagtactactagtactagagcaagtgtcaagtaccctacgtggtgtcatggtgtgactagagacatgagcagcaattccgtttgtagcgtggtactagacattagcatgccggctacagtagctgttttgcacgctgcagcatggcacgcggcagtgtacagtaccc

SEQ ID NO: 19007 - DNA, 962 bp, Oryza sativa
agtgggcggtggatctcaaccacaagcctctgtaggtggtgttgctagcattccttctatagtggcacaggtaactgcacaagtagccaatgcattgagtgcaaatcaacaaggccaggtttcatcatctgcgcagaacacagtagatcagggatctcgctcggtcacaactaatggagttgacaatgtggattctctggtatcagcaagtacgcaactgcaaaatgagctgtcagattctaacaatggacgcacttcactaaatgcacaatctcttgtagctggagcaggtgcctttacattctttttaatgtatcgaacattttctctaatggaaaatgtactgaattgttcaccattcctgtttgttttaatttctctaatcaggtatttctccttcaaacacatctgatcccaatttagcatcggaagacagcagcactgaaaatgctcccaacatcggcagtattcaacaacatccagagatggaagggatccatgcagataatgtcagaaaaccttctgaggaatcaacaacagccaacttagtggggcagatcacaaccacctgtacagatgatatttctgtgaacagatcagcagaaaattcttcacagaagaacattccattggatggagtatctgcacagtccattaagccatctgcaagtagtaggtctgaaccagtaggtcttggtggaggtttgcagcctaaggtattagttaattattttagtgtttactttttagtaataatgtttcctgtaatttgattgtttagcctgcattttgttatccatatcttagcggggttagaatttgccatggttggcagcagtttagttgattggtttaatcacttcaccatttggtctgaatgaaaatggcagacattttactgttgagaaaacgtagtatgccattcatacatgattatttgtcccaaatatgatatgatcccc

SEQ ID NO: 19008 - DNA, 2794 bp, Oryza sativa
aaaattgtgatgattactaatacaccatatctggacaaatgttcattctaaagggttgagaatgtcatatgcaagactgacaaatggaaaacaatatcttttttttttaactttttgataattcataaactaccatcctgctttttcatgcacagattgatctacacaagctcgtgaacacattgagcaacatgactcccccagggatatcttcggtgcggtcctcgaaactgctgcacaggcttatggtgaagatgagagtattgaggacatgcttgaagagcttgtcagtgacccagaacttacagatgtatgtttccaaaatccccccatccaaatttagaataagctctaatgattttcataggatgccatatagttgataccgtagggtgagattgtttagaaacatacattaggagattatgttatactaatatgtatacatatataaaaaggcaagagatcattttgtggtaaaataagtggtatatgcttcttatatgatcttttgtcaaaataaataaaaaatctgataggattttgcagtaccttgtttgcctttttttttctttttagaaaactttgtttgccttctgattaaccctaaactgctgcaaatatatgctaggactacctgaaacttctgctccaacaagttcgccagaggatacagtcggcatctcaatccgggaaccagtcttgagcaatcatggcaaagaaggtgatccagatatagaggtgattgcataggcaaggtggttgaaccatgcaggtattcactgcagagtttatattttataagttgaaaatggacagaacccagtgtttggtttggtggtcatgattaggcgcctccgtggatgtacatgtgccgtgttctctaattttggcctcagagatgatgtttacaccacccactgcacttgctttaaatgttttacagattttgttagtggtacatagctatcatcaagagctttagatttcgtggaatttatgtggtttgctgatctgtcggtaatttaaaatcgtttgtcgaggtggtgttttttgtttgtcatcttgggaatcatgccaggttgccttgcaaattcaggttttggaaatgggcaagaggacaggctatataggccgtccacagggttgtgcttcacttacactttgatacgctagataaaaggactcctggagcttgaggtaatacgctaaagcaaaggtcgctgccctcatgcgaataccagctacaggcacaaaggcaatgggcagtgaaatgagcacacaaaactctgctcatgagataagtggggcgatgccacagacattgcactacagcgagcaaaagggcctggttacgggagtatagtgagtttcgtgatgggcaaagagtacgatcgccaacaaacagcccagctctgtaacgatcgtagcccgtaacgtttacaccgcgtgtcaacaaacccatgttgcctcatgggccaacgcggatgcttagctactttagaactgtaaactgttggggatgcattggagtgggcaccaggtgttgtagagcaagtttaagggcatatgttcaggggagcttttagctgctgcagtttcttccagaattagaagctcctccaaacagttcagcttttggtccagattctgagaagttgtagaatccagaaaatgaactagaagccaaaagctaggaaaccaagcttttccaaattctcagaagctggctactaatcaactgcttcttataattttaagcttgagaatacgactaaggcaaagagccaggatcacttggttaaagcatggagacgttaactctaaattcttccaaatcaaagcaaatggtagaaagagaaaaaatcacatacagatccttcaaactccagatggctttgctgtaactaaagatcaaaaggaggaagaattgaagcgttacttcacacaaaaattaggagcctttgctctcagaaatcagagattaaacttggctgctctcaatctccctacgcttgatctctcagatctcgatgataacttcactgaagaagaactcaaaaatacaatctctgacttgcctttggaaaaatctcctggaccagatggatttattggagcctttttcaaacaagcatgggacataataaaaacagatctcattcaagctatttccttctttggagatatgggatgtgcaagactgcaagaactcaattcggcacatatctgcctcatccctaaaaaggcggatgcaacaaaagcggaggatttccggccaataagtctaatgcatagttttgcaaaaatagtagctaaattactagcaaacagacttacaccaaaattagatgagctagtttctcaaagtcaaagtgcattcattaggaaaagagcaatgcatgacaatgtcctgtttgtgcagaacatgatcaaatcgtttcacaggaaaaaaaagcctactcttttcctcaaagttgacatatcgaaggctttcgacacagttaattgggcatacttgctagaggtccttcaaatctttggctttggacataaatggtgcaactggatttccaacctactgggtactttctcttctgcggttcttcttaatggtatcccaggtcaggaaatagaccatgctagaggtcttcagcagggcgatcccctttcccccatgcttttcatccttgcaatggaaccccggcacaaattattcaagaaagcagaggatcttggccttctctctagtctgcaaagacagcggcgcttcagatgttctctctacgcagat

SEQ ID NO: 19009 - DNA, 6233 bp, Oryza sativa
caggtacaatagcaggcagctgcaaacatattttaagcagataaatgagaagagagaatgacagcgggctacagatctgtagccagctgtaacacggactccaagacgcagtgtgtgtatgacaggtgggaccagatattaataatgtagtatgtaactatcgtatgaatgagctattagattgactatagatgaattggagccaatagtgagctatactattaaacttgctctaagatagggtactactgcttcctcgaaagaaaaaaaaaagggtgtagatcgatcacttttgttgtgtgcgcgcgccgtcgtcgtcgtcgaaacagttgtttgttgttgttgggctcaagaacagaacaaagtagtccgggtgacttgtggtgaagctgattttatgaccagactcgatgtgtgtttctgtagcaaaacggtttggtgaggttccagtttgagaaaattccctatatacccctgaaaatttactcaatcccttcaatacccctgaatttgacattatcccttatatacccatgagttttcattttgatctcctctatacccatctccgttagttgaccattagttgaccgttaaatattttaaaatgactatattacccatcctatacatatgtgtggtacctacccaataaattttcatatgaaaaataaacttatacaaaatacaagcaatataatcatttaatgcccaacttaaaaaataaaacttattattttttattttttaaaaattatgattaaatccatacattagtttcaccaaaaaattaagagcaaaaactaaatgttatttaggtttaaatttttgggaagatatacgaaattcatcaaatttgatctgaaatttatttaaaaattttaaatttgttttctaatttgtgataaactaattatatcccctttgttttttcacaacgaatcttttttcactaaatatttgttgaaaagtaattttcaaatcttatgcagaacttttttttacaataatctttttttattttaatgaaataatgttttattttcaaaaattcataacaaatatttagtaatttattccttattggttttcacaactcaaataatttacacataaaacatttctagcttttaacaatataacaaggacaataaagtaatttctacaataactaacggtcaaactaatggtcaactaacggaatgggtatgtaagggatccaaataaaaactcaggggtatataagagatcaaacaaatttcaggggcgtagaagggattgggtgaaattacatgggcatatagggaattggccctttcagttttcagttcagagtcggccggtccggcgtcagacaccgagcaatgcggcgttcttctccagatgcttaaagatatgtggttccagtatttctgggtttcattttggttagccttgactcttgactcgtgtgtttgacaagttcatcttctgaccagattaatatactcgtaagagagagaaagggggaagcgccacttttatttgaggtgatcttgaataatgttgctagggggtctgatttcatcaatctgccgttgtgtggtggcactattctatttattttttaaatgttagtacgtatttgctgctctaatgttagatacttactggtatattgtattggcgttattgagtcaatgggtttttactattgtttctaagcagatttacttttgaaaaaaaatcgccaataaagaatattatggaagaatgaattatcttttatttactgccagccattctctcaacataaaaccaccatggcttgatgttggctttctcttcttgagtattgttccatgtctctttgagttcgagcataactctttattcagctggtattttcagattttgtattgccatccatgccgtcaagctttaataatttggaaataagtagatgcacggtatttataatttgccaagtaaaaatgaacaatagatttctcttaaaaacatatttctaggacattgtaatgaaaaaaaattatgagaccacataattaaaatagttataaaccattataacatataaattcaatccctaataccctacagatattacacacttaatatgagtttttttagtgagactaaaaatttatcgttggtcacaccctgtcgtgggttttcccataaggttcttataataacctattataatttaccataaccattaaactattcatattatctatactatccattcgttttattatagtcttaactagttcgaccctataacacatccatcctgaaatcttttttacttccatccttaatatccttgtcgaaggctaaaatcattaccccatctatttcatatgaaaccggggagtatattttaaaacgaaggaagcagcgtaatcttagattgagttattttcagcaactcaaaacaacaaatttctcatttatggttagcacgtttatcaatgatgtattttgtgtaaaagaatatgtattttttaataaataaataaacatattttttcaacttttaatagttgttttagaacaaacttataatagttaatattaaatttatgctaacggttattcttgttttacgtgtctcggaaaagcaagccagtatgtttactcaccctaaagtgatacggtcaaaggtacgaacaggacacggtgtccacgccttaaacaagcattaaagaaactgatgacgacggttaattgtataatttcaccgcgcctaattaaagaaacagcaaggcagcaacgcctatccgatttttattactcgcgccacgccagctttgggtagcaggaagaacccaaggatagatacttcggctggcgtcaacgtgtaacgtatgtgcagtgcaaacgagatcctgacacgcatggataacgcccctgactgacgaccgggccacagacagcgggccctttttaccctctctggctgtagtcggaagaaagcaacgtctcgggtggttgccgtgtgcgcccgacgcagcagcagatgcaaacgcagcctttgtactttcgggaatacccatgagtgactcaacccccccaatcccccccagaacaccaaacctcgtaaactacttgaaaaaaagaaaaaaaaaacagaagacggtaaagccgccaccacgggtgccacggcttttgatacgagagccacacgccgagaccgagacgacgccgttggaacggaacgcaacgtgcggagagagagcgagagagaagcacatggcacgacgacgccgcgcgccccggcaccggagagaatcgaaccgaccagccaaccaaccgcccgcggcaggatcgcgctcattcgcccgtgagatcggcccgaaaccacgtaaaacccccccaccccccaccacctcgcgccgcaaccgtgcccaacggcacaagcgcagttacgccgcgcgtgatgcgcctcccaccaccaccaccagcgcgcgtctccgcctaaacatagctatctccactcctacttcccggtctcgagctacaccaaacacaacgggtcatttccctccattttgatccgggagaatagcaaagcaaggggcgggggtggggattgtctatatttaccgcacacgcgtcgttggcgaggcgggggggtagctgctacctttgggagttgggtggcgccatggcaacatcttcggtggccgccatgccgcacgactccacgccatggagggacccctccagggcatcctccaggcagcccgccagggggttcttcaacatcctcgtcccgccgccgcagtcgccgcgcccgcgctgccccgaccaccaacaccaccaccaccaccaccaccaccacgatgctgctggtggcgcggcggcggcggcggcggcggcggcggcggagcccacgccgaggcggcggaagcagatactggatcggtgggcggcggcggcggcggccgcgtccgccacggcgtccgccgaggcccccgcgccgcaggagcagaggcggagggcgagggacgccgagctgtccgcgctcgcgtcggccacccgccccgtgaccgcccgcgccgccgtgttccgggagccgtccccagcgccgtcggacgcgtcgtcgggggcgggggcggggtgcgggggcggggccgggtgcggcgcggagctcccgcccgcggcgccgcgcgcgtcgtcgctgatccagcggtggcgggagatcgaggcggtggggcccgccacgccgcggccctgcgacctggcctccgactccgacggcggctcgccgcggggccgcgtggggtgcatcgtcaagaagctcagcggcacgtcgtcgatccccgacgacgagctggacgccgccaacaaggaggtcgcgatgtcgcagtccgcgcccccgtcgcccgcgccgatgcgcgccggggtggagccgcccaccaacatcgccggtatcaacgggtccaggccgacgcagctggtagtccgcacggtgcgtggccgccgcgcaatggaggagctcgtcgccatgatggcccattgccggaggtgcgagctcgccgcggtcgccgaccgccacgtcgtgtcgcggttctcgcacaaaggcaggatccaggtgaactccccattctctcatgcggctctcttttttttttttaggaaaaaaaaagaaggaaaaaccatatttgcaaaacgcaatggatatttggatcaaattacaagtaatcatggatcaaagtacttgtttgtcgattaaccaagtgggatattgttctgtttcttgatcgagaaatcattattttaagacgagccaagaagttagaagtgtgagttgttgattttgaccccgtagtcccccaaggatggggccatatggctgtttggtagatcatgttcccaactggcactgctgatcattgtcatgtgcaaatcacattatcatgtttcgttttgcaggttcgttaatatgctaggataaaccaaaatgtgataaaaaatgagctaaacttaggacttgattatcgcaaatagtgatatgctaatagccattgttgactggttcaatatgtagtagaacagcaacgaaagctctactagaagatccaagaatattttgggagctctattgctatacacgcaatgtccagtgtagcagagagggtaaatctagtggacgagatgtcacaagtgaataacatctctcgtttgtcttgtttgtttgctggcacgtccggaatctgacgtcctgtggagcttgtggatgctgcagagttgtggctaagaggccacacgaaacatatcacgtgactagacaggttgcttgcttgctatagtgtgcacttgttgcacataaatatgattaatggcagagcagtttgttaattggaagtacaacgcaaatttcaactgtttattaatggcaattgccttttaggttggatttttatgctacggtaccagcattacttgcaacatttttggatattcttcactccaactccagcgaatattaatgtgcatgtttcctaggaaagctgaactttttcctggagaatacattgccggtgtgtagctcaagtatgggctgtgtttggaagcaacaaatttgttttggccacaaatattaagcaagaatctcgattacttgatgcccttttttgcatatccaaggcataaattgtgtttttgttcttttctctgtgaacaagattattccttcctcttgtcaaagattggtaaatacaatagagattcaccttttatatggtacagccatcattgttttggctgctaagtgccaacacacatgcacaaaagtatgtattctctggtttatttcattagattgtatctatgcgaacacaagtactttttaagcttgtttgttccttatgtggcttccgctaatattgtcatgctctttgacaccttgcagtccatgcttcgtcttaggctgttgcgtcagggatttaaagttaaggatgaagtttggactctaccaaaaccagtcaggccacgccttccaaaacatgagcatgaggcctataccacaaggtattaatatgctctttggtaactaaaccatcatcttgtactagtggatgtgaaaatataacattacatgtgttcttttccactactttcatgtctgtcattcctagtccttttcagcttgtagtaagtttagaatattttttccctgaaaagaaacataagttcagaatgttttactacttccctttttt

SEQ ID NO: 19010 - DNA, 8600 bp, Oryza sativa
catgattgatgattttgaaggatattatgatgagcgcttatactggagacagaatgatgaacaacagaatgctgatcagagggtatctgcacagtgttcattagcacctgtctcccatctccaccaacaagaaggctggcagcattcttcgtttgaacatcaacatcatgaaaaccaaaacttccttgtaagtcttgtgctcttcaagtcagttcgtgtgcaagtcatattctcactatatttctgtgttacaggaaatggaggtcagggttagaagtgaaatggcacaggtccatcatgaaatatatgaactacggaagttggtggaaagttgtattgcatcccaagtaaagatccagcactccattaaagaggagatgtgcagtgcacttcgcgaagcaggtgagttgtgatggaagttttataaatttgtcattcctatctacaaaccgcaacaaccaaaatgttgtccagactccagaatatgcatgaaacggaagagcctcattttcatattctaatatggaatctacgaccctataacgcaatccctagccttttcagaactgaggcttcctatagaagattgcactgaagacaaaatgaactgtgagggcaagtgagctagtaggttgcctttaatggacagtcaaatgagatctggagaaaaagaacacagttggttatggagtgactattggaaatagttactctagtcttggaacttgaaagcaaaactatgcgccatctttttgctcaaatctgggcctgaccaactctctaaactaatactatataattgttatttgttaggctttctgtggcacctttaggctgctttatggaattgacagatttttgcggtgtgccatgctgttgttttttttaaaaaagattaaaataccatgtgaactttggtgtgttctttttcactactgccactttgcaccttattgagtgcttaattttacctcatctgtaatcattgatgcacactttttacacttcaacatccattttttttctgatgccattattttcaacagggttgatgccaagccaacccgacacaccagcaaaaaggggaagctgctgcatctgccatcagacgcaagttgactctctactttacaggtaatgatttgcatggctagattatgttctttgactcacttcacatcttatgtctcacaatttaacaagaaacgatgatacggctcgcaatcttgctaagtgtgttatcatctttcattcaggtgtggacatatgtgcacctgtttcaattgcgccgatcagctgaaatcgagcaacaggagttgcccaatctgccaatctcctattgaggatgttgttcgagcgcatatgaatttttgaggtttaggtcttaggaggaagaagagctgccactctatagctttagatgtggagtttgtgaagccctggttttgaggaggcttcttgaatcaccttcattaacaaccaaaagtatacgagctagcgtttcttgagaaatgtaaatatgttttgtgcaagcgcaatgtgtactaagtactgacagaaaggaacaaacgaaatatctaatccaaatgctgatcttgtttctgatcatttttcttgctttcctttgtttcttttaagttctgtattgaacatgtttgtagccttcagttctgataatgggcttgtcttgttttctgttgataactggtgaaagcaaagttgctacatttggagagtggcacgaggaaaacaaagtaatatttaatattcaaaatggagaacaaatcaaaaacattccaggtttagactaccaaactagtatgtatgagcgtgcaatttgctggccaatttgttaaacaaatcaatcacactagttaaatgttagcacgtagactgctttgcagctcacgctcacgggaataatttgtttatgattaaataaatcaaaatgaaagctacctctctcagaacggaagttcttctgtgaaactaataaacatgcaaatctgagaacaaattacagtaaattatctataaattcaacataattaatcttggtaaaccgattactaactgcagaatatatatattttctgaggtaacagcacgctcctgtgacgtgctctgagattaacttcaagtatgcggtgaagtcctcctaacgctcgccggcgaggacgcttacgacggccggcgtcgatgtcggcgatgaccctgacgtcacatagaatctcacatggcgccccgagatgcggtctggcccgtccgtcgacatcttccccaccgacggccgcgccgccgccgccgccgcgcggcgcacgcccttcttgagcacgctctttcttatgccgtcgctgtcgaacatgaacgcggcgtgcaccggcaggtctgcctcgtcgtcgccgtcgcatcccaggatgagctccagcggcaggtcgaagtacgacgagccggcctcgccgtcgagggcgaggccggagcgggacgacgttgagcacgagccgcagtcgaaccgctcgagcgacatggccagcgacatggtgctcgcccgcgccgtgcctgggtcggactccacgccgccgccgccgccgccgccacggaacgttgccggtgacgacggcaacgacgatgcgcgcgccgcggcggtgggtggtgaaggcttggccgtcctcctggtgccgagccctgggaggtagaggcagcacgtgaacggcgccgccccgccgccgcgtttccacttgcggcggccgctcttgccgcgcgcgtccgcggcggcgtagcccgtcgagtcctcggcgccgtcgcccgcaccgatgagaggcacgtcgctgccccaccgctgcggcgcgctcgccttccgctccgaggacgacaggatcacatcgaactcgtcgtcgtccagctccgcctccgcggcgccggcgcaggacctgctcctcgagatcgccgtcctgggcggcgccatcacgtccgacgacgcgacgcgcgcagcaggcgcggccgccacgaccgccaggtgcgcgtcccacctggtgggaggcgcgtcccaggcagacacccgccgcggcgacgtcggcacgctggcgctggcgccggcgagtaccagagccgggcccgggcgcgcgtgcggcgcgtggtggtggtggtggtcgacggagacggaagggatgggcagtggcccgtcgatgtcgaggcgggagaactgccggagcgagaaagggtcgacggcgatctgcctctcctcgggctcctcctcctcgccggcgttggtcacttggaatcggaacacggtgtttcgcgccatggtcgcgagttgaactggccaagagcctaagtaagactcaaggaaggagaagaggctattaggatttggagcgaaactaatcaactgagggcgattcgattagtttgatgacaacaaggaactagcttgagacgctagccagcagctgtcagtatcaagatcaagagtggcgacatgaacgcacgtatagagatgtgtggttgcgttcgtgctctccatcactggacagtttctaacaagtaacaggtctacgtgggtctgcctatatgaaattcgatagaaaaacaccttgtaaatcttacaaattctaaactatgagattgttttaagatttgtgcacgatacctctaaccctaatccctcctccctctctccattccaccgtcggcgctgccactcgcgagtcacgagctcgcgcgcgcacaatgttccctcgccaggccgatcggaaggagtcaatggttccggctatagctagccataagacttgaggcctgacgacccggcccacggtacaacattttggcccgccccaagcacggcccggtccgccgggagttaggcccgtgccggcctggcccggccgccgggccgtgcctgggcccctccaccggcacgttgggccagcccggcacgaccgggccggcacggcacgatgggccggtaggccaggcccgacaaaaaaagaacagggagcaaaaatagacatattatatgccacggtccaaataatagggatgtaaaatagacttattgtagctacatatgtgccacagcccaatgaggagggaggaaaaatagacttatttttcaaaaggcatgatgggccactcgtgccttcgagccagcccagcacggcccgactgctggtgggccgtgcctgggccagcacggcatggcctagtgtgttggtcgggccgtgctgacccgacagattttggtccgagcacggccgtgccgggccagggcgggccgtacaaatggccaactatagttctggctaggccccttggccagcctcctctccctttctcctttctctttcctgaaccagcgatagtgagtgttcccgcattaattaccgtcttcctcatctttgatggctcctcgccaccggatttgccatcaccagctgctgtctcctaaccacaagctctaatctttcaccaccaccaacgccgatcaaccgctctcctctatcctcgtgactccagcgttgttgctggcaccttgctgcccgcccatgttcaccgtgcagcgccgaacttccaccttccacggtcatccttctaagcctcgtgatctcccctctgccccctacccccatcctatatccactccgaacataagactctaaaccctaacttgtcaggccgtcgcaggttgccggaggagaacgggtgtccggagcacgattcacgacacgaatttgcatgattttggcactaattttctaccaatatgtagccatttagtagcaatttcgatttttaagtgatttttttaaccatctccgggctgttgcattttatccagtgacgacgactcgacaggctaatttcgatgttgtcagtgtctccaccaagtccttagggcttaggtgtttatttcataagtaacaatactaacatcattgcttgtagggtaagtatatatataccaccagacaaaggagataattaaggaactgacacagtaaggtagtttacttggactcataaacaacactaacagtagacaacgctggcaggagttttcgtaacatcccagaacaatgcataaatcaggtgaacacaaaatatgcacacattcatagagcatacattagaggaattaattactccggatcagtagctgatcaagcaagctcatccaaataaatcaagccaagtaagtttgtctatttttacctcaggatcagccaagataaaccaagccaaacaaatcggcaaagtaacgcacatactctgaatctgaatcaaacaactaatagcaagtacaatttacatgaaactgaatagcgtcgtgccaaaatcagcctatgtaggatatgcttcatttcacgcattcagttagatactgacaaagtgagataattattgaactctagagtcaagtccactagtctttccaattaagctgcaacggcctgattctctatcatattagagagaattccatataagctacagagaataacatggctatatgtcattggtttaaatttgcacactcatgccactactgtgttgactgtgtattgactgttaattctaagtacacaggtatatttacccctttgagttgcacatgcagatgtaccaattggttaatatggcaactatttgaaggtgattgacatatacatgcatatttgtagcattttagtattcatctagctattgaatgcagcatattatttttgcagtcacatgttttttagccactaccatcacacatttttaagtcaaactcatgaaacatgcagttcaacaatgaaagcctaaacatgtagtaaaacattgaggtctccaaaaaactacatggtcttttcataaaaaggttaaaatgacatcacatagttcatcagcactatcacagggcaaaatttccatagtaggaccacacatggtgcatcagcactcagtataccacaactcatcaaagtgcatactgaccatattaccaaaatgcaaatgcaaaattactgctatcagtgcatactaaccatagtaccaaggtgcaaatgaactgagcagtgtaaaaccagtgtgtacctagagatcacagcaccaaaatatctgagcacattataattctcaactaatctactcagaatcacagtagagtcaacgaatcgaaccaactactcagaatcgcagttcgaatcgaaccaactactcgcagaatcactcgcaggaatcatatagtcaacgaatcactcgcaggagagtcgcaaggacagattgaggttcattgtgtcgtcaaatatggatacatggatacatgggtcacacctccaggtgtcggccggatctgggcgatgcttgtgcgatcaacgaccgcggagatcacggtccctctttgcccatcccttcttacccttgtgcctcttgtcctcggcctccttctgagctttggccctctcatcccggattttcttctcggccgctgcctgagccttggcgcacaacctggtatgcacctttatgaagcgcacccgtattcgccggccttgagcatcccgcacggacaggtccagaagagcatcgtgtgatcttccaaggccatcccgcctccgccgccgccttactcccgctcgctcgctcgccccccgccgccgccgccgccgccgccttacgcccgctcgctcaccgccgccgctctcggggatttctgatttcgctagggcgatccgatctgatcggacgcgtggagcagacggatgggtgccggcgtacgtgggcttcctgggcttcctgatagtggcctagtgggagtgcgaatgcatctgctccatgggccagaatatgtgggcttactgggccgcctgactgtggcttagtgggagtgctagttggccagcgtatgtgggctactgctgtttaggcctaagtacgtgggtttcctggacgaataagtttattctatgtccctttacttgacagcgagttgggttttcgccctcgaaccaaaataccagatacaaatgtcctttaattgtcaaaactggtacatatgaggttcctcggcgtggcattggaagccaaatatgaaaattaatttttttgaaaaaaatgtgggacccatatgtcagtaaggcaaaagaaaaaagtagtgggacccacatgtaggtgggtctcaccttccctctatctccacgacgagcgcacgcgtagaaccggagaaggagaagggcgacggctagcggctggcggccatcgggcagtagagcaagagaagtagatacatcagtttggaaattatggcttgaaaacctttcgtagcagttttttttttctgattccttccttatgtaaatagaacttgcatatattgacctaagtagcccaatgtgcaacttaggttatatatgtggcctaaagtgaaatttactctctttttatttgcatgcgaaagggtgtgcgcaaccctggcacgtgtgtgcgtcgatctaggttgaagacgacagccttggatatgatggagagtatcagctccattatcgtacatgcacgagactgtttccaggaggttgaagacggcaatctatacgagttgagcctgcagttcctgtggactggatcgaacaaaggcaggctgagcggaggaaggtagcggactaggcagggctgaaaaaaaaatgatgtaatgggcttttggatcaaaactaaggaaggagtaaaatttatcgtgcgatcaattttacccggtgcaacgcacgggcattttactaggaatactaataataataatctaattgtcccctttttcatcacaaatcgcatatgcatatgcatgtattaaatttcttttcgttgttccacattcattaaacaatcaactctggaggaaaaacccacgttctgtccaaatcaaagaacccgatgcttcgtgtaaacggcctcctagtaccggatttcaagtcccacacgtccggtgtgtcgacgaaatacatcgtgtcctctaaaacctcgccgtgtgcgggagcaggcatggacttgttgaagagttcactgaggaagattgcttggccacctagaccgccgccggtgaccggaacccatgtgccggcgtccatgtcggccttagagacatccacgctgcgggtgtggtcggcgtccttgacgaaggccgcgattaaacactcccgtctcaccatgagcaaccggccagacgactccaggaggtgccagctaccgttaactgcgtagtcgtccccctctaactcgtactttgtagtcttccaaatgagatcctcaccggtgaggtactgccactgatggccgacgtcgtcgatgccatcatcaccgacgggctcaatttcgctatcgttctcgctgtctccctcttggtttaatgactcatcatggtcgttggtcgatgcgtcaccgtcattgtcttgtgcgtcgccgtcgtcgtcgtcttcatcgtcgctccacctaaacgcgtcgattacgccatcagggcttctcggttgtctgatgatgcgctcgacgctggtgacggtgggcttgccgtctttgtcgtcggcgaggtcgacggcgaagaggtcctcggcttttgtaattagata

SEQ ID NO: 19011 - DNA, 3123 bp, Oryza sativa
agggaccaggaaattaatcttgtttttgtagcaccagccaatagcactgccgcatgtataagacacctatctgtgccactacctgaccaagtgacagccatctgattaattaaatgcaacagtaatcgatcaaaagctctggttacggaggaaatcgacacggactcgacgtcagccaactggagacgacgtacaaaatattcacgcaaaaacatcttaaacttttataatagtagatagatatgccaaaccaaattattatagtcattatatcatcttgctacaataactttcactatcccaaaatatggaatccatcgttctcgaacctcagcgaatcacctatatcaatccggtacgtcatcgtggttatttgctcgaatttcgtcaaattctactgaatctatagatccctggcccatctatgtccaccaaattctattgaattttaccgatttccatcccatcaatttcacctgtaaacccggcagcaaggtacaggttggatcctgaattttcagagaaaatgactgcatatttatcctgattaattgtcggcaggtcaaaatttgtgttgtctttttgtgaatggatgaattgatttggagcaatcttccacagacatgctgatcgcagacacatcaatttcagcctaagccattgaccatggggttcatgcatgcacatggagatcttttgcacttttgttgtttgttggcttttgcctagatatattctgaatagaactttccattactcatttaatgatctgtcctccatatgcataaacaaaagagtttgtcctgattaaatctaattgcattctaaaccccacaggcaccagataactctcaatctttagatagatctcatatgcatgcatcatattgatattcttttcatgtacttgtttttatggaacctctagtgcctaaccttattatatatcaatcagttcagatccagccacacgcaaaaagttggccaatcttttggccacttgctaattagcagcaaatgcagcttgtagctccatgtgttgaacactccaacaaccatagtagccggattcggctcccctatcttgagagatgtatatgaacagttagtctcaacctaatgcatggaattcggccataatcagggctccaaagtactctacaaaagctatttcccagtcaaaaaggttccaaagtgaaataggcagtcgtgacttgtgactctgtgaggggccgttcgaaaggcaggagtaattttggtgaaatatatatctgcaatagttatggtaatttaattctatcgcagatatatatcttcgcatgcggacgcccgccccgcctgcgaagatcggcgatcttcacagtcgtttgcttacaggcggacggccgcctcacctgcgaagacacatttccaccaccggcggtaatgcattttctagccgtgatatatcacccacgagaaaagagaaccttgcgtagacaactaaaagaaattctaaatgtgctttacgtgaatgtttgaattcctttcagtttgtataaaatgacaatttaatattggaatcttgagagttcaccagtataatccggccgaacatgcatattgatgaagaaagggcttgaatgaacattattgtagctctgaaaattaagtaaatgaattgtaacaataatattgtatatcaattataaaacacaagggaaaatggagagctagcttttaatatgtccactgacatgtaagagcaaaagctgctgagaatcttctaattaaatttctaattcctgcaactatagatttctataatcaaggtgaaaacttagactatttacgagaacttgagattgagattttagaagaagttacaggcttacagctatcaaaaactcatcaaattgagacatagtcttgtatgttatttctatccatttgtcatatcattttctttttttttgaaaaagaaatatcagcaaatatctactactcctactttaaagggtcgtcatccatccgctcctttccatgttgtgcaaagaaaaaatatccgttgggcctagtgcttggtctatacttgtatatcccagtatataagcccagtatatatatccatccttagtaatataggtctatcgtaatacacatttatgtaacctcttcttattttgtctagtttctttcctaggtagtctactgttgtctctctgtcgacggatgatacccgtagaccggatgaatagggtattgagatgcgttggtacgaggatctacacaatacgacatgaagcaaacaagaagacaaagattatattggttcagacccctcataaggtaattgctttaattcagtttatatgagattgatatggaaaaccacataatacaacgagaacagacgaatccgacgctaccagcgagatcctcgtcgagatgatttgacgagatctctcgatgagtatgcttcgcgccctccgatttgttgactatggtgggcgtatgggcgataaaatttgatgatctgaacccctcagaggtgtgccttttataccgtgagtcacattagtctctaaatagaactcggagacaattgacacacacaatataatataaacccgattctctctgagtagaactctattattcacctatccgtgaagatgatttttatagtattttgtaaatttccttatcatatactgacggagcgtggggctcctcaccaggagaccgcgcaggcccccctttgccggttcggccgggggcgctaagtgaggttcttcgccctcgatctgaggaacgtccgcgagagaggaagtgcacaagacacgggcgacgtagacaggttcgggccgctgagaagcgtaacaccctactcctgtgttctggtggatctgtgcgtgaaggaatacagagagctggagagcgagccagagttcagggtctagcacccattcccttttttctcctccctccagcgcccccctctcctaggcctgggcctcctttttatctggtcaggggtcaccacaagggcctctcgctacctaagaaaggaaacatgctttttacaatgagggctaatctacagtcggaagtgacctctgacaagcagagcacacgtcttct

SEQ ID NO: 19012 - DNA, 20153 bp, Oryza sativa
cccccccccccccccccgagggggtcaggccacgtgggtgaccgcagctacccaagcctctagtcacgatacccccggccccatgtcaccgacagtagcccccggcgttatgccagggcgatcgcccctctcgagggaagcgctcgggcgtgacgccactccttagatccggtgacaggtggggccggtccctacaggcgggcagaaacccagcggtcgcaaatcgcgcgcatcggcaagggaaaaccgaccgacaacaatgagcggcttctttaagaccgctacattactcgagcagcgcgcgaatcgggacgagccggttcgtttcgcctggagacatgatgatggcgcttttcacggttggcgagcgtagttaatgcgtgcacaatctgccccatctcaaccgccacggccgcacatctgccgcgtgcgctgcaaacgggcgagtggggttagtggaggcgtggacgcgagaaacgagggggcgcggtagtgggcgcgggaagcgaggagccgggcatagcgttggcaagggtgtaaagacgccgaggaagggattcgtttctttcctcttcgccactcttccccttgccttcgccacttgtgctctaactcttcgtttcctgtgccctgcccttgccgcactcgctcgctctcaagctcctcctccgccggcgtcatggcacggggctccgcaccgctcgacggtagcgtgctgccgccttcccgcatcgtgagcgagaggcaggccgggctgccgcgccgattcatgccggaatctgccaccggcagggaggtggtcgcgctgggcgagggacgcccggcgccacactacctggggcggtccgtcttcttcctccctttcgcaatggcggggctggtcccgccattctctatttttttcatggatattctggagttttatgatctccagatctctatttttttctctacctgttggccattttcgtgcacctgtgcgagatgtttattggggtgcgcccatctctccggctgttccggtggttcttcaccgtacaggcggtgtcgccgccgacggtagtcggtggctgctacttctagccgtgggggcaggtgctgaaccgctacattccctgcgtcctccgcaaaaagtgggacgactggaagagcgattggttctacacccccctcgccgacgaagcgcgcctccgacttccgagccagcccccggcgcaggcctccagctggcgggcgacggtagatctgggagacggctacgacgccgttcttgaccgcctggcgggtctgcgatcccaggggctcacgggggccagggtgttcggtgactaccttcgtcgctgggtcgcgccgctccagcggcgcgcccggggcgcctgggagtacaccgggcccgaggactacgtgaggacccaccaggggcgcaaatgggactgggaccctgaggacttcaggacggtggtccaacagatgctgaatctcagctccgtggaggcatccctcatcccccaaggggtcctccccctctgctgcaatccagagcgcgccaagatcctggccatcatgcaggtggtcagggcgtcgggggagcgggccccccgaggccacgatggcgcgggcgggagccgcaggggggaacaatctaccccgggtgggggtcgtgcttctgggccccgcgacgggggcccggggggcatccgccctgccgacgcccgggggaagaggaagcaggagggtacccctcccccatctcctccccgagggggcggggcggtgcgtgccagcagcaggcgcccggagggtgctgtgccgacgccgcagcccgagggggagcgaaagaagaaacggccccgcaagatgggggggaccgagccatgccgggggagcctcatcttgcccccgaggtggtcgtttagccgacctccccgcaggttcgtccccgcgcccaccgcggccgtattcattctcccaaggcgagttttcactcacccgtttctttttgtcttctggtttttcttctgcctcagcgagatcccgtcgccccccccccccccgccattccaagtccagccggtctgaggccgaggagacggcgaccgcggaggcccggaggcgggaagctgaccggcgagaagccgcggaccgcctccgggaagccgaggaggctgcccaggaggccgtccgggttcgccaggctgaggaggccgctcgggaggaggctaggctccgccgggccggggagtccgtccgggaggcagaggcggcgcgcgcacgccaggcggcctgccaaacccccgacccgactccgcccgagacgacgccgacttccgaggccacccacgacgaggccgcgggcgcgccgctcgggcccgacctctcgggcgacgcttgggacgagccagcttcgggggacgcccccgagtccggcacgtcgatcggcgggccgagccgcgcggcacccacaccgaggcggctctcccctctgccttccgctgccccactgagcgcggagcccttcctgcaggccttggccgccgcgaacagcacggtgctggacgggttaagtgcccagatggaggccctgcaggcggagcgggcggagctcaacgcggcgtgggcgcgcgtcgaggaggggcggcgctcggtggaggccatggtggaggcgggccgcaaggcacaccgccggcacgcctctcagctcgaggcccgtcgtagggacctggcggagatcgccagggaggtggaggaggagcgggagactgccctcatcgccactgccgtgctcgacgaggcgcgggacgacctccgcctccaatacgggagcctggcggcggagctagaggagaagctggacgccgcccggggagtccttgacgccgccgctgcccgggaacagcgggcggcggagaacgaggcggcgtcccggcagcgcgaagaggcccttgaggctcgcgccacagcgctggaggagcgcgcccgcgccctggacgcgaaggagagaaacctggcggaccgcgaggccgccgtcgccaaccgggaggcaacactggcggcgcacgaggccgcctgcgccgaagaggagtcctcactccgcctccgcgaggacgcgctcaccgagcgggggcgaactctcgaagaggccgaggccgcggcgcagcgactggcggacagcctgttcctccgcgaggcagcgcgggaggagcaggcgcgccgcaatctggaaggcgcccacgccgagagggccgcactggatcagcgggccgctgagctcgaggcacgggcgaaggagctggacgcgagagcgcacagcggcggggcggccgcgggccacggcgacctagccgcccgcctcgcagccgccgaacacaccatcgccgagctgcagggcgcgctggactcgtccgccggggaggtcgaggccctccgcttggcgagcgaggtagggcccggcatgcttcgggacgccgtctcccatctagaccgcgccgggcggcaggcgagcctctggggcgggcggtacacgaagtacgccgccaaccagggggggcctcgcccagcgcctctcagagatggccggggccctcgagcggctccctgaggagctcgaggagacgatcaagtcatcctcgagggacctcgcccggggggcggtggagctcgtactggccagctaccaggccagggaccctgacttctccccgtgggcagcgctggaagagttccctcccggaaccgaggacggcgcgcgcgcgcaggtccgggacgccgccgaccacatcgtccacagcttcgagggtacggcccctcggctcgcgttctccctcgactccgacgaggagggcggtgacgatggtgcggacgacagcgacgacgaggccggcgacccgggcgcgtcggagtgagcccccaggcccccgccaatcttaatgacttttccttcttcttccgaggccttcgggccccctttttgtatagactgatttaatctgcaatcaagtaaagagaaaatttctgcgtcagttctgtttgttgtgtgtataagacgaggatggtctgtgccgcggtccttatgtgtcttggcttgaacaagggctcgtgcccaggtcccagcctcaaacggcgcgggtcggggctagtgcctggggagatcctcgtgtcgagactggccaggccgggagcgcggtgaccgagggttatggatgacccgattgtgggcctttgccgattcccccccggagttcaccgcgccccggggcacggctcggttctgggccccgtttggcgattttagccggcccgggccgccgagggtagggtcgagcacgagcgtactaattcaagccaagattcttcaaaaggaaacgatggcacagacacagtcctcaggaaatcgaaaatgcttttattgaaatacggaagagaaaaaggataagtatatgcatgtggtagcccccggccaaccctgcacgcccgggggggggggtgcggggttggcccgagcccgagacatgacacccgacccctactaggggtagaagcgatgaaggtgttcgatgttccacgggttaggcagctctgtgccttcacccgtggccagccgaacggagcccggccgggggacgccgatcactcgatacggacccttccacattggtgagagcttgctcagtccagcacgcgtttggacgcggcgtaggacgaggtcgtcgacgcagagtgatcgggcccggacgtggcgctgatggtagcgccgcaggctctgctggtagcgcgcggctcggagggccgcgcgccgccttcgctcttccaaatagtcaaggtcgtctcggcgaaactgatcttgatcagcctcgcaatacatggtgacccgaggggacctcagggtgagctcagatgggaggaccgcctccgcgccgtagacgaggaagaaaggcgtttccccggttgctcggcttggcgtggtttggttcgcccagagcaccgctggcagctcctcgatccacgagtcgctgtgcttcttgaggatgttgaaggtcttagttttgaggcccttgaggatttccgcgttggcgcgctccacttggccattgcttctggggtgggcgggggaggcgaagcagagcttgatgcccatgtcttcgcagtagtcaccgaagagctcagtagtgaactgggtgccgttatccgtaatgatacggttgggcaccccaaaccgagcagtgatgcccctgatgaatttaagcgcggagtgcttatcgatcttgatgaccggataagcctcgggccacttagtgaacttgtcgacagcgacatacagatactcgaacccgcccggggcccgcctgaacggacccaggatatcgagcccccagacagcaaacggccacgaaagaggtatggtctgcagggcctgggccggccgatgggtttgcctggcgtgaaactggcacgccctgcaccgccggaccaggtcgaccgcatcgttgagagccgtcggccaatagaaaccctggcgaaaggccttgccaaccaaggtgcgtgaggcggagtgggctccgcactcgccttcatggacatcggcgagaagctcgacgccttgttcccgaggaatgcacttcaggaggactccattagccgcgcgccgatagagggtcccttccaccagcgcgtagcgcttggagatgcgccggacgcattcactcccttcgcggtcctcgggtagagtcttatctgcgaggtacacctggatctcagtgatccaagcaatcaatctaggggagctgggagcgctcccctcgggtcccgaggcctggactccgacgggcctcgggggccgttcaggcgcgtccgtttcccctagggggtcaggtcgcgccgacggctgggcaagcctttcttcaaaggcgcccggtggggtctgggctcgcgaggaagcgagccttgagagttcgtcggcgaccgcgttatcccgtctgggcacgtgccgaagttctatcccgtcgaaatggcgctccatacgccgcacctggggcacgtaagcgtccatctgcgggtcagagcaccggtactccttacagacctggttaacgaccaactgggagtcacctaacaccaggaggcggcggatccctagtccagctgccactctgagtcccgcaaggagtccctcgtactccgccatattgttggtcgcccgaaagtcgaggcggaccaggtatctgaggacgtctccgctcggcgaggtcaacgtgacccccgcaccggcgccctaaagagacagggagccgtcgaactgcatcacccagtaggcggtgtgaggcagctgcgaggggcccgagctggcctcgggggcggagacgggctcgggagctggggtccactccgccacaaagtcggcgagggcctggctcttgatcgcgtggcgtggttcaaagcgcaaatcgaattcagagagttcgattgcccatctcaccacccgtccagtaccctctcggttatgcaagatttggccgagggggtaagacgtaaccaccgtgacccgatgcgcctggaaataatggcgcaacttcctcgaagccatcagaatagcgtaaagcatcttctgggcctgagggtatcgggtcttggcgtcccggagggcctcgctaacgaagtatacaggccgctgcacctttcggcggggccaatcctcttcgccaggggccgcatctccagggcgctcttcgaccgagaggccacgcggggcacactcggcttctgtgccgatgacctcggggtcagagggcgacaggcgcggccttcccgcagtggccccggggccatcctgggggtcaggggcgcctggcaccgtcggacaagcaggcggagggccagctccgaccgtcgggggccttgggccgccgttcggctcgggggcctctcctccctgctctctcccgggtcgagtcgacacagggtagggatgcgcggagtgagggttgtcctcgtcgcgctccacgaccaacgccgcgctgaccacctgcggggttgccgccaggtagagtagcaacggctcatctggctccggggcgaccaggactgggggagaactgaggtacgccttcaactgagtgaaggcccgctcagcctcctccgtccaggtaaacggtccggagcgtttgaggagcttaaataggggtagcgccttctctcccagcctcgatatgaaccgacttagggcggccatgcagccggtgacgcactgcacatccgtaagcttgctgggggggcgcatccgctctatagctcgtatcttctcggggttggcctcgatgcctcgggcagagaccaagaacccgagaagcttgcccgcaggcacgccgaacacgcacttatcggggttcagctttatgcgggcggagcggagactttcgaaagttttcgctagatccgagagtaaggtctcttggttgcgcgtcttcacaaccaagtcatcaacataggcctcaacattgcgtcctatctggctacccaaagaaattcgagtagtacgctgaaaagtaggacctgcgttctttaacccgaaaggcatcgtcgtataacaataagttcctatgggagtaatgaatgcagttttttcctcatcctccctagccatgcgaatctgatgataaccagagtatgcatctagaaaacacaaaaggtcgcaccccgcggtggagtcgacaatctgatctatgcgtggcagggggtaagggtccttaggacatgccttgttaaggtcggtgtagtcgatgcacatccgaagcttgccgttggccttgggaacgacgaccgggttcgccagccactccggatggatgacctcacggatgaatccggcctccagaagtcgcgccacctcctcgcggatgaaggcttgatgttccggggcctgccgccgcactttctgccggaccggccttgcgcccggccgcacggcgagacggtgctcaatcacctccctggggaccccaggcatgtctgccggtctccaggcgaagacgtcggcgtttgctcgcaggaaggagacgagcgcgtcttcctatttgtcgtccagaagaccaccgattcgtgtggtcttggacgggccgtcgcccagggcaacctccttgaccgggacctcgtcgcacgtgaccatccgctgccttggggcggccgggacggaggtgctgagcctctcgtcgccacccgcgggcttggacgccgcggcgaggtggtccgcgcgctgctccatacaagcaagctcgactttgaggtcgccatggacggtgatggggccaccggggcccggcatcttcatctggagataggcgtagtggaccgccgccatgaacttcaccaacgcgggcctccccaggaccgcgttgtagggcagactgaggtccgccacatcgaagtccacccgctccgtgcggaagttggcggaaccaccgaaggtgaccgggaggtcgatatgacccagcggccaggcgtgccccggcgtcacaccgatgatcggctgggacggccggagcaccatccccggggccttgatggcctcaaaggctgtgggggaaaggatgttgagggctgcacccccgtctatgaggacacgccccaacttcacattgcaaacggtgggggaaaccaccatcgcgatctgtcctccccgggtaacgcacggcgggtggtcggtctggtcgaaggtgagggcaacctccgaccaccgcgcccgccgcgtcgcctcatgggtaggggccgcggccagaagctctcgcttcatggccttgaggctccggcgagaagcgtgagcgcacgctcccccatcgacggtggcgacggtggcctcaggctcctggaaccccaggtcatcgtcgccatcgtcgatgtcctcggcggtggccttctgcttggcctcacctcgccggttgctggcgggagccgccggggttttgccctcacggcgctcctgcctcttctcctcctcccacttcctcgtccgctcagccaaacttttgaccgcgcggcagtccgcgaggtcgtggagggaggtgttgtgcacggtacaccacttgccggtcgggcgctccctgctgggagcgccggcctccttctttttgtcgctcgcaggcctcccctttcggggggcccgcgaagcgccctcgacggcgaggacgtgaccctcgtcgtcgaaacgggccgaccccttcttcctcctcctgtcccgccgccctgaccgagcggcggtcccgggggcggccggagctgccacaccagaaccggaggagttccaggtccaggcctcctcctttcgagccacacggtccgcgagctcaaaaagctgcgcggtggtctggggctccttggaggcgatcttctcgagcatgcggttgtgccgcgcgccccccctaaacgcgtagatcaccgcgtgtgcggggatgcacggtatggtgttgcggacttgacagaaccgctgaatgtacgagcgaagagactcatcgtcccttcgctgtaccgcatgcaagtccgcttcttcgcctgggcgcggatatatgccctggaagttcatggtgaactgctggcacaaatcctcccaagagtggaccgacgcgggtggcaagttcattagccaaccccgcgcctgacccttcagggccatggggaagaaattcgccatgaccctgtcgtcacccccggcggcctcgatcccggtcgtgtagatctggagaaactcggcggggttgacgcttccgtcgtattttttggtgatggtgggccggaaccttgggggccaacggacgttccgaaagctcgccacaaaggctcgacagccggcaccgccaaccgggggcacggggggccggcccccgtgcccggacgcatgagcgcgccctggggcgtgccgccatcgccgtagacgaggtggcgacgcgccccgtctcgccgtcctcccccgtcgcccgcgggcggcgaagtcgcggttccttcgacctccccgagcgcctccccccgcccaagatttcggcgagagggggacggtggggtgcgagcccgacggcgcgggttccgctccccgtcgtcaccgctagcgttcggagagaggctgtgcgccactgcccgttcggccattaagctgagcgggagaagcttggcgcacacgaaagaggacgagggcttagaaagacatgcgcgccccctacctggcgcgccagatgacggagcgtggggctcctcaccgggagaccgcgcaggcccccctttgccggttcggccgggggcgctaagtgaggttcttcgccctcgatctgaggaacgtccgcgagagaggaagtgcacaagacacgggcgacgtagacaggttcgggccgctgagaagcgtaacaccctactcctgtgttctggtggatctgtgcgtgaaggaatacagagagctggagagcgagccagagttcagggtctagcacccattcccttttttctcctccctccagcgtccccccctctcctaggcctgggcctcctttttatctggtcaggggtcaccacaagggcctcttgctacctaagaaaggaaacatgctttttacaatgagggctagtctacagtcggaagtgacctctgacaagcagagcacacgtctcctgcccccctcgccagctttcccggtggacgcccatttcaaccttcattcaatggccagcgacttccttgccatgcttgcgctgaagcctggaatggatctgaccgggactgacataccaactccaggagttagcacgccggctccggctagggacgagagccaggaagctctcatcgtttcgacgggacggggcgaggcgtgtgacaggccgcctgttgccacctaacccacgatctgaccggtctgtgaccggtcacacgccgcgaccggtcacggaccggataagcgtgcgccgcgccgcattaaatgcggcgtggcgcgctcgtccaacctgttataaatgcggttaggtgagccccgctgtgctcacctaactcacacacgtggcgccaaaaccacagggggtcggggcgtcgcagccctcggggccgaaacgggggcgccccagccctcggggccgaaacgggagcggcccgacccctcggggagacagagggaggggtggccacgtcaccctcgggcccgaccccccccccccagggggtcaggccacgtgggtgaccgcagctacccaagcctctagtcacgatacccccggccccatgtcaccgacatatacggaaatatattttgccatgaaggtatgttgtattagtatatcctataagttgtaggacaggaggtatgacttatctataaccataacactctcatctatgaacccatgacatagaaggtcgtagtagtaaaataattattttttaaatatattaatgagtaaggttatacatagacactttgtacttataatacaacaaaaaaaaaatcaaaggtggtgtaatctgcaaataccgcaatagaataagccgcgtttttttttccaagaccgaagtagcactgtagcgtaccaacgtgccaacgcaaaaaaaaaaaaaaaagaagctatccaagatccaccgggccaccaatccaaaaataaagcctgacatcataataataattcagaaatcataataatattatcatatcccttcgctttccgattatttgttgtttccatgattaaaatataacaacccagccggccggggcggcagaacggatgtcgttgtaaggtagcattcgttgctagcgcgatcgaggatgatgaggccgatccatccatgcagctgctgtgctagctagctctgctactactagctttagcttaagcttagctagcgtcgtcgttggctgggtggctgtggctggctggggccactgtatgctcagcggcgcgagggcgaaatggcgaaaaggttggcatccgatcgagagatcgatggatggatggatgggtaggccgggtccctttctgttgcgaggttcgccggcaggttgcgggctggggacctcctcgcggcacgcgacgtgcctccccacccccggcaccctacctgctttgcgggaggaggctaaaatgcaatgcaaccgatcgatgccactctgatctcctagtgaccgggaatatatgggcttcgccccccagctaattttcttgattggctaccggtagctctgtttctagatggccctaagcaacggatgcagatgaggattaagaaacgcgatttggagggaaagaacatttctaagaagaaattgtgagtatgttggggattgaaaccagacatatcttgccactgcaatatcaagtacatctcaagatgaggattaagggcacatgaaacatgaaagtcattggtgtacgattaattaagttgcaattattataaaccggaaaatacatttatttggtattttttaacaacttcaatacagaaagttttcacaccatttaacaatttgacattttagtagaatttgtatcgtcccaatcaaaagactggggcctaaatgcccccaccgccgttactagcagtagcaatggaaaacattgtgtactccctccatccaaaagtctaaccctatttcttttggcattaaggctaaggagtaattaattctttcacaatgtgataaaatcaatgaacatgcaaccaatgcaataagtaataaaatgactttttaggttccaattaataatttaatttagcacatagtaactacaaattgaacttagacttttggaaaaaaaccaaaaaataaaaaaccctcgtagttttccagatccggccacccctccccgccggagttgaggtcgagggcggccatgcctatctgttaacgaccaaatttgttttttcgcagcaacactatcctggaaggcactgccgctgccggatccagtgaagtagtatggggagtcggtgtaggggtcgagcctgtcgggggaggcgtgtgaatcggactgcgacatgaagtccctcgtgccggagctgtcgccgttcatctccgccccggattgatgcggctggcaagatcggcgaaggcgaaagctgccgtgagcggctgcggtgagcgaaatcggcggtggcggaggcgggcgtgaacagcgtcggtggagtaggaggcgggcaagatggggaaattttgggggtgaaatgagagagagcgagcgtgcgagggaagagagagagagagcgagggtaagagagagagcgcatgaccgaccgggggcaatgcgcgtcccaaagcactttttggtgaaatttgctagtccagactgccaaatgacaaatgcaaagttgccaacttttggaactagtgtttagatccatattaccaaaaagtggtttaaaatggcaaaagttttgccattttgaaggatctaaacggccctaagttttagacttttggaaggagggagcatctcttaagagcaactccaacaatctagctatcaggtttggatcggtaaaaaaaacaaaatgagtcaaaaccggggtccaacacactcggtatctcgctccgctcatgatcctgttcaacatccgtcgcccctcgtcctgcatatttgcagtggccatcccgctcgcaatcgcctctctcccgcgcacgcgctcgtttcccgcccgcgcgctcctgcccaatcggtcccgccgcctcgccctcccgccgtgctacgccgtcgcacctgtcccgccgtcccgcgccctcgccgtcccgtgccgtcgtcggtcccgccgtctagtgcccccgctcttccgccatcgcgccgctctggccccggccttcgtctcgccatgtggaggccgccgcatcgtgcttcaacggcggctaaggacttggatcaggatgctcatcgcccggaaggggacttggattagtcgggtattggatcgatgcgccattgggtggttcctccaacaggcgtcgatggttggaaggcacaaggtctgttcatcggtgagcaagtcaccgatgaggaggtctgcacaggtgagactcactatctacgtctgtcaaaccctttgctgttagttggatgactggatcataggaagttgctcgttctgtattctacctgaggattttgggattgcattcatgttggctgtaggtttctggaaataaaattgttgtctttcttcgcacctgaccagagtagctacttgttagcacaatacatttgaatgaaagattcatctagatcaaattgcttcttctttgcaagtaaataaacaggacctaccctaagtcccgttttgctctaaatcttccatcctgcattcacatcacaataattttcacaaaataagatagtttacaattgcaagagagtaggtaaattaaaaggataatactctgttatttacattgctgcaaatgtccacattgcatataattttattcagctcgatagtagttacattactttagatgcaactgcttccagtataattgtaggctcctttttatagcccctatacatcccgtgccatgcagtaggacaattcttccagctccaatgcatacaatctatggaacctagcataccaggaaatcctctgctcgctccaattgtaagtaacctagcagtatcctgttcattaggcttcctcatgtactctggtccaaaaacctcaacaactgctgcaacaaactttctcaaagcttctagagcggtgctctcaccaatacgaatgtactcgtccaaagcatcagctggtactccataagccaacatacagaaagccgctactaccttctgcagacaagataatccgagcacaccggctgcattcctcttctgcttaaaataatcgtcatgttcctcaacagctttcattatgcgaagaaatacatgtatcctcatccgaaacctatatcatgatgcaattaaattaaattagaaatactataaaacacgacacataaaaattacataaacattatagagaacatgcgaacctgcgtctaaagatgtttggtccaaacgttggattatctgagaaatagtctttgtaaagaagattgtgccacaatagtctatcccgatgcactacctcatgtccatgaacagatccaattcgacccggattatttactgattcctcaatgatcatttgcgcagcaccaaaaaatagatcatgctcctcatccgacgaagagggatcaatcaattcgttcattacgaactcattaaattcatcatcggactccataccctgcacgcaagactgatcaatttctactgatgttaattgaattcacacaagactgcagtaccaatcttcctctacatggcgatagtgtacgcacctgttggatgagtggtcggcggcggcgtgatgacgcaacaaggaggcgcgcggcgtgcataaacgatctgccgacggcgacgcggtgcaacgagaggcagcgacgtgcagaaggaagcagccggctgtgaacgacgtccaagcgatggccggaaaccagcggcggcggcggagaaacgagaagtcatggagtcaaccggtccggaagaacgggagccgtgacgtggacccttttgaatatggagagtcaatatttagctaggctgttggttttacccctcttgttgggatcttttttcctttttacagacctctttactctctaaacttagctaatcatatacataatctcttggagttgctcttagggtctgttttgctaggttctaaatcctgaatccgtatccggtgaagctagagcagaccaaacgttacttaattctcaactttaggagtaaatcgatctgctctagaaaatatataggaatggtggggttaccttttttcatctccataacttcaaatccactacagatttagagctctatcaaattggctcttaattattacttgtcttgtgaaataaggttaaagttgattatcgaatatttgctattagttcgtcacaagatttatgcagacatacatttcaaacaccgatttcactttccttttctctatccccctctagctcgggactagcggtggaaagcagaatttttaactagagtcttattaacattaacacgtctcatcaagtgatagttatggggagacaggggcggaggcagccctaggcttgcttccaatatcatgtataaattatgttaaatcaccatgtaagtttagagagaaatcaacaactcattagttgagccctaggttagccctactctttagtaatttctggcttcgccactgtggggagatgattagataggacacataaatctacatgtcaatgattatcactgcatggacaacgttgtagagtaccctcaataattctccatctctatatggatggacttaacactaactcccttctttgccatgttgagctctcctctttcacagctaccatgatgttcttgctcgtctcctcctcgatgcctataccgccaacctttcttatcgaagccatctatctagcctcattcgtcgacgtctggtcctacttatctacctgctggtaaagactcactactacaaaacatcaaatagatgccgacactataggagccaaaagtggtaaaaccggtacgtataatacctttcccgccaacacgcccgccaacccaccaaaatagcaagaaccggcatctttatctcctaataggaaaccggtacattttacccctgacagaaatagatgccggttttaaattaaatctggcatcttttagttggcatgggggccaccttggactcggcaactttgtggacaaaagaaatatatgccggttttcagtcaaaactgacacccatcttaagccgagccgatccgggcgagccggatccactcctttttcgcccatccttatccaattctctctctccctctccatcccgtctccaccgcccctcccctctctcttcttcttccttctctccttctctcttcctctccacatttccttcacctctcctcctccattcaccacggcggcagcatggcggggctctcccctccgccaaatccggtgggacgggaggtgctggtccggcggcggcgtgctccctaggtcagatctggcgggaggggagacggcgacccggtgacggtccgtggctagagacggcgggaggcggcgggacggaggtggcctgcaccggatctggaggtgcggcgtcggctggaggtgagacaacatcagtggtcggcggatccatctctccccctccctccctctttgtgatttgttggagatgcgttcttgttcatgtgagagtccatttgttgctatgagaattgatgtgagattttgtgtcgttcttgttcatctgttgatgtggaatctattcatcatttgtttctttgttcatgtgggagttaatcggctagagtcggctcgagctcgagccggcttatgtttttttgctcgttgattacatattggtgtcggtttttaaaatgacagtggtgccggtgcactaatcagtgacgcctccatggtgccggttaggaaaaccagcatctaagggggttaccaaccggcaccgaagttcttttctgtagtagtgactcctaaaatattttgttatgctttttttcccttcccttttgtcggtctcctcaggatgttaatacgtaatgttaacattccacactactatacgtatattttaagaataatgttttaaaaacttgtatatattctacgaatcttccacgtaatttataccgacaaattccatcaagttgccgttttccgttcctttccacatccctcataattctctcgctgatctcacctgctaataatcaagaacatgcacggacggcgacatgagccctgtacggttttcctgctccccaaaaaaccgtgatggacctcatgttactctgtaccaagaccctccatgttctctcatttcatttcatttgcacacgcccacaccactcatctgtttgttcctctcgtcgatcttgttgttgggaatttatctttcgagtcttgaccccaagtggctggacatgcatgcaaaagatcattcaattaattgccaccgtgtcctatgctgctgtaatcaagcgcagctcgatccctgctgcccaactgttcagcgagatggcgaaatggcagtgtgtgactggcacgtccatggaatcatggattaacacctccagagagaaatctcatggcccaaacgacatatttctaaatgaaaagcattatgtgaataaaatttttatacacgtgttcttagcgatatgaaagtgaagtctgaaaataaaattactactcgctttattttaaaactaagaaggtagcccgcgcagatgcgcgggcaatttatttattgtttacaaatttaattggtaaattttgagataaatctaatggtttagaaatttgaagatttttttcctaagagagtaggaaaggaaagaggagatgaggagagtacgtccgtaccagggaagggtgtggagaaggtgagagcacgtactttttttatttgatctaatagttaaaaataggcaaaattgattatatagcatcgaaagttcacgtttttggttttatagcattgaaagataccggttcactttaatagcacccaaagtttaccctgttcccatttctagcacttccgtcaatttttccgtccgtcttgatcgttattgacccagctacgcacacaatataatgtttctacccctcattgacatgcattctacttgtacttgtgaggggtagaaacgtcatatcgtgtgtgtggatggatcaagacggacggaaaacgatcgagaattgatggaagtgataaaaatgggaacatggtgaactttgggtgctattaaagtgaatcggtatctttcggtgctataaaaccaaaaacgtgaactttcgatgctatataaccaatttttccttaaaaatattggacccaccaatttaaaagaaaatcaatggaaagattttagagtgtcacttggcttaatccaaacaaattaaaattaaatcagatttacttgaaattaattattatatatttgcccaagatgtggtgatgtatttagaaccgcaatataaattttataagacacaaatattttatttaattaaagaaatataacgggatcacaaattgattatataatctaaaataatttaaaagatgaacgtttagagatagttgatttgatattttttatttatattatagaactagtttatatttgcacatatttgtggagtaatatatttttatatggtaaaaagttatattttaaagacaattgattttgttttgacggtaatatgtattatcgattttaatttattttgaatcttaaattgttggtttaattatgatagagcaaaagttagattagatatgatatgtgtagcttaaaataactgtggttgtttctccttatcatagctactaaaaaatatagagagaagtggagggggcagaaagtgttgtgcgtatctaatggtgagggtgaggtggaggggactttgtttttctatttttttctaaatcatttaggtcaaaaaccaattatcatgtattttgttttttagaaaatcttttttaattttaaagtcatcgtaatgacttaaaaaggtaatcttagatacacagatttaagctggatgatttaactggagattgcttggttcgaattagctacgtaatatcatggtaaagccatgtaaactgatttaattagctgtatatgttatattaccgttaatttccttccacaaatcatgtataataactaatttaattagctatgtataatcttcttgttaatctcctagcttccatatatatattgccgtgcatataataaatatagctatgattagtagtaacacaatatgacagctaattaatctcaacttctaacaaccatagttactaatccttccggcaaaccatacatacgtacaggagaaaggcagatctaattcattggtataaaataaagggtccaccaatttaagtgaaaatcaacggtaggtaaagatctaatctaacggtataaaataatgggtctaccaatttaagtgaaaatcgacggtgagattatattgtgccacatggcggcctagaagcatttgta

SEQ ID NO: 19013 - DNA, 4369 bp, Oryza sativa
gcgttcttgctggcagatggccatcgttgccgtcctcaccacacttctctcttacaacaccatactccacggtggtgcgacggcgaagcttgtttagcctaggtgccgttgttggtctaacggcatctctctctctctctctctctctctgctaggagagagacaagggcaagagaagggaaacggagaaaaggggtagagagggaagaagagagaggatgacacgtgggttctactattttttatttttttagaggtttatatgtgagtcccacctttttaaataaaaaatcggactgagcatcacatagacaccacgtcaacatgttaaaacactactagctcaaaactgccattaaaatcgtttagagagatactccctccttttcaggttacaaggcgttttaactttggtcaaagtcaaactgttttaagtttgactaagtttatagaaaaatatagtaatatttataatactaaattaattttatcatcaataattgaatatatattcataataaattgtcttagattaaaaatgttactattttttttctacaaacgatcaaacttaaaacagtttgattttggtcaaagcatcttataacctgaaatggagggagtaaaatagatccgattttaatagttcatggagtatatgttttgaaatttggggatatgcaaattaaacttgccatagttgagggcggcgcaatggacttgtaccaggaatctgagagggtgaattacaaggcctcaaaactttgtccagatcaacttcagacgcaaatgatttaagcataaaacatgactctgtcttacactcttacaccatacaacaccatctcaaaggtagtattaccgaacaaattaaagtggattaagctccaaaacacaagcattttttttctcttgaggaaattaccaagaagccaaaatggaaaaccattgacattactcgcataagcaattgataatagatatcgatcgataatataattcgatatattgacatatatgctaatcagatcaatcaatcagtaggagttgctgttgatggcggagcacttgaggcggacctcgccttcgtcgccggtgagcacctgcgcggcgccgaggcggcgcatggagtcggcgaactggtgcctgatcagctccgggcgcgcgccggcgagctccctgacgaactcccccgtcctcgagtccggcagcagcttctggtccgtctccaggaggcccatgtcgcgcagcaggttcttgtagtagccgttgtcgaactccgtcggcgtgtcggcgtcgaggtagacgtacccgccgtcgccggcggcggcgcacttgcggcggaggaagtcgccgtaccgcgggctcatgctggcgtcgggcctccccgtgccggcgtagtcccacagcctcggcttcacggcggcgcacgtggcgcggccgatggtgtgcgcaccggagagcacggcgaggtccagcacggtgagccccctcgactcgaagaaggcgatgaggtcggtgacgctctcccgccccatgggcacgtactggtcggcgtccaccatgctcgacctcctcccgtccttcctcccgtacatcagcggccagtagtccaccttcacctgcacgcacgaacaccgttagccacgcgcgccgccgccgccgtacgccgccggcgagagtagattactagagtgtgtgagctgagcttgcctcggtgctggcgtgcgggcggcggcggcgaggatgtcggcgcaggagacggtcttggggcacttggcctccagctcggccttgatggactcgatgagctcgaacccgcgcagcgtcttgctcgccttggcgtacctctcgctccccggcgagtccaccagcacggacgcgtcgatcccctgcacgcaatccaatatccatcacatcgcgattagccgccattgccggaatggtggagatgtcatgtcaggctggcacggcgacggcgagctcgttcgtggcgtacgtaccccgacggcgaagtcgtggaagaagaggcggaggagggcgggggcgagggtggagtcggcggcgatggccttcttgacggctcgctggacgatgccctccatgtccgggcacgactggtggtagtagtcggccttcagcccggcggccggccgccggtacgccggctgcacgtagccttgttgtttctggccgtccgccgccaccagcgccgcgaggaggagcgccgccgccgccaccgagacggcgacgccggccaaggagagagacgccggcgtcctcgtcatcttgatcgatcgaaagggaaaacaattctgtgctgccgtgagctgtgcattattcatctgggtttctgcgtgagattatatagttttttgagcttgttttgtgacgaggacgacatggcgagcacgtagcgcagaaaacgagatgaattcgatcgatcgacgacgtgaggagagcaacacaagacgggattgtgattgaaattaattagtacagtagtatactcgctaattaataattgggttgcagtttgcacgtagggggaatctagatggtttaaatagttatttgaattgttaattttggtgtcaagtgtttgtttgcgcaggtaaatatatgcgtgtattggtcaatcgatcgagtcggcgtaaacatatttgtgcttggcatgtcgagggcaaacatgcaagcatgcaaccatcatatgacaacatcaagttatcgacatacatggtcacggtacaagatttttctatttgatcttgcaaatgattggatgatcgactttcaaaaaagaaggaaatgttgagaaatactacttaattcatctgggtcaacaatcaaccaaatgacaatcttttttttggcactaaatttgggttaggtatgagatctcacaaggtttcatcagtcttaaatctgctactaaaaacagcagtgttcatttgttcaaataaacagaaacactgtaacctactctaaactaacatagatatttgaacagaccctcacccacctccaaaacacacacagaaatgaagttgactttacatggtcaacatacagtggaaactttgatcacaacagtgttgtactaatcaggcaacgaattgatgcttcatcgtattttaaccccaaaattatctcgggggaatttctcaaacaaggactccaacttttgtcaggctcactcactctcgattgccacgcgattcgctggtagcaaatcgttccaagtatctgtttgccctcgcaagcaccaatgcatgcaatcatcatgcttcttccaaccagctgttgaaggatgagcatcagctccgaattcacacatcattcgagttatattcagaacactttaatttgaaagtagactttgaaagtagacttttcaagagccctcaccaagacatctgttagaataaatgggctaggcacaatttaattcaattaaaatctcaacagcccacaagtaatgttagagacaataatactgccttggaaatttaggtgaaagaacctcaacttaaatagggtaatattggggatttcctgttgaccggttgaggtgatggttggactgccacacgcatgcgcgcgcgccgagtcggcctcagccgttggcgtagcgaggcgaggcagccgaccgagccgagcctgctgctcttccgttttgtaatagacgagaataaagtcaccattaactaatgaaattcattgtgttgtaaactccataacaaacactacaagaggtatgtggctttttgacattttattatgtcataatatgtgaaatttatgtcaaaaattaagatttatgacaaacagttcataatttcaaacgtcaaaaagccaccgtcataaattcatcatgtgatgtttgtacattcattgtcacaagcatatgacattgctttattgtcacaaaatcttggggcttgccacatggcagctgacatagcagttgacatggttcaaaaaaaacgtcacaaaataagattcggcctgctgaagcccatgtagctcatgggccaaaaatatattttttctagggttgttgctagctggcccaacatattttttgcttgtttgtttgagtgcagcctatataaattttcggcccacaccaattcagcccatatgatttttccaacccgcataattcagcccatatgatttttccagcccccacaatttagcccatataattttttcagcccacaaaactcaactgatattttttcagcccatacaattcagcccagatacaatatttcagcacatacaaaatcaaattcaaatgaattaacattccacaaatgattgcaatgtcacatgcatttcacattccacaagtcttaaaatg

SEQ ID NO: 19014 - DNA, 4973 bp, Oryza sativa
cagcagagcaatggccaaaagcacagcagcaacagcacaacgaccaaaagcacagcaacaacaaaataacatcccacaagcacaatagtcgcaagttcagtgtcaccttatgttcatacgtattgctgcttcagcccgttcatctgccgcatggcaacgcgcccgacggcaacatccctaaggaggccgcagccactggcggcggacagccaggtgcggaggcgatgcacatggggcacaacggcatggccttccaggactggcatgacggcaaacaactggaggcaaggtcgatccaacgccgccagcaagctctgcacagtggttgtacagtgtatatgcattatgtccagcaaatgtgtacagtattgaacttaaaaaaactagtaatttgcccatgctaatgctacagtgacatttgttaatgcagcccaaacaattaaaaaagaacaggttttaacaatcgtaatatacataacaatagatatttttcccctctaggaattacaaccaaaatttcacatctaacaatccttgtaatttatctccaatctttaggtctttagctgtgagtccttgaattttcatgcatgtaattcttagatagttcaccttcttttacaaatgggctaaccatcccatcacccgttgacacatactctttgtccaaaaaaaatcccaatcatgagtttgaatctggacatagatttggttctttttatgataggagaagtaaagagtaaggaaggaacaatcacaacatgaaattcaaagccccaatagtaacctaatatgatatatcgaaagcgcaccaccaaaacaaaactccaacttacaaaattactcatgaacaatgtgttttttgctttttttttttcttatcacagtatcagttggcctaagaaacgataatttagacatcaataaattatccgatagactatagcacatactccctcgatatttcaaattaaagcaacttacttgcccacagttatcaaatacatcattagacctaacctaacagatgctcagcaccattagacctaacaacttgtctagaatacatatgcatgcttaaaaaatcatctaactactcacatagtttggtcggttcaccgaatgatgtcttcctatctgcatgccttgctctcttgttcatactcctccttccttgactgatgtatccattcctcctgtcagaaaggaaaaaaaaaacaatcataacatcctactcagaccatgtgttaattttccttttttcaatggacttgtcaattcgaagcttaattcctacaagcagctgatcatctgttaaatcctagtcaaatcaacaaaagaaacataagcccagcgagggaacaatagaaaccatgaaagggtgtttagtctcaccgctcatcaatttggtaggaaatattgctaaagttctaagaataagttgccctaaatcctaacaacatcttatcgcatcaaaattgctggtataaagactctgtttagcaagtttaggccttctttcaaaaatctgggtattaaatctgcctgcattctgaaacaaaaacatgctggcataatacagattaagattagtgcagaacctgcggatcttggagttgcacgtgttgccgagattcctaagcaggtcggctcgcatgcagaagacgatgtccctgagcgaaccctcctggcaacggtgcctgagttcccgaagcttcttgcgcagtagaggttggcgttgatggggtcccgcggtccagcatccgcgcggcatgcgcctcgtaggtgagagtgacgcgcatcatgttccgccagaacttgagccagtatgcagactgcacccgcggacggacccccacgcgcctccagaaaccccgaagcaggagcccgccggcacaaacggcgcggcagcgagctctggcgagctgctgcgtgctaatcaggcccagcgccgtagccgcacgccgtcgttgagccgcccggggactgccgccgcgcgatctagccgccctaggcccgggagcgctgtcggcggcagatccaccgctcccgagcctggcgccggcggagacggaggcggcgcagtaagcggtgaggggggagtaagccggcaccgcgagcggcgatggaggaggaggacgccgccgcacgctgtcatcgccgatacccaccgccggagaggagaggagaggagaggagaggggaatggatgggagaagtgtggcggctgagggtggagagatagagagagagaggaggggtggagagcagggttttatatggggctagggttagggacggcgatcagaaccattagatcgtagataggacggtcagaaatagttgggccatttgggccgaaacaggaatgatcttgtggtattttttagtttcaatttatgagaactttaaatgtaattttaggctgattttttgtttcaaatgaaaaaaatcataaacaaaaaaattgtagaactaatcgagatctgcgactattgtattggttctttttacaaataagttcatttgaacaatttaaattttgaattttcaaaatttgacaacttcgaataaaaattagggttaataaatgatttcaaatggaaaagtcaccaaaaccaaagctgtagaaatcatcgagatgaaaaggttttattttggtcatttctccatatgactctatttaaacaatttgaaatttgaaattcaaagtttgagaaattcaaatagaattttttattagtgaacgacttcaactgaaaaagtcatcaacaacaaagttgtataatctatctggatctacaatttttattttggtcatatcttcatctggcaaagtaatagtaacattgttcacaaaatttacaaatctctcttatagtttataacaccatataagagatatgtaaattttatgaacaatcatactatcaatttgtcggattaataaatgaccaaaataaaaattgtagatccagatagattatacaactttgttattgatgactttttcagttgaaatcatttaatatttgaaaatgttatttgaagttgtcataatttgaaattcaaattcaaattattgaaacaaagtcatatagcaaaatgagcaaaacataagttgtagatcatgataagatatacaactttgttgttgacaattttttcatttgaaatcatttaccacacaaaaaaatatttgaatttcttatattttaaaattcaaattttatatagatcaatcaaactcagatggagaaataaccaaaataaaattggtagatttcaataagttacacaactttgtttttgacaactttttcacataagtttgtttagtatgataaaattcgattcaaagttttaatattttgaaataaattgagaggagggaggcaaaatgaacttcttgactcgctaggagtgcggtatgggccaagtgggaaggttggaggcgtgttagattagtttctttagaagatataaacgtgatatataaaataatatgcaatatcaaacaaaacatcgtgtgcagcttagtgttttgcacaccaccactgaatcaggatctcgtgggttcgactcccagcgcccaacaatttttagctattttgctgagttaggcgcacgggttggcccattttgggtacgcggctgttgggctagcaccaggttggaccatctgaaaatgaataaaaaaactgatgtggcagtaaggctcgcctacatggataaaaatattgaaaatagtacaataaataatttgtgacccataaataggtcttatgacatagtaaatattgtcacgggacgacgttagactaactatatgacacttattgtgacacacaattttttattgtcattaagttgaagtgcttaaaataaaatgtcataaattagatgatatagtgacattatgacctatgtcatattaaatacgtcaaaaagccacacatatcttgtagtgaaatgagagatccattgtgttgtaacatccacaacaaatgagagatttatttgttgtaaccttcacaacaaatgaaagattcattgtgtggtaaccttcacaacaaataagatttattttatggtaaccttcacaacaaatgagatttatttgtgtgataatggagatctctctctatataaataacgcaaggtagaggctctcaatgagtgtgtctttctcctgctattgttcattggcgatactcttcttctgttcctacgctgtctctctttttcccggttctgttcatcccgcgcgcacgggtgatcggaacgagcaggtgcctccgaaactccgtccgcttgagaatctgcatgggtaggcgggcgatcaagtttttgggtagcgcttcaagcgcgactgctctgcatcatcttcaccaacatgtcgataaccggcgacaacaacaacactggagacaaggagaaggagcctcccgtcaacagcaacagaggcaatactacctcaaactccagcaaatggccattctcggggtataacgtttcactattaccgtttgttcttcgtttcttacagctgtcggtcgcaatattattgcgttctcttgtctatgttgatgcttattctatattaagcatgctcatgttgtacacatctaacaatgtcactagatctactcaaattacaaatatcatatttattgtcttaatattttggattaaaatatgccgaattatgaccaaattttcaacaatccaaaaacttgataggtctttttcgatacttggcttagctgcatcactaaaaccacatcctttcgatggttcaaattataaaagatggaaagcacgtgcacttttgtggttgacggcgatgcaatgtttctttgtttcacggggcaaaacgagtgaaccgcctctctcccctgaggaggaggctaagttcgaggctgcggattgcttgttccgtggagcattgatcagtgtgctccccgatagta

SEQ ID NO: 19015 - DNA, 1303 bp, Oryza sativa
  unsure (1)..(1303): unsure at all n locations
gtaattagctaatcgggggaaccatgatgccaagagacatgtggattcaatagggtggtgtcgaggagaacccccgggtttcatggcacagtatggtctgggacctaacctggtgttggtctgggacccctctcgttggcatatggtgaacctgtgtcggctttcgaaatgccttgtcatgaaagcctcaaggtctccagacgtggccgttctgcacgggctgggtgatccgagtgagtaatgtcgtgtgggtaaagtgtaccccctctgtagaggttattaaattgttcgaacagccgtgcccacggtcatgggcggatatgaggtgattcctagtatagttttgtttgactactgctttgtgagattgttgttgtggaatgggttcgatgtttggaaaatctgcggctgatgggatcagccaggcccgggtggccgtttgaaagctgttggccgggtgccagccttgatctattcaaagactgatacaatgcacatactccgaccggacgagacgcactgtctcctccgtgtcgttcgagaagcactcacttagttgtttcaaaaaggagtttaacaaaaatcattgcaaaaacaacagcctttcctttgaagcctgcattaaacacttaattcccatgacttgctgagtactcctgtactcatccttgctctatataaataaacccccccccccccccgttgctgaagaagatgaagtggatcccgctgatgaggagttcttcaggagcatgtcggcttcgatgagttttagggtttcggtctagttcccaagtcgcgcctgtgataagtggtttaagtcttaccttccgctttccctttttgtaatgcagttgtgagctcggaatctgtccgcaggctaacatgactgtactcttactctgtaataaaaagacttctgatgctgtgatatccatcttcctatagacctgcactattctctagtaaacgatcggtatacaggttatgtgagtcatcgcggactagttccgctcgggatagttaaaggcgtgacaggtgtccaattgtatcccgtcggattggagggtctatcttaagctcttgcctagttcatgagatnatcgagatcacacttatctcatatactgtgaatagcagtcggactcatcaatgcatcaacatacaatacatggtcaaaggacggtatttttctatttgctctcgcaaacgattggatgacaagataatcaaccatttgccaatcacaagttttcatcagtttttgtgagtttgagaggagagaaaaagagaagattgagaa

SEQ ID NO: 19016 - DNA, 16168 bp, Oryza sativa
tgaactaagcatggctaagcaatccctagtcctaactctaatcatgttagaaccccaagttgacaaagaaataaggtacaacaatagcatggctacgacattaggtaaacaacccatagtaacattataaaacaatgcaatatttgaaagaaaacaatagagcatttgcaatataggatcaacatgttcaagtggcaagcatgacttgccttgctctgctgctggaggaacctcggcgactatctcgaagtacaccggagcgtcggaggaatcggaatctagcgacatacaaagaaaacattgcaaacaggctataagactactgaaacagagaacaaaaccatttttaatggattctacacatttttcttgatttactgagacttgaatgggcttaaacggagctcggatgaattagttatgaattttagaagattcactgtgtttattactataaaagaaaaaccttaaatcatttattgcgcaatataatccagggctgacgtcatcaaggcggggcgcggcgccgacatgcgggccccaccggtcagcggctcggggagggaggaagggcgccgacaagcgggccccaccggtcagcggctcggggagggcggtccacggcggatcaggtccacggaccggggaggagcggcgcgccacgcggcggccgaaccgatggccccgatctacccaagggtagatcggacggcggcgggagctcgcggccggtgcgcgtgggcacggcgcaaaccggcccggcgaccatggcgcgcgacggcgcggcgcacatgcggcagcggcgcaagacggcggccgacgacgaccgaccggcgacggagagcggcggctagaagtgaaacggcagctacgcggctaagcggcggcgcgacggctaaacggtgcgggagagagagaaagaggaggagaggcctcaccgacaacggtcgacgacggcggccgacggaggacgatggcgacggcgggacgagctccggaacctcctaacgaacaaaaggagaggggttagagggagagaggagagtgcgagagagcgagggcgccggccgaaggcggcggccatggcgtcactcaccggcgcacgacggggatggggctccggcggcgaacctcgacggaggaggggtggacgaggtggacctcggccgcgcgaacccaacggcggcgacggcgcaatgcggcggcgagcctagcggcggctagcggcggccggagtagcggagacggcggcggcgggtggttgcacggcgcgggagcgatggagagcacgagggagttcggcgaaatggggaaaaagcgagagggggcgacggggaagcttaaataggggaggggagggctggacgtggccgggagaggcgggatttcgccggccaacgtggggaaagagagagaggagagagaggcgggattcgaaaatcaaatcccggccatctcgggcgcgggcgcgagcgggagagagaggggagtgggcgcggggaacgcggcgcacgcgcgggcgtggtcgacgtggcccagaggaggcggaggcgtggacgcggcggcggttgcgggcgcggcatcggccggaggtgggggaaggacccgacaggtgggccccacctgtcggcgaccccgggagaggaggacggcggggcggcctggctgggcctcggcctgcggccggcccagcagggaggagggggaggaaggagagaatgggccggcggcccattcgaaaaaaaagaggaaaaagagaggaaaaagaaaaagaaaaaggaaaaaggattttccctggaattaaaatattgcttgctcaattttaattggttaaaattatttctagaggtctgaaaattccactaaaaatcctgttaatgaatttcgacatgtagaactcaagaaaaattccacatgccaaatccgattattatttgcattactttcttagggttttctcttgatttgcacctgcattttcttggggttgttttaaaaattaaatttggcttgggaggggaacttcggggtgtgacaggtatacaccttaatgtgatctgagtggcttttcataaagcagagatgttatcctatagaacatcttagaaggaacacacctatatgagtccgactgctagtcacagtctatgagatttgggtgatctctagatactcatgaaaagtccaggagtataacttatacgctccaaacagaggggatgcaaatggcaacccagtaccagttaagggtttgagtgaaacctgaatcgcacaagactgacaattcaaggcatagtccattgttcagttgtgatttggtgtagctcttttcctaggtggaagttgaacttaacagtctccatcgaaacactggtataactaataggttcagtttggagaacatttcttgtgagccatgaaatctggtggggattgttggaataaatgggctaggcccaatttaattcaattaaaatctcaatagcccacaagtaatgttagagacaataatactgccttagaaatttaggcggcagaacctcaacttaaatagggtgatattggggatttcctgttgaccggttgaggtgatggttagactgccacacgcatgcacgcgcgccgagtcggcctcagccgttggcgtagcgaggcgaggcggccgatcgagccgagcctgcctgctgctcttccgttttgtaatagacgagaataaagtcaccattaacaaatgaaattcattgtgttgtaacctccacaataaatgagagatccattgttttgtaacatctgcaacaaatgagagatttatttgttgtaaccttcacaacaaatgaaagattcattgtgtggtaaccttcacaacaaatgagatttattttgtggtaaccttcataacaaatgagatttatttgtgtggtaatagagatctctctctatataaataactcaaggtagaggctctcaatgagtgtgtctttctcctgctattgttccttggcgatactcttcttctgttcctgcgttgtctctctgtttccccggttctgttcatcccgcgcgcacgggtgatcggaacgagcaggtgcctccgaaactccgtccgcttgaaaacctgcacgggtaggccagcgatcaagtttttgggtagcgcttcaagcgcgactgctctgcatcatcttcaccaatatgtcgataaccggcgataacaataacactggagacaaggagaaggagcctcctgttaacaccaacggaggcaatactgcctcaaactccagcgaagggccattctcggggtataacgtttcactattaccgttcgttcttcgtttcctatagctgttggtcgcaatattattgcattctcttgtctatattgatgcttattctatattaagtatgctcatgttgtatacatataacaatgtcactagatctactcaaattacaaatgtcatatttattgtcttaatattttggattaaaatatatcgaattgtaaccaaatttccaacagcacttggtgctggtttaccaagcgtgcttctacgttgtttgtgcgatttttgtccaaagagaaaagttcctcgacctgaacaaggttgagctcaaggtattaatatcgaatttccaggttctcaaacccctataggtgatatttgcctattcggacaaataaaaaaaggaataatatgtctgcaatgcagaacaattaaccaccattcaatcatcttcgtaaccgaacgctggttagcagaagactattctcccaacatagaaaaaaaaatcaataaactaccagtcaatacatatttatgggagacgattacacaaagcacgatcgttgtttgttcagtttttcttttctatcttttttacattccctcacacccccccccctgttctatcctttgtttcttttttcatttttattttttttactttgtaagcttctctatttatcaatgaaaactagctacaagcacttaagcatcgtttgcaagagctggttcccaacactaccatcattttccgcgcgcacgtttttcaaactactaaacggtgcgtttttttataaaaagtttatacacaaaagttgcttaaaaaatcatattgatccattttaaaaaaaatagcaaatacttaattaattatgtgctaatggactgctccgttttccgtaaatactgtttgggttgggaacccaaacttgcgaacagagccttatagatcagtcactagtatatctatttaatattagactcggtttgtcatatattttacgcagagtatgatggttcaaacgggtctaaaagataatatatagttaaaaagtataagtcatcaaagattctaaataataaaaactccattttaaggataagatttaaactcgacggaaagattatggacattgaggatgtttagattggtgccattttaaattatacccttttttgataaaattgacaaaaaaatatagatgtatatattaatttagtttgttaccaaacatttgtaatacataagaatctattatattattaagacagctttaaaaagagacaccatgtttactgtggacgcaagaaattcccatattaatcgaagaaaaagaaaagaagagtccaagtagaaatacaaattacaaataaatgaaattcgaaattaaaaataatcaatattaaaagaaaagtccatgtaaggactcaatacgagattaattaaaatttagaagaaaattaaataaaatctgaaataaaaaataaaagaagagttcaggtaggaatacaatttaaaaataactaaaattcggaatttaaataagcaatattgaaagaagagtccatataagaactcaatatgagattaattaaaatttaaaataaaaataaaacaaaatcaaaaaatatctctactacttaaaaaattgaagatgattccgtcgtccgtccgtgaaaaaaagggcgaaaaaaaatcaaatatcaaataaaaagatagggcgaaaaaaaaatccgattccccgtgagccttaatatgagtcagcatcatatttggacccaaatcctagagaaaacactagtacaagaacacaagaacagcatcaacacaaacacaagaagaaaacgcgacaccggaaggggagggtgctgccgtcgccgggccaccaccacctcccctcccttcccactagatccagcggagggaagggtgccgccgccgccgtcgcctcccttcccgttggatccgacggaggggagggcgtcgcccctgcccaccgcctcccttcccgccggaagggagggcgttgccgcctgccgcctcccgtggctccatggcgagaaagaggaggcgaggggcagagaggcgctgaggtcgcgggtagagagaggagagaggaggcggggtgtcgcgggaggcgaagagaacgagagagaggataagggagatagagagagagaggaggggcggtgtggttcggtttatacgggcagtttttttttaatatgtgctattttggcggtgtggttcggtttagttggccggtttttttaatatgtgttatttttttaataaaatcaacacctataatataaatataggtgtcagtttttaaaaaattgacctactactctgtaaaaaaaactcaatggacttttttctttttgaaccattttaatgcacccggagttttgtatgtctcagcaagaagagaacaaatctaccatctgaatagtcgatacatataacaacttaacaaacgatatgcataatttgcacactaatttgtacacctatggaaaaagcatttatcgataatccataaatgtttgaggtgattttccattcatgcatgcatccatgaatctcattgactaggcgtgaacagagaaaacatgtgcaatcaaaatctataaatgtaatggatacatgttctaagtgggttgatggtctaattaatgataggaaatgttaaataatatagctagggcacttgaccctgtttttcctatgctaacataatttgagcgcacacttttaaacaccttaatcggatatgatccatttgaatggttgtactctagctttacacttaaatcaggccaaccattagagaaccctcttaagcatatcatataatcctataaacaggatatttatatatgctgatcactatgttctatcggagtataaatagagcatgaaaattctaatttatatccatgaaacaggcattcgtttaggattaatgaaacagattttcatatgtaggctaataaagtttttccaatttttatctaatttcagttgctttttcatttacattattagttttagcactatttgatccactaaaaattattgtaacttatattttctctatagtaaattatttgtagctaaatttgaaaatatgattaagttatataactttcctgatattgaattatcgttccgaacaaagttatctgtagtttcatattgttatttatatgtttatatttccttcatcattttatgtccaactatataatatatgatttaggattttaatttatgtcaatgaatattatttagaacccgttacaacgcatgggtattattgattttttactagtaagaaaataaaataaaacccggaattttaaaaaagagttcaagtagaaatataatttaaaaacatgtaggattcaatgctcagagaatgtctgctactgctacccttgcccaacaactgttttcattcccagatttgttgctgttttacaagtatagtcaagaacctctccaacacctcgaaggatgttgtttggaaatcagacaatcttcaacttcaaggttaaccttcctagattaacttgggagaggagggatgggtgaaatattgttgacatcccattcttctgaataagtactatagtttttagaggatggaacagcagaaagcatatctattgcacttgtaactaatgtgaacgatcctgtaaagtgtaaatcatgtgttggtactgttatatctgccgctctaagtgaatctgattattcaatgggttttgtgtctgtaatttttgtatgtaaatcagtacagtagtaaagaaatcagtacagtagtaaagaagaaccgtatgagcgcaattggtcaacattcatgttcatttacattggtatatacggtagtaaagaagaaacatatgtgcacaacatcaggaaaaccaacaagactaagaggaaaactaaccagactaaggaaagattactgttgtgctgacgaaagaatcaacaaatttagactaagagaaactccgtagaacagaaggcacggaggaaatcctaatcggcaaaatgcgttattcacttgctcagactctgcccttcttgtgataatctcgggcctccccagctcttggccgccttgtgtgtcgtcgccctccactcgtcgtctcttttcttggcgatcaccggcggcgcaccgctgaccgtgctgcctgacgaatcaaagggctaagaaaggtccttaaaggtcgatcttgtagggatagctctaaaagatcattgtgtcagccctcgttggctaatgtttcttgtttttggttcttggacgagctcaccgccggctgccatgcccggggccccttacttgcggacgtctggctccctccttgcaccgtgatcgcctcctctctccctccttgcaccgtgatcgcctcccctctgtccctccgagccgggtcggttgctccctcgtccgcgagagtcaccggccttaactgtcgccggcaatggccactaccctttaactttttttttgctacgggcgctgcaaactattgctacagacgttgcgaactatcgccgccaacgagtgctttctacgctttctctctcgccactgccttcctctctcttttccaaaccgttacagaacttgtaacaagaagaggaagattgctctttttagctcctatcctgcttatttgcttctcttctgctattaaatgtaagagtcgttttttttctggaaggcccttatttttatacaaaactagaaaaaaaacaagtgtatgtattatttttaattcgtacattttgtatctactatttagagatgatctaaaacgcaaaatttattaagaaactaaaaaatcggcgtgccgttggcacccttgctagtcaatatatatacacacacacacttatcactcaaaaatactacatgataaaattgatgtgtttttttaatttaaaatatgtaaatacttattttattatttaaaattttagagttttcataaaatattttagaaagaaaattattaaccaatattttagttttgacaaatagatatatgatattaaaaaacatttatagatgcatgtataaatgatttatttattatatatagaagtgaaaaacatatttatcataaaaaatttagaatttgtatgacatgctaagcaaaagtaccaaatttaatgtgtcatttattacataaattttgatgaaatccaaacaagtaaaataaattttgagattcatcaaaattaattggttcaaatatattttctaatagatttgaatttttgaaagattaatcatttagtatatttagagttttttttaacatatcatgtgtaacaaaaaaaacacaatcattttattgactgaggaggtattgatgatcctattacgtgatataagaaaacaaggttgtcttctttctttgtttgttttggattttttttttctttccataataactttggatttactatatattctagagtagtaggagtagtaccgagtagtcgtaggatatttaaagaaggaaaatgaatgtaaatttgttgttttagattttttttcttaataattttaggtttactatatatattttagagttgtaggagtagtatcgagtagatgtggtatatttatagaaggcaaatgagtagaagttcatgtggttggaaatggaagatagttttggaagcctctagaatccatatgtgatatttttctctagatttttcctcacatatgattgttagatgttttttctctagtataaatttagatttttcttcaaagtaagaggtgccaagtggaccaatcaaaagctagcaaaagagtcaactttagattattagactagtccaatacttttttttataaacattagacctttcaaagtattattttgagtgaaatacccgtttgttccttaaagttgcatggtgatgtcacttacattcctgattttataaaatacttcctccgttccataattcttgatcttttcgataaggttgaggtcaatattttggaattttgactataaataactttgaaaatatttagtttgaaggcactaaaacaaaaatatatatgttagtcttaaaaggtactataataaaagtaaatatttatttatttattttatatattataatataaaactatagttaaatatatattctgaagaccatatcattgtccaaaacatcaagaattagagatctggagaaagtaagtccataatgttggttcaatatatgactgcaggtccaaatctcctttcgattgggtacgactgcctacgtggcgctccatgatggtacacattttgcatttgtccttctaggcaggagtatacgttgcaaaaaagtgtgggcagtgaacagcagcggtgaagccgatggagctatgtacataagagaatcccgtgccacgatgaggacctcaagctcagtcgtcagcggatcttgcaaccctgagctctagcactaccagatcaccgatgctagatcttgaggaaagcaggggaggacccttgacgtagacgcaaccagaacaatagcgcttgacagctagctctgcctctaagctttgatggggcggatccagggtaatgccgaggtcaccttcgcaccgcatgagccgatagccgtcaccagatgcaccacgcccgagcaccaggctcactggatgtggagcttgtgaccatcaatatcgcctttgcgccgcgcaccaccaccggatgtgtgcacggaggggagggtgcaccagtgaggaaggaggagaggaaggctgcgagatgcatggagggcagagcttcacaccagagaagctcatcacagccccatccctgagctctgcaccggccaccccatacattggtggtgacaggaccatctcatcacttgctcatccacagcacccaaccattgctgtcgtcgccaagcgtggacgtggtcagatccactgtcggtgttcactgcctacccttttgtgcaacttgttctcataccaagggggccgaatgcaaaatttaagccaacgtggagcatcacatcggcaatcgtacacggttaaaaggggttcggaccttgtatgatacccaatattattatctaaatatgcattttataagatcgtggatctaagtgacaccatcatgcaaccttaaggacatgccatgtattttactatattattttagtatattttcagctttatgttaattattgtcaaaatacgaatctaattatacaacttcatatgaaaaataaattatttttaaaaaatatatatcaaatcttagtattaaagctaaaactaaccattaattttgaatccattgtaatttttatggaactttagcatacctcctccgttttatattataaaatgtttcaatggttcttttaagttaaacttttataagtctaataaagtttatataaaaaatgtaataataatttcaatccaaagcaaacatgctatcaaaatatttaatgttggatttaattaaactaatttgatattgtaaatgttactaaacttttctataaatttgattaaactttaagaagtttgattaagaaaaaagtcagaacgaatgttgctaaagtgagttttgaaatatgaatgacttttgtcaatattttggcagtgtgatcagttattcaaattagaacttttgtttttgagatgtcatattggaactaagttaccagttaccacttatcagcaattgaccgagatattgtgtttgtttgcatcctccggactgataatacttgttgtttgagataagagtgaggtcaaactttatgatctttgattatgagccatttttaaaatatctgtctttcagatatggtgatacctgtataggttagtcttaaaaaatattttaataaaatatatatctattacttcctccgtttcacagtgtaagtcattctagcattttctatattcatatagatgttaatgaatctagatagatatatacgtctatattcattaacatcaatatgaatgtggaaaatgttggaacgatttacattatgaaacggaaggagtaatacttttatatatattataatagaaaataatggttaaagttattttttttataagaccgcatccttattaaaaagaccagtattatcaaatccagaggaagtagattaatgcgccgcttgcccccagaattaacgaattgggctttgaatctaggaggaaagggcctgcccgtctccgtcgaccaccacgcgcacctggttaatttggttcgccggcgccggcgtgccgcgaccccggccgcaacgccccgggcgccaattccgcccaccagatcacaggctgcgcaactggtgactccgccatcgcgcgcggacggggacggctgcggcaagaacgcaaaaggagaagcacggcgacagagaggagcaccgtcacacaatcggagtcggaggcaaagccaaacgaatccggatcggcgggcctttcttatacaatctctatataatttcacggggatttgcctgccggcatggcactcactacgatcacatcgcttcactgcgtagttggctagtagtccctccttctctaaatgtttaacatcgttgacttttttaaacatgtttgactgttcattttattaaaaacttttatgatatgtgtaaaactatatgtatacataaaagtatatttaacaataaatcaaatgatagaaaaagaattaataattacttaaattttttgaataagacgaacggtcaaacatttttaaaaaaatcaatagcgtcaaacattttaggatggagggagtattaatttgacaagggaacacaagctcgatctgctcagctagcgtcgactcgacgacgatggcgtcggtcgtggtgcgacctcccgtcggatctgttgggcctcgtcatcgcacgcctccccttccccgccgaaccgcgcgcgcctccgcgccgtgtgcaggccgtggcaatccgccgtccgcctccacgtcgcctccccgccgcagctcccgtggatcgctctctcccccaggccgcccgtcgccacacccacccacgccggcgagaacaacgttgttaacaccgtctgcgttggctccaccgacggatggcgcgccctgcaccacaccgccaccgccggcggcgggacgaaaaccaagaggcacacgttcttcttgcacaaccctttcaccaccaccaccgtcccgctcgccgagctagaggacgtcctcgacgacgctttcttaaagcagaacgaggtccgcaaggtgatcatccggtcctcctcctgctgccccgatggggaccacctcgtcgccatcatgaccgaccactataacttccctttgatcctgtgccggccagggaagggcacctggacgcccgactcatgcacgatgccattcgtccgcgtcatcgatattgccttcttcaaggacaagctctatctaattacaacagccgaggacctcttcgctgtcgacctcgccgccgatgaacacggcaagcccaccgtcaccaacgtcgagcgcatcatcagacaaccgagaagccccgatggcatgatcgacgcatttaggtggagtgacgacgaagacgacgacgacgacggcgacgcacgagaggatgacggtgacgcatcgtcgaccaatgacgacggggagtactcctccctcaatgatgagggggtagtagatggtgaggaccatgacgaggtattgaaccaagagggtggagacaacaacagcgacggcgacggcgaaattgagcccgtcactgatgacgatgacatcgacgacgttggccagcagtggtgccccacttgggagcatagaaagtttgagcaattctacgaggaggagtacgcgattgtcggcacctagcacctcttggagtcgtgtgaccggttgcacatggtgagacgggagtgggtactcccgttcatcttgcagaccgaccacacccgcaagctggacgccggaacatgggttccggtcaccggcggcctaggtggccaagcaatcttcctcagtgaactcttcagcaagtccgtgcctgcgcctgcacacggtgaggttgaaaaggacatggtttattttgttgatacatacgacgtgtgggacatgaaatccggcactaggaggccgtttaggtgagtcgataaggacatgacgcggcccacatgggtgtttcctcccaagttgatcgtgtaatgaatgtggaacaagggaaagaaatttaatggagagcaccacgcgtcggacgtacggcgtgagacaaaaaaatcggacgcctcgtgcgaccgtccgatccatgaacacgtgcgtcagccatccatcatgcatggatcaaacaaattttaaactacttttctcttaaaatatttatccaaatcatgatctgattgcaccattaaatccgttgcaattaaatctttaaaacaagaccacacatgaatataatccgatgaaaaaaaaatagcttattattgaattatttttaaatggtgcacgctgttgcgctaagtatatcggaattgtttcactgagtagatcgaaaatgttttatcagacgttgtttcgccttatatgaaaataatgtttcagcgaatagcgaaaggatgttttaattcactgtaacatttgattcatacatagtgaaacatcacgagtacattaggtgaaatatatttaaattgaaaaaaaatcggacggtaaaatgttgccgttgactaacaagtgaaatattatgttatatatttggtgaaacaaaaaaaattagcaactggaacatttaaatattttatgaaacatggtgaagatacacgttgaaacatgtcgctgtcacacatgaaacaacaagaattaacggattgaaacacatgtttttcttttatcaaaatataatcaagcgatatcttgttgtatagatttaattacaataaatacaatggtgtgatcggatcatagattggataggtaatttaagagaaaaatcattttgaagcttgctaaaatacatgcatgtatgcatgcatgaggtggagagagtgtcgtagaaggtagtttcaagaattttgtgaaacacacttaagacacatattgaaacatatcactattatgtatgaaacattttgttttaacggtttcaaacatatgtttttcttttgacataatataatcatgtgatatcttgttgtaaagatttaattgcaacgaatacaacggtgtgatcggttcgtagatcggataagtaatttaggagaaaaaatatttaaagagaggaggaaagaatgaaaagaaacaactagacatgtgcatgtatgttacactacgacaatggttcgtccaatccaccagacagctgatttgcagtattttcctgacgccaacagagagaaaggataaattagcaagtagggactgagctgaccttaggcgtccgatatttttcatctgatcggatgttcgaagagaagcatttttgaaatttaatccgtgtaaatgcttacacgatacatgatgaaagggggtagaattagatatttgctattatttattcaatagatggaaaatgctgggatcggcgccagatcacccctagaaaaatcgggcgcaggcctcccgggcctccgcaccgtccccaccacgcgcccaccacatgcgccattcaacaaattacccacatattatggaaatgctctactaaggaaatccatttcaatttttgttccactaacaatatttcagcaagtgtaatcgtgatgtttcactatgtatagatcaaatgttgcagtgaattgaaacccacatattatgcaaacgctctgttaagataatccgtttcaatttttgttccaccaataatgtttcagcaagtgtacttgtgatgtttcactatgtatagatcaaattaattaattgttatgcgtgtttgtaccatgtcgcatgtctgtccagatttatagtattagaatatgcgacgcatctaaaatcgggcgttcacgtcatcatgcatgcatacatgcaagcaaaactttctaagcgaagctatttttttctcttaaattatttatccaaatcatgatccgattgtaccattaaatccgttgtaattaaatctttaaaacaagaccacacatggatataatccgatgaaaaaaaatatttagcttatttttgaattatttttaaatgttgcacgttgttccaccaaatagatcggaattgtttcactaagtagattgaaaatgtttcaatcgtttaaaaagctgaaacacaaccaaatcacctcatgaaacattttgctacaacgtatgaaacaacggtttctcaaaaaatcgggtattgtttcaccttatataagaaaatgttttagcaaatagcgaaagaatgtttcaattcactgcagcatttgatctatacatatgaaatattacgagtatatttgctgaaacattgttggtataacaaaattgaaacggattccctaatagagcgtttccgtaatatgtgggggatttgttgcaacagagtgtgagtggtgaggacacgtgggaggcaggctgagacgcgcgtagggggagggcgccctttttttcgtggaggcacgtgtggggggagggcgttgtagcgtccgttccgtcgtggcgcctagcgggaaaactaaatcttaaaaaccctatttgcggaagtcgtttctttgcttgatgtctctgtgcgtgccaatctccatcttgaatcccctatccatcgtcaaattcaaattccaaatctcaaattcctcccaattcaaatccctctgtaaaagtctagtttgctctccctaaggtttggtgggc

SEQ ID NO: 19017 - DNA, 1914 bp, Oryza sativa
gccatgtctctctctcgttctctcgctctccctctccccgcctccatccccgtcgagctccccgcccgcgattttcgaatcctccgcgcatcgttgtttcgcgcgcgcgcgcccacgtggtgccgcggtcgtcgccgtcgcctgccgcccgtgccgcgcctgcgccgcctggcccctcgcccctgccacactgcgccacctgcgccgcgccctgccccgcgagccagcgcacatgcccgagccgcgccacccgcatccgtccaaaacctggaggcagagctcccgctcccatccctctccctccccaactcggcaaagtttgagccctctttctcccccctctgtttcccgctttcctctttcggcccggcctctgccctccctccgcttggagctagcgccatggaagaggagcgcctggcgccggtgccagcccgttgcccgcgtttgaccgcgcccgtgagcacccgttccttcccctcgaagctccatcctgcgcctataagagtcgccctacccctctctcatttggttccattcactcgagctcgccgcgccattgccgctcccttgccctgttttgctgtcgccgtccgttgccgagtgtgccggaggagtaggcgcgttcgtggacacgtgacgtggactccaggcgctcgtcttcctcctcttccccggcccgaggccgaaatgatcacgtttcgcgccgtcggctctcgtcactgcgcccttcaccgtcgcggtagtgcatctccccattccccttcctcgttcctcctcctcccccagctttcggcagtagcatgtgtagacctcttgtagctagctggcgccgccccgaccgctgccgctgtttgttgtgtgctcgccgccgtcgtcgcccgagttcagtagacgcctctcgtcgccggccttcctcggtgtgtttcctcctaatccgacgctaggaatggtttcccggagtcgcgtagatgctctagtgcgtaggaatcgatcccccgtcgcgtcgtcgccgtttccctctcatctcgccgccggtggctgccgccgcaatccgccgccgtcgagccccctccggcaaatccgagctgttggctcgtctcccctcgtcccatgaaacctcccggtgtgcttgcccttgcctgcgtcgctgcgcttcgccccgaacgccgccgctaccgtccgccgtccgttcacggccgcgtcgtcgtcttcctcccgccggcccgcgtggcagccacgtaggcgccacgtcggcgccagctcggccggaccgggtcaagccgaccccggtcagccgctccctccgtccccgctcgcgtgtgcgcggcccacggagagccgagaggctatgcgtgggcccgccgcgcgcgtacactgcgcccctcttccaaaccctagcgtcgcgtcgcgtgcttcctcggcacggtgagccgagccgccgacaagcgggtcccactcgggaccgcgcgaggtggacccggcccaacggctccccctccctctctcccccgcgcgtgcctttgggccgccttcaagggccggccagcccattagctcggccgagccgcgccccttctctcgggtcgcgccctagctgcccgagggaagtctaatacccctccctcctccctttctttttcaaaaaggatttaattaaatccttttccctttagacaaaaatccaataatcgtagaaattcaatatcttctcaaccgtacatccgtttgactccgttcaacttccaaaaatttctcaaatctcgagatctatctaatggcatgcttagaggtcaataatagggctttattttcgccgtttgttgagttgtcccatttcgcgtgtagttttggagcctgaagacccgcagtgcgaggatttcgagtatcaagctcaagatgggctgcaggaat

SEQ ID NO: 19018 - DNA, 5825 bp, Oryza sativa
tttgtctagttatacacttgctggatttattacattagttgatcatggaaattttacatgcatcctactccctccgtcccatagtataagggatattgagtttttatttgtattgtttgaccactcgtcttattcaaaaaatttgtgcaaatataaaaactaaaaagttgtgcttaaagtattttggataataaagtaagttacggaaaaataaataataattctaatttttcttaataagacgagtggtcaaacaatacaagaaaaactcaaaatcacttatattatgggacggagggagtacgtatttattcaacatttcacgagtatgaatacaggtggcagtgttgtttcttctttctaaaaaaaataatacagacatatgttcatacacactcgcacaaacttataaatgcacatgcttatagcctacttttatgagcacattctaatattgggttagcatatattaagttcgatgaagttatcaccagcgtctttactgttgatgtgtgcgtcgtccacatctaaaaactaattaaagtaaatgcaagataaattttgctacatgagattgacttcggggttttagctgtagaacaccgtacaaatgaacctttggagaaagtcactcttgaaaattggatatttgttgataaacaccgtacatattaaaatatttatttccgattgaataggacatagaaatcgtgtgataagttagaaatatccttgggcccacatttcagctctcccatctctcttctctcctctctatcccttcgtcctctcccaatgatcactgccactaccttgtcatccctatccaaggcagcctccttgtatctctctgcccgtcaacctacgcggatccccttcctatgtagactgccactgtccaaagaccatcaacatccccgagaacctcctggccccctccccgtccaaatcgacgcctcccaatgaccaatgccaccaccctatcatctccatctcctctctctctctctctagatctggtgcttaggaaagctcatgtcatcatggactcctcgaccgccgccgcggcatgtggagggagaaggagaggtggtgccgtatcaacaacagtagtagtttcagggccggtcttggggttttggggccctagggcaaaaacttataaacacgtagcatttaatattcgatgtgataaaattatccatatataacattttaaaacttcaaagagaaataaatatcagtagtgagcagaaagacgaccgacggatgatcgacacgagcgtggctactggcgagccgtgatttgctgacttgatgtttccgtttacgagacgccgagaagtcgagaagtcgtcgagagcgcaggagtagcgagcggcgtgacgtgatcgagacggcacaacgcgagtggtgtgatgtgatcaaggcgaagtgacgtaagtcaaatgaagatcgcttcagcttcgctgaaacaggcttgacgatggactaaaatttattttctgtattaggctattcaattgtctaacttaatatagacccatggcccatgaactagaattatacaatacgtagtatatatactatatgtgtataggggccccctagattttgaggggcctcgggcggccgcacggcctgaacccccccccccagggctggccttgagtagcttgaaatgtggctttgctcggggcccaacgtggcttgtgtggtcggcaagcatggtgtcgcatgatcgttagtgtggtgaagggtgaccgatagcgtggtgagggaggagaggggatatagtgaaagagagatgggatagctgacacgtcagcctaagggtatttatgacatttcacattatttctctcttctattcaactgaaaataaatattttaatgggtgtgatgtttagcagtaaatatccaacttttgatagtgttttccccaaaggttcacttaagcgatgtcctatagctaaaaatgcaaatgccatgtaataaattaagtttacctaaattcaaacacccatgctaaatcaaatcttgaacttgaatgtgggtgggcaagtttcacctggaagaaacctagccatctacacttaattcacatttgcgtaatattgctagttgacttagcctcttcatacattttcagactatgtttacggcggtcgctactactatcagtgttatcatcaatgcataaaatgacgaacatctgatttggtagtaatgattatttcaatacccctattaataaattcatatgaatagaccaggatcagaccagagagataactcaaaataaattaactcctgctaactttcttctaatatatatatatatatatatatatatatatatgaattgagtttggcctagttcaagacataacattttagcacatgattaattgagtattaattattacaaattttaaaataagtttttttaaaaaaacttttacataatatttttttttgaaaaaacacaacagttaaccgtttgaaaatggggttaaatcgagcattggagaacgtttatagacatgccaacagggtttacatgtacggtaaccttatctgtttttgaaaccacgatatacctcgtggtaatcgcgcggttatcatgggtggcggtaaccccacccaaaatagtttggtgaattctgcatgtcagtgtgacacgaacgccacacgctcgtactgcgttgaaccaacggcagaaaagtttttaggtagcccagtaagggcatctacaaccaaagacactctatggggcattataaccaaagacactctatgggtgccctcactaaccgaagccactccgtgggacacctatctcccaatgaagcatactcgtacctgggttcttcaaaatctcaagcaaccaggtgaaggtactccaacccaatgggtaatcccaacccataaagctacaagtgttgtttttctcttttacccctctcttcaaactaaggaatttgaagacacgaagcattcagaatacatgaatatattcaacacaggaattttcaatcaagggtaacctcatatattataatccaattaagcaatagaatactatatattttctatctcactactctcaagtactactctctgctccctccgtcccataaaaaaccaacttaatattggatgtgacacatcctagtactacgaatctggatatacatatatccagattcatcgtactagaatatgtcacatccgatcctagattcgttttttatggacggagggagtagacaggaaagccttatcttatcctcctcattcatcgggtcattcaccgtatcatgtcccccccccccccaaaatcttccagaggcatcgagagcagcaaaccatcaaaatcaacagggatggctgagcgagcttgcgcgcgcggccgagctgggtaccgggcggagaaagcgaggcggcagtcagccgacgagctcgcatgggcgcacggtaggagcgagctgccaccatggccagcacaagctcgagctgcggggtttgcgactttgccccaccgcgccaccgccgattctgccacacagcgccgctcgtgagctccctccgctctctctccctctctctctctctcccgtcgcctctctctcgctgctgcccgtcgtcgccgccgacggagagcaggcgctgccggcagctggaggcgacagtccagcgccgtcgtgcgctgatctggccccctcgcggccagatcggatggaggggcgccggtgaaggttgtcgcgtaggtcgtcgccggcatcgtctccgccgctcgtctccctctccctctcgccgccgacgcttacctttctcccgccgctcgtcaatctctctccctctctctctcccgtcgcaagcggccgtgagggcgatgaggagggtcgccgccgccgccggagccatgccgttgctggtggaaggggacgagggtggaaggagaaaaaccggaggacagagcggtgtccttgggctactcccccacccaacgcgcctcctctatcaatctcccaatccaggcactcgtagagccgcgcccctctactaggggcgcgcgcttttgctggggccaggggcggagctaggtgtatcaagggggtgcccaggaacccggttcagaaatttttttagctatagtttatcaattttcaccatatatacacctcctcgattcaaacttaggcacccgtatcaagctaaactcaatctaaaatagactaaaatatatgagtggaaccccctcaatttcgttctacctccgcccctggctggggcacggcacggcgtgaaaaagggacgaggacggacgacgtgagccagggacacggcctggagagccgcgttgaacatgccctaactgtaaatacacatgacgatacagcgccccggaggaggagcagcaacacgagtacagtaaaaacgcgcatgtgcattgtgcacgcgagggggcgtggcggcgacgcacgggtacggtgcgtgcgggctccaccgcggcagcgacgggtcggaacctgacaacatgtgtgttgccccggaccacgcgcgacccccccttccaaacccgtcgcgtcaccctttttcccccggcctgtcggtgggacccacctgggcatcgcattgatcgatccttttttttttcttcttcccctacgacgtcgctcgcccaagtggaaagccgaggaaaccttgtcggtcacgagccccttttttacatgtttggactctgtaggctgtcggctgtgtagcagtagcttctttccgccgcgtatcgtatcgatgtccgaaagaacatcgaacggacgttttcagtgaacaaatcgatcgaatgctacgcctactcctagccgaatactccctccgcccaaaaaaaaaaaaaaaagaaaaccattcctatcatcgcaagataaatttagtgaggagtgaaaatgaccaaaatgacctttatcattgaaaaaagtagtaatggtaattggtagataaagggtatctaaggaataaaacatctcattttatatattgaagataggtaggataatagaagttgattttgtgtggaagaaaatttaaactctataagttaagttttttttttaaacggagagagtaggggtgtgtttagttcacgctaaaattgaaagtttgattgaaattggaacgatgtgatggaaaagttggaaatttatatgtgtaggaaagttttgatgtaatagaaaaattaaaagtttgaagaaaaagttagaaactgaaccaggcttaaaagtgcatatgtacgcaccaaaaccgagccagccgtccaagccttattacagtcgtaacaggtcaaattgtttttaaagtcgtaccccctctcctaaaaacccaaaggaaaaacgtttgaattatacccttagtctactgagtaagtacgaattataccctatacctaaaaatcagacatatttcattcttaattattacttaacaccagacaaattaccttctaatttaaataggagtggttttaattctacgtgacagtgtagtaaaaaaatataaaaacttagtactcgatcttgtctagattctaacatctaaacaaagaaatatttttgtgtacactgttaatgaaatatctgacatttggaatgtaatccctccgttcaaaaataagtgcagtcatctcgttcaaatttaaactagaggactatatttattttgggacgaagagagtataaacttttgcatgaaaatcaaataaaactccttgctcggtagcttattttcaccttattcatgggatccttaccgctgataatttgctc

SEQ ID NO: 19019 - DNA, 986 bp, Oryza sativa
cttttcctgttaaataccttgacattccaatgcattttaggaaactgggtaataaggattggaaagttattgaacaaagaattgagaaaaaacttagtagttggaaaggtaaacacatgtctgttggaggtagactggttttgatcaattctgtcctttcaagtttagctatgtttatgatatactttctttgagataccgaaaggggttcttcaaaagattgattattatagatcacgtttcttttggcaaggggatgatcataagaaaatgtataggctagctagatgggatattatttgtcaacccaaagatcaaggtggtttgggggttcataatttagagattcaaaataaatgtcagttgagtaagtggttatataagttaattaataagaatggtgtttggcaagatttattgaagagaaagtatctttataataagtctataacccaagttgataggaaacaaggtgactcccattttttgtcaggactcatgaaagtgaaaaacactttcttaagtatgggttcctggattgtgaataatggggaagaaacaagattttgggaagataaatggctaggtaatatggcctttagagataagtattcatctttatatgctattgtcagaaggaggaatgcttctattgctagtgttatggcctctattccgcttaatgttttctttaggagagctttagttggtcagaatctaacactttggcatgagttgtgtgcttctattgttcatttccagttaaataattcttctgattattttagatgaaattatcatcaaaatggtcagttttcggttaaatcaatgtacttagctttaattaataatggttacattgatagaaataagtttatttggaagctttaagatgttgctaaagattaagttctttatgtggtacttgcttaagggagttgttttaaccaaggataacctagcaagacgaaattggaatggcagct

SEQ ID NO: 19020 - DNA, 845 bp, Oryza sativa
catcaatgcaaaggatgaggcaacggtgcacaaatgctaggatgcaagctgcaaaagagaagaatgctttctgcagaatgcttgcattgccctcatcattcttagctgatgaatagtgctgaaggtcgatacaggtgcctggattcctaaactgaattattgctagcaatttcagcaagttatcataagatgctttgaatgtgccaaaccttgtctctatagccttctgttttgccctatatgcctttgcatagctgatggtgtgcttgtatttttttttcttttatgtgcataatgattgacattggttcaaagtttaggttcttcataacatggccatacacctcagctgctatggatgctgatgtaatattacggtagtacttctccactccttataagtggcacacatgcttcgtaacaatcgagaattgccagcaatccttccatttacccttgtatgcgtgaacctgccatggacagtccacctccgtcacacacctaacctcatacatagttttgcaagacttccctaccctaaactctccctgcaaagaaataacaaaatgtttcaccgcctccttcaaatcctccaatctagcataccgagcaccttgcacgacctcattctccttatactcccatggcatgtgatggccatctgaaataatcaggcaagaaaaatccttgttgcaaaccatgggaatatcctcgtcagacgatgcatctccaacatccttctcgttttccgcatcctctcttttcatcagattcataatactaccaatcctcttgtcacacctcgattttcgttcgggattaaaaatcattaaataatatatttt

SEQ ID NO: 19021 - DNA, 1741 bp, Oryza sativa
tcaagttgcttaagcaaataaaataaagacaggctccgacacagttacaccacacaccggcataaccatgccccacacaactccaacaagaagacaaacgagaaagaacacacgcgcaagcctactaactgctcgtctaccgctgcgacgggccaggacggaaggtgagcaacagcgcatcctccatgctaccaacgccggaggcttccccctcctggggaaccacgggcgcaggctcggcacgaggggtctccacgaagcaagtccacgccagggactgacgaacaagctcgggcctggaggtgctcttgcgggcggtgatcttctggctgcggcagacgcggcgacacttggggcgacagacctctccctgggtgatcttgagctgatgcagctgcgcctccactgcgtctaggtccttcttcagctgcagattctcctgacgcagctccaggatcttcatgttgttctcgaccatcccacgacgcaccatctgatggaagtcgatacgagccgcatcgtacgcctccaccatgcgcgccaggtgcatgatggtagcgtcatcctccgagctagcatcccggaaggtggcgaagtcgcgggctcctccgcgacgagggtggtagcggtagggcgagtgctgcaactcgtccgggtagccctggtgaagagtgccgatggcgaggagagcggcgctctggcaagcggcggggaaagaatctccacccgcggtgactgccaacgaagtccgctcgggagagccagtgaggatcactgcagtaacctcccaagcagcatggggctctgcatcgtcaccctcctgctccgggagcggcctgccctggtagtccactccatgcggataccccaggacaacgcacatgccccgcagctccaagacgaaaccagtcatgtccagaccacgacggctgacgctgccggccatctacaaacaaaaacaaaaagaaaagcaacattttaaaggtcatattttggcgataaatgaagcagcaggacagagagagactagaggattttcacaaataagaagggatttttattttgaaaatattgctaaggcttgggatctaaggctcgtcctagggtcaagggggctctgataccaacttgtcacgaccggaaataacccaacgggtgttccttacgtgcgtgcattaatccttgtcccaggaggcaaggtacaccaaaagttgatacaattcagagtttaacaagcggaagcgtaaatagttaatttattacatgggcagcaaaggcccagcacacacaaagacaaacgagaaacagcggaagactagggcgatgaccacaggcgcttgacggcaggcacgagctagacaccaaagccttcatcttccaggggctcctcttctgggtttgggaaaaattgagcaagactaagtacaaccaccgtactcaacaagatacacccacaagtgcagaataaatgcaagggagtacaaaggagttatactataaagggttagggttgcagtaaatagcatttaaagatatttagttgctcaaaactatttagtaaacacgattctagaactatacaatattatttatcaaggccgtgaacccacacgaacctgccttaacccaaggcctacgatgattcataccgaactggcaacccgaccctgggtcccagctcgtccccaagccaacacaggccaaccattaacaccttttagttgttaagcaggttttaaga

SEQ ID NO: 19022 - DNA, 6497 bp, Oryza sativa
tattgtgtgcctcggctgattcctggacgagggttcacacacatgtaagcgtttggaattttggatagaaattccgggcgtgacaccattccatagtgtccaggtgatatgaacatcccaaagtctagagttgtaaaatcacctaatgttacctaattaaacagcgaagcatctacctaaaatcatactagtggtaccatgagtagagtgtccactagttggggttttgtttaatctagggtgaacaaggtaataataacaataacaataataataaggtcataacaaaggtaaataggcatggctagataaaacagtgataacgcgggaatttaaataaagcgataatgcaataatttaaagcaacataattttataaactgggattcaatatgttcaaggatgatgtgacttgccttgctcgctttcccaaacgtcggcttcaacttccacgaagagcggatcttccgaagctgcagcgtctacacgaccaacggaaaagaaaaggcttttactctaataactccatataacaagtagaaacaaagcacaaaaatgggttcttgacttcttaaggaaaaattagagacttgaacggtccaattccgagttcaaatggccaagttatggccatttgaaggttatatgctctttaaatgaatatttgcgaatttcttcatttaaattttaatttaaaatggatttattgcgtcagccgaggggagagggcgcgcggaccgggtccacgggagtggggcccacgcggcagcctcacggtccacggtggaccgggcgcacccggctcacaccggccggcgccgtgggtcccatgcgtcagccgcacccgagggcgcgggcggctgacggccgggccccacatggcaaccgcgggacgcgcccgaaggcggccacgccggcacaacacaccgcaggcggcgcacccgcgccccgatggtcgccgccggcgaccaccggcgcggcggagcggcgcccgagagaggggagggaagggggaagcgaatcggcggtccacggctcaccccgggtcgacggcgacgacgggaacggcgaccggagcggaggaaggcggcggcgcggcacgggtcgacgggaacggcggcgttccggcggtcggcgaccgaaacggagaggtgaacgaggtcggcgaggttgcggcgaacccgaagaaggcgacgccgaaacgggagaaggtccggggcgacgacggcggcggaccggagctcggcggcgacggcggagagagagagcgacggcgcgagctcgattccggcggggagagagagcgacgagtggcggaaacggcggagggaggcacggggagcgtttatatagggttgggagtgagagagggcggtcggatgagggggaaacggccgctcatttcttctttattcattgtacagtatgcaattccacgaagctgatagaactggagcaaaggttggatacgtcgatccaacaagaatatgcaaaacacaacacaccgtagagctgagagaagactgcgagcaattggttggcaagaccccggaagaaaaggaagaatatgtgaagacattgcacaagaggaagaagctagaagtagcaacatacttggcaatagcaatgttggcgcacgccgacaaagatgtcttaatggtcccctaccagttcacgtaagctctctcttctttttgtttaattaatttatcttcttcggaattttctgtctccaataagcctatcttatatgtagagaccactacatattattccttgtatatccgaaagaccaattgatcatatcattggaccccgcacactatgacaaggagacatttatggaattcctcactattttgaatttgtaagtgataaacatttcattactataaattgtttaggtcgatcaccagtcttctaactactaataaaacaattgtttccttcaaacagagcacacaagtactaccgcaaaagaggtggaccagtacatattccatcccagaagaagttatccgtcaggactggctggccggtactatcaaatttataccaatacaactaattatcgaacagtacatatatactaaatatatctactgagatcggtccccataattatatcgcagtgctacaaacaaccaccaggaaccaacttgtgtggttattacgtgtgcgagatgctcagagtaaatggaaggtacaaaacaaccagtaaccgagcaggtcatcgaactcttctctacaaagaaacccatctcgcacacacttctcactgagtaccattttattttcctttctgtgtgcagatccccgaaatcccatatattgcacaacgattcaacgacactactatcttgaacgtggccgctgacctctgccgattcatccttcgtgatgtctgcaacgcaagaggtctcttctacgacaaccagagtgaactcacaatggacgacaaatttaaacctctcagagagtgggagaaagaacatatgcaataacatgtacactacttatacatatgcaataacatgatgaaaaaactgtgccacttgctattatatattcgtatgtaaattacgattgaattaatggttatgtattacatgtttgttactgcggcacttgtcttatcttatatgcttactactccgaaatacgataataaatccctcaataatttaatattaattacgagacacatctcaccaaaatgctagaataaatattattttagctattcggaaattgaatttcgcatgcggtctacttaagacgcccgcatgcgaaaatagatcttcgcatgcgatcttcttaggtcaaccgcatgggaaaatatatcttcgcatacggctgcgacatgcgggccggccaaccgcatgtgaagatcgattccgcccgtatgcaaaaacgctttctgtagtagtgaacgttgaaggcgggaggagcggcgcgggcgggggaggcggcagcccccccgatggacgcggtgggcgtgccgagccggccgacaacgacgtgaccacacgggagttgggaggcatctgcgtcaagcattctcctgctggttgccgaggcaatcggcaagagacgacagatgaggactgactggactgcgactagcaagcggtagcaacaggcagtgcatgtgtgtactaacatcaagcggcaagccaacaagcaaagggctgactgacagagcaatgctgcagataggcacgcatcgtctcctcgccggacggtggggcggccgcggatggtccaggtacgacgaccctccccacccattcgcacggacggagcgcggccgcggaggagggggacgcgaggggcgggagcctcgctggccctcgagcgccccccgccgccggcgctccagctcccgtccctgcagacatgcgaaggggagagaagagatgtcggatataatcttgacttaattagttgctgcacattatgtgtatgtgcagatgtacgtggtcactgagtcagtcacgtagttagccattacttgatgattgcacgcagatgagctagtgattagttactgcatgtgcgtgtattagtgggagttagttgggttgttagtcgtgtgagctgcttacatatccatgcagtgcatgctgaagttagtgcctagagaataggtcgtgcatgagtggagttggtagctcttttgtgtacataagtactagataaatgaatgaaaatatgtggcatggttgccgagaaagcaagatgtagtttatgtgtccacctctgttcttcctccctacttgtaatattcttgtgtgcgtgtgtctaccaaagagaatttacgtgtttgtgattaacacctagagagtgagaggagatattcctaacaagagagaggagggagagagagagggaggaggatgaagaggagagaggataatatgtgggccccacatgtcagtgggttcacaaatttgctttgaatgataaataggtcccacacatattttttaattctaatgatacctaagcgccacatcaacgccacgtggacagaagatcgagtcaatactgccacataggtgccacgttagtaaaaccgccctccaaaaccgccgagggagtcaaattgcaccggttttaagagttgggggtcgagatatccggttttgtggtttagggtcacagattagatttcgatcacttttgagagtcacgaagtgaacttattccacatcggaatcagttgggcctaccagacaaaaatgggcctccatatcacacctaaagagaggggttgctcaatatataatccaacgcttggtattagctggtctgagctgatccaacgacgccaattaactgatgacgtggatgaataagagggcagcaaattagtattaactgcagtaagtgtggattaatcgtatagatatataggatttttgctatgctgactgcagttctcacgacgaccacggttgttgtcatcattgtgaggatgaggccacgattgttacgatgatgtcagcaaccgttgtcctcattactcctttggttctcgcgcttttccctccatccattgaggtgttgacataagtctatcagcttcatcgtttggcctaaacagtcaaagaataaaccaaaatttaaatttttaaacttaattttgaaattgattttgaaatgcttttaacgtaatttttgttaatgttggcttttaagtcgctacgaataaatctacagaagttttacttataaattaattttaattttctaataagccattttggataaaatgggcaattgatgggagcctacatcattattggggggaggagaattgcgtgttctccatcatcgaggcatagattgatcttgattgtggttctgacttcattattttggccttctgcaccgtcttggttccttgcgggagattggtgatttgctgaatgtcatccctctctttgttgattgttcacagttttaaatgtagtatcgaggttggctgtcatagacttcatatgttccaaccaagctgttgcatctggattggtcgttgcattgttggggatttggtccagcaatccatgtacataggtcaaatgctcggccggtgttagagcagggtttgttggaggagtatgttgtgagaagctaacgtattcaccttcctcatgggatgctcttgctccagcactggttgccgcttccccttgattaggatcattaaccttgtgttccgagttggccccctcatcttttcgcttatgcttatacttatcagccaaaatttaaattttcaaccttaaatttggagttgattttaggattttattcattgtagtttagttttcagcatttgagcctttgcttttatatcgtcaagaacacgtatataaaagttttatgcacaaattatttttcatttgtaattatgttgttttgctttttcctccaatatgcctaatgatggggttgtaaaatagccccatattgcatattcaggcatataaactatcacaaatgaaaattttatcaattagaaagttgtttatctcattgagctatataactttgatatacgtcatgtctctatctgagatcatttaaaaaattcaaaaaaaaattccaaaatagatctcatcatttgtaacgcttatttgaacatgtaaacaatctcaaataaaaatattgaggtctacaactttgatatagggcctatctccattcaagtctgtctgaaaaatttaaaatttatttttcaaaatagatcccatcacttagtgcatattcagacatctaaacgatctcaaataaaaatattatcaattataaaattaactctacaacttttacataaagtctgtctattcgactacatacacatttttttaatacacatttttttatcaaattttataaaaaaaggttgtgatttaaatatattccctcatgtgtgagggttcgtaactgccactcatcatagatcatagatatgtgtgatgtgtcgtagttacgagctattacgatgacgggtcataaatatctttgatgggtcataagcagggcttcccttactgccgtaaccactcttaccgtgggggtacggtaatggttaccggcggtagggtttgatgaattttaaccaaattcaaaatttccaaaacaaatcgaaaaaaacatggatgtagttcttgatttgtagtggcggatggtaaagaaatttgatgaaaaagagtaatataaaataacatttgatggtaaaaccgagagtacattagaaaatggtaaaaaaataatgcaatggacctttaagttgcactgtttatccagcaaattaaggcccaatagtggagaaaatatatatagggtggctgggtgctacatatggacatcattatgatttgaaatgtgaggttgttgaattgacgttgttgacttattatgctatgaattgttgaattgcttcgaagtccataacatagtaaaggacatgctgaatttttgtattt

SEQ ID NO: 19023 - DNA, 629 bp, Oryza sativa
tgaagtaaatatggattttagcaagtagcacgaacatgttccatcagctttcaggacacactcttgcaacgctctcttacagttgataccacgccttgatttatccctacattgaatatcatacaaatgcttcgtcgtaccatgaggcattgttagatgattccgagccttctttatatcctcatcaatgtactcctttactttgtgggcatatatcaacccattgtctaacatggaaggcccagctgttatcaaccaatccctaaagtacttgcaagtgccatgcaaaatgaactcaacgatgccaataaatgggagcgcacgtgtgtctggcatgacccagttgtatagctctgccaagtttgtagtcattacattgtagcgtgaaccatccttatcgaacaataaagcccacttctcctttggttccttctcaatccactctgaaaatttagaaatttctgatgctttcctcctcttcattcgtggtggaccatttgtaagatgaccaactgcctctggagcatcatcaccttcaggctatggcttcgatctgttctcatctgcttgcttagctgtcaagtcgtccaacctgttccacaactcattaaacttcttctgctggtttt

SEQ ID NO: 19024 - DNA, 4113 bp, Oryza sativa
actaaagaatggtatagaaggtacaacaatgaccaatacaataaacctgaagttttggttagaatcattgcagcaatggacaactgaactattcgtgtacctctccacttctccatatacacaaaggaatggtcgtacatgtgagatgatttacttgctgcaggaccagggcaaggatgcacatcaaaatgatgtatagacacactctttacacaataaaagaaaataaatacaccaaaagggaaaaaaataaaagataataaagcacactctctccaggcaatccattctcctgatccttacatggatgttcaaaattctcttctttgaacagggagaaatggcattcgttgtgtaattgcctcgttgacacctatgagcaaccaagacatttacttactggacctaagaattccaggaagctggatgtcggctgaggtgttgtttcctctgcccttaaaggtagatgtctgaggaatgccctgactacacctgacacaccgtcttcagattccatggccttggcaagctccacggctttttctttcacctgaaattacatgacacaccgacaaagtcattgatcaggtacgaaacagacccatcatacaatgtacaccaccatgccatagaccatcttatccacgctatggaaaaaatactacttttcatcgtatcaaatatttcgatttatgttaattgacacttacataaaaagtacataaaagtaaaatctatatatatctatatcggctggtttacacagcagataatggttatgataacttggtacagtttgtattgaaacaaacagtggaaattgacgactttgtgcaatgcaaaaaataccctgctactgcctattgccaaccattccagcacaaggtaatgttcaattctaaatggtattatcatatcttcagattatttgattattttaaaaaggaaccccaaacctagaatgggtaggatgcggggaatcattatctcctgtgtgaatcaagtccagaaactatttctttcaatgaaatgaactagcaactaggtattccagtatttcatttgagggaagaaaccaggaaagcaaggaaagtgagttatcccaacagaagagaaaaaaactagctagaactttttggcaaagacggtcttaaatactgtggagcaagtaagggtctaatactagagagtaaaagaatagcatttaagtagcacaagtggtgcaatgaattaataaactactccctccgtcccaaattttagggtgcccctttttaagaaaaatcaaacttggtagcttttgactaataatcatactaactatatcaatataagtattatatatgctatatcactagattcatattttgaagtactttcatgtgatgctaatttcatatttgttgggaacatagaatgcaataaaataaataaatagtggtcaaagtatattattgaagaccatgtaaaaaaatatagaccttatagtttgggacagagggagtactactataaatcaacacctgaaaagagagaatttaaataaccattctagggccaaaaaacggatattgccagttctggttttcatcctgaaacaggtgatttgcagcacaaaagctggtccattaatttggaaggcaaaaagtgatataatatataatcttaaaaaacaggtgatataatgcctattcaggtcaaactgcaaatacaagcagatctaaataaatagaaaaccagccaagcaaatagagaccaaacaggataaggctccagagaacactggttttccaaaccctagcgagttcaagacagacagtgcaggagcaactctgttgtcacaaagtaggagcagtatatatgcaatgttggttgtttcggtgaagcaaatgttcgttttttactagacattttgcacatcaacagtccctgatgcgcatgttccattgctacctttttcaactatatatttacaaaaaattgaaacataaatatatgaaagtatttttcattataaatttattaataccattttcacatatcaaatccaaatattttttagcatattaaaatttaagatctcaagacgtaatctacttgagaacggaggtagtagattccctgttaactatttacatttgttggacggttaaacatgtttgaatggaagatatcatgttatgtatgaaagaggaagcattagaaccaagttaaaatgcaccagctagtcagcatatctacgaggggtgaaatctatatattcgcaatcctattgacaacatatatacatccgatccatattcttgttgtctttatacatcttaccaacaaaaataacagcaacattaagaacatatttgaattgtgttgcaaagtagatgttacctttggctccatcatgaagtttatagcatcaaccaatttttgcaagctgaattgatcaactggtataggtagaggccctacccctctagcatgcactcggtctccccagaatggttggtcaccaaagaaaggtacaatagttgtagggcactacaaatcacacaaaggctaggttaggagaactgaatcattttcaagaattagcccaaaaagtagcacaccacctgccagaccctattttttgcaactgtgttaacaggaatttctgaaagttaggtggaattggaactgctgttagagttcataaattcattcaatccagaagtgtaaccccaatttttattagttaagccaggtttttcttttgagagagagaaaggagggagatgggctaagaagggagagagggaataccgctgctttgaggccagcagctgttgttccagcaccgccatgatgtacctacagaagtaaaaaaaaaaaaaaacaaagagtgagctagcctctccctgaacgcacatgcaaacttaacatcataagttctttcaatcaaattagataaatttctaagtaccgttttagtccgtaacaggtacttatgccatgaaagctactcataatcaataactgaaaatttaaattttggtttataatttcactaatcagtactaaaaactattaagaagtaataactactaatctctgaaagttaaacttaaagatatctacttcatgccaagcatgacaagcaaaatgcttaccactgctttacactgcaggaagagccagtcatgggggcagttatcaagtagatatacaaaatcttttggctctgccactgccacaatgttttggagttgtcaggatggaggtaaattacacgtgcacagaaaaaaaaatggcaatgagaaacaaggtcacatcttaagaggtgaacttacatgttccaagcccaccccaacctttgttgatgatacctctctgtccagttatttcaagtgctttgacaatgacttcagtcatctttgctggatcttgaactggctagtatacgaacaaatgaaaggagtgaattttcaaaacacaacaatcatagtatcctaaaattcattaagaaaaaaactgaaccatggaatcactatttgcaagcagctactatgcatgccgcacagatcaacaccaccaaggcaccaacaactcattatcataagcaaaactaacaaggaagttcatccttgtttcctaagtgtacacaactgtttgtacaacattgacctctcccccaaggtcaaatattggaattgcagttgcagaatggccaaaaagatcacagcataacaaaatgtcctgtgtggctatgcttgaagttacttttttcataaatttattctatacaaattgagcatagcattttatgtaacaagcttctctggtgcatcaaagttatggtttccataacaatttgatctcctgacatccatataccattttctagagtaagacataaactattgtgaataacataactattgtttgccatgagatgctatgctaagcttcataagtgacataacagtgtactattagatgtaaatatgcaatggtaaaaaagtgaaaacactgtaaagtgttgtttcatgcagtaaaataaatattccctccatccctaaatatttgacgccgttgactttttaaaacatatttgaccgttcgtcttattcaaaaaat

SEQ ID NO: 19025 - DNA, 1363 bp, Oryza sativa
aattgcagttgcagaatggccaaaaagatcacagcataacaaaatgtcctgtgtggctatgcttgaagttacttttttcagaaatttattctatacaaattgagcatagcattttatgtaacaagcttctctggtgcatcaaagttatggtttccataacaatttgatctcctgacgtccatataccattttctagagtaagacataaactaatgtgaataacataactattgtttgccatgagatgctatgctaagcttcataagtgacataacagtgtactactagatgtaaatatgcaatggtaaaaagtgaaaacactgtaaagtgttgtttcatgcagtaaaataaatatgagttccactaatccacaagctgcattaaccaccgatgtcatttggacaactacagaaatgataacacatgcacacagtcctatctaattagacaagcagttcaaagtttaactatatagtacaagtaaaggtcaacaaattgtgccatcatacatagaagagtagaaacataatacgtcaaatgatgcctagatcagaacaggggaaacaaaaactgaaaacctctaataatacaaatcgagatcaaagtgatcttacaagactaccaaacccaacgtatatgggcttgtcaccagcttcaagccattttataagtggttcaggaggcacataattggaagcaagatcaagaaagcaaaatccaacaacatcaatcttagggccccaatctgcaacagaatagactatgtaattcacagtagaattacagacaattaacaacaaaaattgctcagttaacaccaaaattgagcaggaaacttcaaggttttttccttaacagttaacgcactaatatatccatatcttacaactcatactattgaaaggatatgatagttccttatacacatcagtgattactgaaaaagcataaaatagcttaacaagcattttcctaatgatatattttagaaagaattggatatttgccaccagagtttgcatcagtcatcggtctgccatcggaaatgagcttattgctacagtgccattggtttttcggtggttttgatatatttgctactcctacagcattagaaaacaactaactcctttaggccagcagcctctaaccatcaaaagaaccccggggataggtacatgacccaaaaaaagaatgctctccacacctttcttcatttctcctctctactctctcccatattttttcctctcacatcaatcggctgcactcattgccaaccatgcatggcactccttgtcagctgaggatcccctccatgggtcgtggagctatctccatcagccatctccacctttgaaag

SEQ ID NO: 19026 - DNA, 9681 bp, Oryza sativa
aaccccccccccccccccaaacaataaaaggaagtactaaaggaccctatcctatttcctgtgttaacatgaagtttggatgtccacatacacaaaatgtccatatctgacgttaaatttcattggaattactctctctgtcccaaaatataagcatttttagcatggtgacaagtcaaacattttcaactttgactattaatagcaaaaaaaaagatcaatcatgtcaaatttatgttactagatttattattaaacaaactatcataatatgtaactctttttatttaaaacatcttccttttatagatattgctggtcaaagtagcatctcggagaccgtgtcagagttcaaaagttcttatattttgggacggagggagtagcaaattttcatgctcattaccaattagaaaaatgtggtatcaaactgaaaggctaccaatttcagttggcattactaatattgacttggttcacagtgttatcacagcaaatactcaagcaagctcttttcaatacaacaactgaatgctataagaaagtcaaatgaaaagaaaccataggaccagattaaggtccacaagttttaaaaactatacaatcgaaggatgacaaggttaagcatgacgtgaaaagggataacatataaatttcagataaagctaatactcatcaggaacctttcggttttggaacaaggtgaggactccagatgtaaccatgaggaatgtcattcccagaaccctgtgcaccacttaggtatgttaccggacgcaacttcagcttcttcttcctaaattcatttatcatatctcggataccaagccaaatcatagagtcaacaatttgataagaaagctgcaagtgtaaaccatttgaagattagataacaaatcagatcagaagaaaatgagtgatttgagaatgaatctttcaacaagtgcttgatgtgagttagggagatgatctctaactttgacatgtggtgcatggttgtttttagggaatgcagcaaaattgcaacctatttaattacaagaattactataaattggatcaaggtcccttgcaacctaaagagcactcccaagaacaccagccacactgaatgaagccagaaactaactctctgcatacagtaactcacttgagtttaccacccaaatcagtctaacaacaaacgagcacaagcaggcaggccaaaattgtcagagttgggatcctatcccagtagtatgcacaacaatgcaaacaaagtaagcacaacaaaacctattgtctgattgccatttacaaaataacagttcaagccatttcaaatatctctactattataaaaattgaagatgtttccaccggaattttggtacgtatccaattcgacatgagtctaaaataactattgtagacccccccccccccggcccagcccaacccaaggtcccaagcctttttttctcttttttttttcttctttgccttttcttctctcctgatcatcctgatttctccctctccttccaatctctgttttctgataaactttagctcaatattttagaaaactgcaacattagtgcacaattttatcagaaaactgcaactccatccccatttgtgtccaataggttggcccaatctgtaaaggccctattgcatgttgctaacagaatgtcggttctctaataaaacctacactttttgcagttccttgaaatgcccagctaaagttgaagatagttttgacagaatagttgcactttctgaaatttactctggcattaacccatgtaataatgaatagttcagatacaatccgtgggcaagaacatgttaaggacatagcctattattacacatatgcacaagcgtgcacatgcctatggccagcagactagccatctgcgcaccaaacaaattacagccaggtgttctgcatcttaatctatctgttggcacattgttcagttggataaggtctttgcttaattatgggttagtcacctacttaagaaggcagccagatatagtaatcgaacgcaagaaagaacaaataaaatctaatctcatctaagtgttcgtcatatataatgttctctcatcacaagcagctgacactgccagctatcctccctgcagtgtctgccgcatttaatagtataaggatcattatgtattgattaaaagagaatgtaagctcccggcaaccttttttgtagtatttctttcagttcatcaattagcatactgactaagaaatgggaaatcgaagatcaatccttgcctgccattttctaacatatgattaacgctatgcttagttgcttactccaaaaagaagtattcctgaggcctatgccataaaaccaactgcagttttcaataagcctaagtgtcacaaaatatgatagttaatcaattagacgcggttgatgaaaaatgggaaatgtctaaagcccttagaatgctgcttctattcttccatgtcccaaatcagaaatacccctctaaatcaactataaggttcaaggattaaagatctactgaccttgaaaatattgaacttaaactataaatgcgaaaatgtataacagcaaacagcagagtgttttctttcttatgttcttagaatatatttccatagatactcatatctctttttgttctttcatgaggcttagaaagggcattcccagacaaatcattcaagtatgtgttgtttatcctttctgtgaaatttacaatgatccagaatggcctacaccacagtattagtttgtagtatgtgccaatgctgtgggtttggttcaaattaagagatggttatgggctcaaacctataattaagctacccaccaaaaaaggcatagagtaagctaaccaccacaatataagcactaatgattctgttttttctactgttaatgaagcaaaaccacatatctagcctaatggcaattgcatttaaactgtctaagtttgctgccaaaaacaaaatcaggtttagctaacacagctgggttatgccggtagggttaatttaatcattgagcaactataacaaatgtgtctaagagaagaagtttaaaatatttcctgaataaatatgtaagatgcaaactcactcgatatccagccgcttgtttcacacgagaaagaggatgggggaattcactagttggcctgaacaagcagcacaagttagatctccaaatgagaatattcctcagcaaatgtgctcttcaaagaggaagcagaacaatagtgactcacgtccatggcatggtaaagaatatatgaataggtacttttagtgcctctgccacatgagtatgtcctgaataatcgttaaggtcagcagcaaagaaacatttataaattttcatagaagtgaattgcaattggctactggaccataaaatacaaaacatgcaaaaaaattcacactagagcaccttgtaaacacatcattgcctaatcatttgagctggaaatgactatgattggttccaaagtgataaacacagaaaaatcctgaaaagagatgcctccagaaagattggcgaaacagaaagagcttttaaagatgtcaacttcccaagtatattactaggtcagtctgcctattaattgcacaccaaagaaaagcaccaccatcataaggcatgaatcaagaaatgattgttctgaaatggatgcctcaaatcagaaaaataaaccaaattgaagcagtaagaaagaattgtacatgagcaaacttataaaaatttaagatcttttcgttttaaaaaatatatgatcttgactggaccataaaatatgatgacgctgatcccgttggatcctaacgtgcataggatcttttcaattctgacgaccatgcaaattagtaacttataacatataaccttcacagtaacaattttcacagtgcaatactaagactccaagcatgtcaggacaaaaaaaaaatcctgccttggatcctgatcctcacaaccttgtatatgagtatgtcagaaattggtgttttttagagtagtaggtacttagttgagcatataataaacaaacttggagttacacttgtaaggtagagagaaagtaaagcaaagcgcaagaaatcaatccaaagctggtaagatatactgaccatatgctggagggttagcaatgatagcatccactttgaaaggaataccagtgtcaggatcaggctccttgcacgcaggtagcaaagagaatataatttctttcatctgtttcctctgaataggaatttctgaaggaccagaaggcaagaatcctttattcttcaccatgtctgctcaaatatgaatataccaaatatattaatcatcgtgacgtagaaactgaaaaaaaatcaactatgtgaatacaaggatttattttcatacattcagcaagtatttttggatcaccgccaagagggaaaaactccagaccagccgttagaacgaactccttaaagtttgcatgggttgccaatctcacacggtgtccataatcctaaaaaaaacaggtaatggataatcctagtcatacagaaaccatgtatttagaaacattaagcttgagaagcaaaatagttcacctgatgagagataaaataatgtgaaattaacaaacaatggtagcttttgatctaacctgtaagcgtttgcctatagcaatgaatggctgaacatcacctcttgtgcccacaataagaataacaatatccataggaggcctcacagatatgtctgctccatccaatggttcctcaacagtaacatcactatagccatcatatgctacaccatcagttgtacttgtttccagagaacttggcacatcaaccaccacagttccatcatctttcactgtagctatccgatttagcatttcgagctacaataaaatgtaaaatatcacaaaaaactgttgaacaacatcaagcatccagatacaaaagagtacatctggcactgagttcctgactattcgaagctaccatgcagtgtatcacaatacacaattgttgtgaaaaaaaggctgaattggctgcataataatctgaataatcaactatttttcaatcagttggaatgtttctcaagtttaatcgtaaaatagactttactccctaattacagtgaactaatctctgatctcatgtagtagtgtttgctttggagatgaagcagtgaagcacaaaatacaacatgtcaagcttagcaagtgctgtttttaagtggttataacatgtcataattttcatgttttaattgactttagttataaataaataaattagtagagcataactatcaaaattctgattaatcagcagtatcacacataatcgtttaacagatatagctatcttagccctcacctctgcaacaggctcctagccctttttcacaatgctgcattatactaaaatgtatcaaattcagatatagctatcttgtccgcgctcagaagataaggctaacagttcacgtgactgttcaaaatggcttctcttatatgaacatatacatgctccaaatttcaaaggtcaaatgcatgaagaaaaggaagctacaagggtaaatagatgaaacagggtgcattgcaaatgaaggaaaggcaagacataggcaacaggactatgttatccgcaccttcttttttagggaaattttatcatcaaataactgtttagtaggatcatcagctggattgttttgtcgacgcctctctgttcttgatctttccagattagatggaccagcagtttcattggttatttcaacattattaatcccacctggcatagtgcttgatctggggaggcccctgtcatctacaaaaacataatgatggtttgaaaaatatggatgacaacattccttttattttacactatcataacttactgaacaaagtgagattaaaatgtatcaacaaaagatatatttgcactatgatttgaggtttgctgcagtaaattatcctttaaaaaatgatacaactataaacaccactgcataatcctattgaacacaactcacaagccacatggtacaactaagcctagcagtgttaccctgagtagtgagtagagcatactttcacactgtgcaatggacctacaatattgtgtaataaccagagctgaagagcacaacctgcttgacagtgtaaacaaaattacaataagtttagttcattggggtttcgatgtaatctaaccctccaaaacggcttcgttttgtgaagagatttgagaaaaccattattcagaaaggtaaaatctaggagaaggcaggccatcacccactagtcgtggagtcaacgcctaaaattagcactcaacacagcaccaaacccccacaccaaaccctcacacgcagcattcccagcaaccagcgtgacacagacagtgaagcagccatcagagtgtccaccaacaaggcgaaggtgcgctcgcaactagcagccatccacatgagcggagatggcagaagccgccgcagatttgggggggcgaagctgaactagggaaggcaaagcaaccgccaccaatcccaacaccctaggttgcctctcgcagcaaagctacacgaacgaagacgaaaggagagaggcaggcggggtgtggggggtacggatggatggatcaccagcgggggaagacgacgaggccgcggccgcggcggaggcggaggcggtggcggtggcggggttgtcgccgccgttggcgctggctcctcctcctccttcctccacgcccttggcctcctcggcggcggaggccatttgtagccgctctctctcacacacgcggatgtaggcgggcgcggtggaactccggcgccgcccccgccgccgccgccgtggagcaccgacgccgaggcaaaaagcgaagatgcgtctctgaaatcgaatgcctttgctttgctgtgttgctacgtgcgtgctctgctgtgatctcttctccttcttttttcttttcttttctttttcatttttttagagtaattttttctttgggtcaccttttattaccggttgtcgaggagtgatcctctccagcgggagatcatgagatccccttttgtgagttcggccgagggaaaaggctcgcttttcgagattgcgtatccgccctgaatgctgctaatcgcgtatgggcgataagattatacaggttcgggccgctatcgagcgtaataccctactcctgtgtgtgagattatggtcgagtgttacaagggttccaaaactccggagagcactctcgctcttctttccctagagttcaggcctactgagtggcgttccccttcccggtggacaaggtcctccttttatagttcaaggggataccacatgcaccgcttctacctactctttctacgggagggggacccactctaccttgaccggaccgcgattcgtgccttcgcccggaagctaaaaagcggtccgcccttcagtgtcacccggtgccgccccccacctgacacgggggacagccctgtcactcactcttaaatgggcggagacttgtggctgccctccttacggggagagaactccggatgatgctccgatgtgacaggacatacctacctccactccgccggatacagaggcgacgtgggggcacggccgcctgtccagtcagatgtgaccgacgacaggccggtcacagactggtcagacccgactgacgtgcatcagtcgggcggcaccgcatgtctgcccttaccgcattaaatgcggtgaggggcagttggggcgccgcgcgcattgatagcggcttggcttgggtctcctccccgctcgctccccccgccacatggcagttgggcgagggcctcagggcgagtcagcgcgggggcccgaggggcgtgatgtggcaccccgaggccccctggctgcccctgcgtctcccgaggcgcggggggagggccaaactgtagagtcacgtggctggatgggaaggtaacttcccctcactttgcatacccccgggcccatatctccgacagtagcccccggcaccacgtcggacattggtcccctgagggcagtctgacgtggcgcctcacgacttaccgtgccgaggttgtgggcccgacgaggactccagacggttgccggcggcaaccaggatggcacattagccaaaatggcgatttgaccgccactgaccacgctgatgatgggggcacttagggcgcgaaaatcgggggtttggtcagaccatgcccagaatcgctatttacgccgcctcgactcccccgcctgtcaagcatgcgatgggaccaatggcgggcccgcctaaccgtgcctgtgagcatcgcacgccccacgccgagtgtgccgctgacaagcgcactaaacgcgggacgcgggctccgcggggcaacgtgatgagtgggcgcgagatttgaggaggcaaccgcaggcgcaggaatcgagggggcaaccgtaggggtgtgaaacgaggaggcgagtgcgggcgaggggtggataaaaggaaggggaggcggagagttcgtcccctttctctcgccaactgcatactcgcatactcgctcctaaagccctagcgctcctctcgctccaccctgctccatacaccaagctcctcgccgttttcccgccggccatcatggcccaagacgctggtgacgccgtccttccggcattgcgcatcacggcggagaggcaccttagcctcatccgcaagatcatgccggaggatgccgccgtgagggtgggggagtcgcggctgcggccgcggtaccccgacgatccgtgcacctcctgtccttcgccatggtggggttgatcccaccattttccaggttcttccatgaggttttggatttctacgaaattcacgccttccacctcgcgcccaacgtcgtgatgactctggccatcttagcgcacttgtgcgagatgttcatcggggtgcggccgacgatgcggcagttcctgtccttcttcgtcccatggctgctgcaaggcgcggtggtggggggatgctgcttccagccccggccgggcacggcggggcaatacattgagagtcacctatgcaagaagtgggaggattggaagaaggattggttctacaccgcgctgccggaccatccacgacttcggctccccgccggccctcccgaacgatccgccacgtggttggtagtttcggaactaggcgaggagtacgacgcagtgcgggatcgcctcaggggcctgcgaagccagggcctaacgggggcgatggtgttcggtgactacttccgtcgtcgcatcgcgcctctccaggagcggtctcgcggcgcgtgggagtacactaggtacaacgatcccatgcgcacccatgtgggtgagcactgggactgggcgaggaggacgcgaagacggtgatccggcgggtgctgggcctggacactgtcgagcaaacgctgactccggacgggatcctccccttatgcagcttccgcgaccgggagagtatcctggctgtgatgtcggccgtcggcgccggcaggggtcggtcccgtcggggcggcgccggtggcggcgccgtcggcgcgggtagcagcagcgcgtccgcaggcggcagccgaaccggcaactccggcggggacggcgacttca

SEQ ID NO: 19027 - DNA, 4067 bp, Oryza sativa
acgggggcaactgttcccctctgcatctggggcgccctcgaggctggccgcgcggaaggggggctgagagcagcccccagtcccgcggggggtccagcagcactctgtcatctcgggggcggaccgtgactttttcttccctgactcccgcgagcatagagccactcctgtaggtgctcgccgccgccgactccatcgtctgggaggggctcaatgcccaagttcaagccctggcggacgagcgggcggccctagaggcggagtgggcgcagctcgcggcggaccgcgcacgggttgacgaggggcgccgcgccgtggacgacatggtggaggtggggcacaaaatgcgccaagcccaaccggcggagatccaggcgcgtgaagagacgctggactcggtcatgcgggagacggaggaggagcggcaggcggcgctcatcgcctcgagcgtcttggatgaggcgctgggcgacatccgtttgcagtacgagacccacgccgaggatctggcgaagagagtcgaagacacccgcggagtcctcgacgctgctgccgcccaagagcggcgggcgtcggaggtcgacgcctcgctgcgggctcagtcggcggcgctcgaggccgagcgcaaggtcttagacgagcgtgcccgctccgcgcaagagttcgaggccacgatccatcgacgaattgaggtccttgaccgtaaccagcgcgagcaggacgagcgcagctggaaacaggcgcagcaagcccgggagcttgaggagcacgctcgggcactggaggagcatacccgggcactagaagagcgggcgcgcatgctagaccagtgcgagaccactttggccgcccacgagagaacggcggccgaggcagagtcctcccttcgcctccgtgaggaggccgcagccgagcgcaaccggaccacccttgccgtagaggcttcggtggcccatcgcgcggaggagctgcggcttcgagaggaggcatgccaggaacgggacgccacgcttgccgtacgcgaggccgaggagaaccgccgtggggtggcggcgcgctggctgggtgagcaactcgcgaagcgcgaggaggccgttaccgggcacgaggcccggcatctagaaagtgcccgcgctgagcgcgaggcaatggcaacgaggtcttccgagctggaggcccaggagaaggagctagaggtaggcgggcaactcgctggcgcggagttggtgagccagctcaccgcggctcaaagcactctcgccgacctggggcgcctggtgcaggaccaagtcggggagatcacagcccttcgcctcaccaacgagattggacctggccaactctccgacgccgtcgaccggctggggcgcgcggggcgccgaataggcatctccgtgcgccaggacaggaaactcccgcccacacagccggcagtcgtgctccggctggatgggatggcggcggatttggagaggctagaggaggaggtcggcgaaaccgtgaagtcgtcgtcagctttggcgcaggctatggtggagctggtcctcgcaagtcatcaagctcgtgacaacgacttcctcccgtggcgcgcgctcgaggacttccccccggggacctaggcgagggctcgggagcaagtctgggaggcggccgacgtaatcgtctccagcttcgacgggtcggcccctcggttcaacctcgcgcttgcttcagacgaggagagcgggagcgaggacggtggtggcgatgatggcggcgaggactgggacgaggtggtcagcggcgccggactcaggggcccgggcactccgtgactatccccgcttttcttctttcatcgtggtgatgtactcgcggtgaacgcttcaaactttatgccatcgtgccatcctgtttgcaaataaagcttaccctcgcacctttacgtttttgcttccgcctttcaatgtctgcggcaaggagagaaggaaaaaccaaagcgaacgtattcaattaactttcttatgattaagttgtcgttcttaccccctttatacccccctcgggctcgttctggtgaaaagggaaactcacgctcggtccgtggtacctaggtggcgaggggcaatgccgtcgccccgagaaagctgcccagcgggtctggccaaaccggggctacgcgaccgggggtcggggatggccgtgtgaaggcccttccgagcccccagggttcgccgcagcccggggcgcggcccgcgtttaggctccctttcggcggttttcaggccgcccaatgccacttagggtccggagtaagcgcgaatcgtcctttaaacccggacaagccataggaaggagtaagaaagggtacacaacggcttccacttgagcagaaaaatttattgctggggaaggaacaagatacaacatatttaacagtggtagccccaggccaagcccgcacaagccgaaggatgtgcgggggttggcccgagcaccatgaaagcgaaagacgcgcgaccctatggatagaaacggcggaggttttcgatattctaggggttaggcaaccccgtgccgtcctcgtggttagtcgaacggagcccggccggggaacgccaacactttttatggcccttcccacattggtgagagcttgctcagtcccaagcgcgactgcacgcgacataggacgaggtcgccgacttgtagtgatcgggccaggacgtggcgctggtggtagcgccgctcgcagggttgcacgccttctgcattcttctaaatagtcgagatcgtcacggcgaagatcatcctggttggcctcatcgtacagcacgacgcgaggcgaacctagggagagctcggaaggtaggactgcttcggcaccatagaccaggaaaaagggcgtttccccggtggggcgacttggagtggtccgattcgcccacagcacggcaggcagttcctccagccatgaatccctgtgcttctttaggacgttgtacgtcttggtcttgaggcctttgaggattttggtgttggctcgctcgacttggccgttgctcttggggtcaccgaaaagctcattggtgaactaggtgccgttatccgtaatgatacggttgggcaccccgaaccgggatgaaatgcccctgatgaacttcagggcggaatgcttgtcgatcttgacgaccgggtaagcctcgggccatttggtgaacttgtcgatggcgacgtacaggtgctaatacccgccttgggccgctttgaagggtcctaggatgtctagccccaagaccgcgaaaggccaagagagcgggatgacctgcaaggcttgggccagctgatgggtttgcttggcgtggaactggcacgccttgcaccgccagacccattctggggcatcttgcaacgcggtcggccagtaaaaaccttgtcggaaggctttaccgaccaatgtgcgtgaggccgaataggccccacactcaccctgatgagcgtcggcgatgagctcaacaccttgctcccgagaaatacacttcaagagtatcccgttggcggcacgccggtagagggtcccttctacgagcacgtattgcttagagatacgcgtgagcttctcaggttttgcgcgaccctcaggaagagtattattgtcggatgcccattccggccaccgccctcaatcctgctaggagtccttcgtattccgccatattgttcatggctcggaaatcgagttgaacgacgtactttaggacatccccgcttggcgaagtcagcgtgactccgacccccgcgccctgaaggtggagggagccgtcgaagtgcataacccagtacccggcgcgaatgtcggcgtttgggtctcctccgtctccggggaggaagggaacattagacggaacagggtcgtccaccggggtccactccgcgatgaagtcagctagaacctggtttttgatcgcgtgccgcggtttggagtgcaggtcgaactcagcgagctcaatggcccactttacgacccgaccggtcccctcccggttgtgaaagatttggccgagagggtaagatgtcacgacggaaat

SEQ ID NO: 19028 - DNA, 3186 bp, Oryza sativa
ctggtcccttatcatagatgggctcacaacgcgggtcgccctagtcgcgctcaactacaagggcggcactcaccgtgtgggaggtcgcgaccaagtagagcagcaacggtttctctggccccggggccaccaagatggggggagaagtgaggtaagctttcaactgattgagagcttgcaccgtccacacaaacggctcggggcatttgaggagcttgaataggggcaacgccctctctcccagcctcgatatgaatcgacttagggcggccatgcatctcgtgacgcactgcacatccctaagtttgctggggggcgcatcctctctatcacgcgtattttctcgggattagcttctatgcctcgggaggagacaagaaaaccgaggagtttgcccgccggcacaccgaacacgcacttttcggggttcagtttcatgcacgtggacctaagactgtcgaaagtcttggccaaatcctgcaacaatgtgtcctggtggcgtgtctttaccaccaagtcatcgacatacgcctctatattgcgccctatttgattactcaaagtaatgcgagtcatgcgctgaaaagtaggacctatgttcttgaggccaaaaggcatagttgtataacagaaggtgcctacaggagtaatgaaagtagttttttccttatcttccctagccatgcggatctggtgatacccggagtaggcatctaagaaagacaaaaggtcgcaccccgcagtggagtcgactatctgatctatgcgcggtaaagggaagggatccttagggcatgccttgttgaggtctctgtagtcaatgcacatctggagcttgctgttggccttcgggacgaccaccgggttcgccagccactccgggtggatgacttctcggatgaagccggcctccaggagccgcgtcacctcctcgcggatgaaggcttgccgctccggggcttggcgccgtaccttctgccggatgggtcacgcacccggccgcacggtgaggcggtgctcgatcacctccctggggatcccgggcatatccgacggcttccacgcgaagacgtcggagttcgcccgcaggaaggagatgaacgtgctttcctatttggcgtccaaggtgccaccaatcttggcggtcttggacggatcatcgccaaggagaatctccttgacgggcacctcatcggccgaggcgaggcgcttcttggaagcgcgggacgcagaggcctccggggcctgcggcttcgtggccgccgccaggttatcagtgcgctgctccgcgcaggcgagggcgaccttgacatcgccacagacggtgatggggccgttgggacctggcatcttcatctggtggtaggtgtagtgggtggtggccatgaacttcaccaacgcgggcctgccctggaccgcgttgtagggcaggttgaggtccgccacatcgaagtcgatccgctcggtgcggaagttggtggagtcgccaaaggtcaccgtgagctcaacatgacccaggggccacgtgtgacccggggtcatgccgatgatcggcaatgacggctggagcttcatccccggggacttgagcgcatcaaaggcagccgaggagatgatgctcaggctgccccccccctccgtcgaccaggacacgcttcatcttgacgttgtggatggtgggggagaccacgagggccaacttccctccctgagcgagcactgtcagatggtcgctctggtcgaaggtgagtttcatctctgaccagcgcgccttccgtgccgcctcgtgagttgggacggcagccagaagctcacacctcatggccttgaaaccgcggcgggaggtgtgagcgcaagcccccctatcaagagtggtgacggttccctaaggtatttggaattccagatcctcactgttgtcgctgtcatctggggggccttcttcttggcctcccctcgccggtcattggcaggggtcgcgggggctttgccctcccgtcgactctgccgcttctcctcatcggttttccggaaccgctcagccaagttcttgaccgagcggcagtcggcgaggctgtgccgataagtgttgtgcaccgagcaccacttgtctgccgaccgaccctcgccagagggagcggtggagcttggcttgtcgccggtggctttctccttgcgcggggcccgtgagggcccatcggccgcaaggacgtggccctcgtcgtcggagcgggccggcttccttttgcccctcctatctcgccgcttagagtggggaacagattcgggggcagccgcagccgccgcgccggtgctgggggagttccagacccacgcctcctccttccgaaccaccttgtccgccagctcgaagagctcggcggtggtcttgggctccttggaggcgatcttctctagcatgcggttgtgccgcacgccgttccgaaacgcataaacgactgcgtgggccggaatgcacgaaatagtgttgcggacctggcaaaaacgatgtatatacgagcggagggactcatcagccttccgctgcacagcatgcaggtccgcctcctctcctaggcaggggtacgtgccttggaacttcataatgaactgctggcacaggtccttccaggagtggatggagtcggtgtcacgtcctgataaattcatcccgaaataaaaatcattctctaaaaggaataatagaattaattaaaattcgaaaagaaattggcaaaccctaaaatacgtacaagaaaaattcaaatgtggcccggagaatttttgttaaattctccttggcctaaaaggagccctcaaattttagtggaattttcagagcacaaataataattgaaaagaaataaacaaagttgaaaaggtttataaaaagaaaaatcctaaaagaagttctttccccccctctcctttttccttcttgggccggctcggcccagtccctccctctctctctctcttcccccgcggcccatcggcctccctcgcgcgcgcgcgccgctgacaggtgggcccgcccgccactctcgctgacgggtgggacccacctgtcatctccctcctcgcgccgcagccgccgcccgcccgtgccctagcgccgccgtcgccgccaaatccgccgcatcccgccgtccccgcgcgcattgaagtggggggaattactccccg

SEQ ID NO: 19029 - DNA, 1206 bp, Oryza sativa
ggccccacttcccgtggacccggtccgcgcgccgctccctcggctgacgcaataaatgggatttttaattaaaaattaaatgaagaaattcgcaaatatccatttaaagagcatataaacttcaaatggccatatcttggccatttgaactcggaattggaccgttcaagtctctaatttttccttaagaagtcaagaacccatttttgtgctttgtttctgctgttatgtggagtttattagagtaaaagcctttttcttttccgttggtcgtgtagacgctgcagcttcggaagatccgctcttcgtggaagtcgaagccgtcgtttgggaaagcgagcaaggcaagtcacatcatccttgagcatattgaatcccagtttataaaattaatttgatttaaattaatgcattatcgctttatttaaattcccgcgttatcactgttttatttagccatgcctatttacctttgttaggaccatactattattgttattgttattattaccttgttcaccctagaataaacaaaaccccaactagtggacactctatttatggttccactagtatgaatttaggtagatgcttcgccgattaataggacaacattaggtggttttataattttagactttgggaatattcatatcacctggacactatgaattgttggtttatggtggaattggacatacacctctcttcctctttcaaaacccctaaaacctattttcggtggggtttgggtgcatgccagttgtgggaagtagcaccccggccactataaggattaagctcgggcctctgttgcaaagcactaccgtacttccacatgtctagtgggtaaggcttagtttgtggctcaatctagtcataaacaaaagtacacggattggagatggatgaagtcgggggtcgatggacattctccagggcaaatgaaggctacacgagctgcggcccggtagtcgagatgtcatatggcagagggttggtgccctgctgctagggggctcagtcctgcctgcctgtcccgggtgtcccggccgtaggaggattgggtcggtactcttgattatggctaggatgggttgggaactatgtcacgtcttccgtccgtataccgtggtggtatgtggcacgtggttgcacgtgaggaagatgtgtcttgtgggtaaagatgtacacctctgatcagag

SEQ ID NO: 19030 - DNA, 1273 bp, Oryza sativa
ccttgggttaagcaggttcgtgagggttcacggccttgattaataatactgtgtagctctaggatcgtctttataaaatggctttggggcaactaagtgacttttaaatgccgtttactgcaaaacttaacccctatattattattcccttgtacctcccttgcattaattatgcatccgccggtgtggcttgctgagtactgtggttgtactcattcttgctcaatcttttcccccttcagtaagagaagctttggagaagatgtcttaggtggagtcctggcttataccccagttgagcgcctgtgaagatggagccgtaggcccgctagtccgctgctgtttatttttgattgtcaggccttatgtgcctttgtaataatgtaaatattatcgatgtaataaagatgtgtcttttatatcatgtttgtatggtgtaccccggcttttcctgggacggggattaatacactagcgttcgggaaaaggcaattttcccggtcgcgacagtcggggggctgggtcatgagccagccgcgcgcctgacccttgagagccatggggaaataattcgccatgacctggtcgtgccccccccatccccccgccgccacgatgatcatggtatagatctggaggaactcggagtgattgatgttgccatcatacttctccgtgaggttggggcgaaacttcgggggccaccggacattccggagactcgcaacgaaggccctacaaccagtccctccaaggtgaacgtggggggcgggccgcctcgcgaggaggaacgtggcactctagacgaggaggcgccttctcccatgcgggcagcgcggcgctcatcccggcgtcgctcgatgttgattcgagcgtcctgttccccgtagaggccgtcgtgatgtcttcgacttcccgaggcccccggcgacgttggggccgtggatcgcctcgaggccgtggccgaccgatgggccctcctccttgctgacgaggagagggtggtgggggtacgcgatgtaccagcagcggtgggccggccggccgcggccaactgccgctgggcagtggtgactaggttggccacgtcgtctaaccatcgctggacgggggtctctggccctgagttcacggggggatgccgtagaagggcacccgccgcgtgaagcgcgcctcggggcgagccgccgtcgccataagtgaggcggtgtcgcacccgacgcgacgtggcttccccccgcccgtaggcggggagtgggccgagccacccgac

SEQ ID NO: 19031 - DNA, 3054 bp, Oryza sativa
  unsure (1)..(3054): unsure at all n locations
atagagatacactccctctgattacaaatatatagcgttttggtgactgtatcgctatttaaaatgttacttatttacatgtagagatagcacttgctattttcattaaatgataggttttgtagtactcactattcccactaaatgatacttatttacgatggccaagcaatacaccagggactgcaaatactacaccaataagcccaaacaaagatgactcaagacctaagagcaattactataaggctttaagtgcttcctctagaagtgttacatgggattaggtgatggtggagtagagaagtgagaagggagagaggacgagccacctctcatacaacgggcaatatctatgcaatctccaagaaaagtgtaaagagaaagtgtaatagtgtgaaagtgaaccaacaatataaaattatgggttaattggatccatgccactgtaattttgtcatattagataattccactactattcacgaaatctgctacgtgccattacaactttgtaaaattagatccatgccaccgccgtcacatttttcatccatcgccgtcacacttcagtgtgggattgggacccacatgtcagctccatcctcttcctccatcccctctctccttccttccccatctctcttcggcgagcatggccgacgaataccagcagcatgtggccggcaacagcagtagcagcagcagcagtagccggccgatggcggcagcgagggtcacgaacgccgtcgcgtcctccgtgcaccccacgttctgcacccacctgtgccgcaatgccgcacggggcactccatgcggaaggcccgtgtctccgttcgagctcgctccgatgcacccatggtgtgtgtgctcgatcatgttccatatgcagctagtgttcttcttcttcttcgcatggatgtttgtgttgagatgtcgatatggtgatgacgcagactnncagcgattgggtgtccatatgngcaggaagctattgggctacgaagcatgtgcgcaacgggaaaccccttgcccgcgtgcgtattaccggtgcaccgtggccgtcggctgcccggcggcggtggccaagtcgtcatccgccaatgccgcgaccacggagatgctcgagctcttgcgggatttcagtgactactcgagcttcaactcggatatctcaagtgagctcgagcggcttgcggcggcggtgacgcctagatctgacgcgccgcaggtggctgctgtggatctgaacggcggcagcagcagcagtagcaggctgacgacgacgacgccaccaccactgctgcaacttggatgccggcaagccctccccttcatagtccccaccggtagatgcgcttctctcgccgccgtcgtcgaggaaatcagcggccggcgtgcttctccgccatggatgtcggcagctggtgatgcgggtgagagagaggaaggggaaagagaggggagggaggtgggtcccatgcgcagttggattctaacatggatttttaacggaaaatgcgatggaatggcatggttccaatttcgccaaattccagtggcacgtagccgatatcgcgaatagtagtggcatttttccgaattgacatatttgcagtggcatggatccaattaacccttattataagggtatgtgtagtgaagagtagataacacggctaaaattagatgtagtatccacctctacataaaacttgctctaaaggctttttttcccttctaaagctataggttactactacattaatggactgaaagctagatttgagttgcttttcttggcttattatgtgaagtggagttaggaaactactcttgaccttgtgggttttaagctattggcttataaaccacaaaagtcaaaataccaacttaactactccctcaatgccagaaagttagctgttttaaggattaatgtacaaattaacaccaagtaaaaatgataccctcatattactcttatttgttagtcgcagtgataccctcatatgagaatcacgtcaccgaagtctctacttgcgtgaagcattcctcctctcacaccgatattgaccgtctcaggctaagtatcacaaccccgttccatgattatgacgttattaccctcattgataaaatcatcaatccgttattctggtgttaataatatatttaacccatatccatcaaaccaacatgtctcaaatgattataaaacatagagatgcgattaaaattagggggagcattaccatatttctcccaaggttcataatatcattcaagtgtcccatacagatggtggcacgatggctactttgattaacaaaagtactaacctcctgccaaattctgctagaactaagatgagtaggatcaccatatatatacaaaagattaaacatcgtgccactagggatatgaaacacctacagctactatataattggcacaactactcatcgcagtgaggtccacttcattattccacaaaagccacaaaccaccagaagcatggacaacaggaactatatagctattatctacatgaaaagcatcagtgagatcagaggaagtgaaagaatcattttttgtttcagaaataaatattacctgagcgagagtggagctgatcaaactacggaggtactgcatcttcctcctgccgaggtgtcctcccatacctcggcagttccagctcaagaaagtcatggtgcctgtggcaccttgtgggctggcgccaactgcccttgagaagtgagccgacctttctccaatcccaagtaatccccatgtgcaagaagctgatcttgaggctgagtttgcaaaagttttcctcgaggaacgctagccacatcatgcccagaaacagaacaacatcccccgatcgtagcaggagaaccataattcctagcagcttgagccccagccaaataagccatacctaaagtcaggtgcgacttgactctgtggagaaactgagacttgcttccttctgattgagctcgatcatccacttcttgataaaagagcttgtcatttcttccatag

SEQ ID NO: 19032 - DNA, 1660 bp, Oryza sativa
tttttaaacctgcctgcttatttaagggggaggtgagtgcattagatgctctctcacaagttaacggaccaatacacggcaactaatcggcgcttgagtacacgagttgagtccagccgcagaagatccacccgcccgaccaggtttcgtttcgatttttcttttctgggtccttcattctcttctgggcggcaccatgtcgagcggcggcggcgcggcggcggcggtggacccggaggcggcgacggagctggtgcggaagggcgccacgctcctcctcctcgacgtgccccagcgcaccctcctcggcgtcgacacccaggttggtttccctaaaccctaaaccccaccttttctcctcgctaggctaattcttgcgtgctgctgcttttgattcgattcggttcaggtgttctccgtcgggcccaagttcaaggggatcaagatggtgcctccggggccgcatttcctctactactgctcccccaacaggttgcattgcgtcatcccatttctctatttcttagatttatcacaccgtcagtcaacttgtgcagagttgtttagccagcaagtgctgagtgatatgcatgtaaggttgatttttttttaaaaaaattattaaaagaaccttgctagtgtactagtgtagcatcatcaattggatcggatagctcgattctaccttccattttgacaagacaatcttagcgaagcgtaattaactacctagtgcttctttgggtcacaacagtttgtgtactgatcagtgttttcaagtcgtccgattagtcgcgactaatcatgattagttatccttatcgctaccctgacctcgatcatgaactttgaagcgattagtttgaccagaaaacttatcgtccgactaatcacgactagtcatgagagtcgatcaaattagtcgtggatgactagtctgttagggctaaaaatatgtgttggactttacacttcagtggcaggccttttgcccagcccaagaaggcctgtacccctcatctaaccctaaccagccatctagatctagtcacgagagagaggggagaaaagatgaaggacttattgcaactaggacaggtaaatgatttaactttaagaccttatgtcaagtgtgaactgtcaactgtgaaaatctgattatccttagtttgtactatactatactagtatactatggtaattaatacttataaacatctgtacattatcctgcatatccctagcctatagtcaccgactaatctatgactagttgcgactaatcgcgattagtcgactagtcggtgcccttacgactagtcccgactagacgacttgaaatcactggtaccgatcttgattaacatttgtaaaccggtcttgatatatatcagtagcagcacgtttgattacttgatctggagttatggcattcagaaaaccatgttaagatgatgaaaccacttgtgcctgttttacgcattctgttccatttcgcctgcatggtctgtgtctttcagttatggccaaaacaacttacatgagaagccacatattgattattcttccacaatctgtgatcctttcaggcacgcaaatgagttcgcacctactgtcggattctttcttactactcacccatctgaggtactctttcatg

SEQ ID NO: 19033 - DNA, 606 bp, Oryza sativa
cacgaacttgtctaagtattccataaacaccttattcatcaagttcatgaagaaagcaggggcattggtaagtccaaaagacataacagtacattcgaacaacccatacctagtggtaaaagctgtcttaggtatatcttcctctttgattctcaactgatgataccctgatcgaagatctatcttggagaaaacagtggcacctttaagctgatcaaacaaatcatcaatcctgggtagtggatacttattcttgatagtcacatcgtttagtgcacgatagtccacacacattctctgagtatggtctttcttttccacaaaaataaccggagctccccatggtgatgaactcggtctgatgtatcctttctgtagcaaatcatctacttgcctcttaacttctgccaactcattagctgccattcgataaggtctcttatggatcggagttgttccaggtaccaaatctattctgaactctatatcccttttaggcggcataccaggtaaatcatctgggaacacatcagaatactcccggactataggaatctcttccaaagttatctggttcagtctctgaccttaaagactcagatgaca

SEQ ID NO: 19034 - DNA, 2276 bp, Oryza sativa
ggcgacggcagctcggtggcgcgaaacgagggtttcggcccgaggaagacgacgactgacgggtgggccccacctgtcagcgacagcgcgctcgcgcgggcggctgcggactgggccggactgggctgaggagagagaagggattttgggccgactttcggcccaaagccaaaagagactttttaaaacctttttcaatttaaattatttcttaaatgcaattccatttattaaaaatactgtaattagctcaaataaatcccagaaaaatctaggaattatagaattaagcaaagtatttaatgaaattttatctggcccaattttatattggaatttattaattaaaattagattttcttttcaagactgattaaattatttctaaaaattccatttaaacaacaatttatataattttgaattttcagggtgtgacaaacctaccccccttaaacagaatctcgtcctcgagattcggaagaactggcgaacaggtgcggatgagctgacttcaattcatcttctcgttcccaagttgattcttcttccgagtgattactccacgggactttgcaaaaacggataactcgattcctggttcttctctcacttgtttccaggatacggattggtttctcaacataagtcaaatcctcttggacttctatctgctcaatattagcttcttcggtaggtacccttaaacactttttcaattgcgacacatggaacacattatgtactcctgccaaagattgaggtaactccaactgataagcaacctctcctcttctactgacaatcttataaggtcccacaaaacgcggtgccaattttcctttggtatgaaaacgatgaactcctcgaagaggcgtgacacgaagatacacataatctccctcttcaaaactcaaatctctgcggcgattgtcggcataactcttatgacgagactgagccacacgcaatctttcttgaatgatctttaccttttcttctgcttcccttaggatatccgttccgaaaacctgacgttctcccgtttgatcccacaaaagcggagtgcggcacttccgaccatacagtgcttcgtaaggagccatctgtaaactagcttgataactgttgttgtatgaaaattctgcataaggtagattcttatcccaacttccaccgaaatctagagcacaagctctcaacatgtcttccaaaatttgattcaccctttcggtttgtccgtctgtctgcggatgataagcagtactaaagttcagcttagaacccatctcttcctaaagtttcttccaaaaatttgaagtaaactgactgcctcgatcagacactatcttcttagggacgccatgcaaacacacaatccttgccatatacaattccgctaagcgacttccggaataagttgtctttaccggaatgaaatgagccactttggtaagtctgtcaactattacccaaatagagtcatggcctgatgacgttctgggtaaaccagtaataaaatccataccaatttcttcccatttccattcaggaatcttcaaaggttgcaacaaaccggcgggtttctgatgttctgccttgactcgctgacaaacatcacatactgctacgtattctgcgatttcacgcttcatacttgcccaccaaaatctttccttgagatcctggtacatcttagtactaccagggtgaatggagtataaagtatcgtgagcttctttcagaattgcatcctttaaatctttgttgtcggggacacagattctctcacccaaccataccgttccgtgctcatcctccaagaaaccaatagcttttcctcttctcatattcttcttgatctcttgaatatcaggatcattattttgggcttctctaacttgatcaattagagtgggcttcgcttctaaagctgcaacgaaacctctaccgacaattcccaaatttaatctttcaaattccttgcataattccaatggcaactgtcgtccttctgtagcattgcaatagccttttctgctaagagcgtctgctacaacattagcctttcccggatgataatgaattcccatgtcataatccttaattaattccaaccatctccgttgtctcatgttcagatccggctgagtaaagatatactttaaactcttgtgatcggtgtacacttctgtacgagtaccgaaaagataatgacgccaaatcttcaatgcatgaacgactgcagctaactcaatatcatgagtagggtagtt

SEQ ID NO: 19035 - DNA, 712 bp, Oryza sativa
ttacagaagcacggtagcttcttcatcaaaatgtgtcctgagcagtttaatcaacctattacatgtctcacttcaaaaaagaaatggaacctctagccatctgggtacaagcgaagctctatttttgcagaatgcagatgcaagcagccaccaaaaaaatgctcaatgacactattttgtgcactctgatttttctgttttgatagaaattagttagcatgtttaaataaagagtagcactattgagtaggcagtacaccatcgatgaagcaaaacatgtacattctatccatcaatttgtgaagatgcagtaaaagtgctgcttaatattaacagaaagttgagataaattagtacttacagcttcactacagctcaaaagaagactaactaatgctttccattgcataaaagcctccagtgactgccccatctaaataactcaaaaatgttaagagaattatgatttattgaatgtctttaaagaagttggtttttttcagtagtaccataaatgctatgaaagcaaactgcagctctcccaagagtaaatcctcttggccttggtaattcttggccaaaacactctccagcaagcatgtctgagaagtataatagcttcatcagcaaataataatacaatttttcgatttggtgcatttacatgaggcatgtgtgaaaggaatcaattcaagcaatccaccattagtag

SEQ ID NO: 19036 - DNA, 682 bp, Oryza sativa
cgtgtaatttacctccatcctgacaactccaaacattgtggcagtggcagagccaaaagattttgtatatctacttgataactgcccccatgactggctcttcctgcagtgtaaagcagtggtaaacattttgcttgtcattcttggcatgaagtagatatctttaagtttaactttcagagattactagttattacttcttaatagtttttagtactccctccgtttcataatgtaagtcattctagcatttctcacattcatattgatgccaatgaatctagacatatgtatctatctagattcattagtatcaatatgaatgtgggaaatactagaatgacttacattgtgaaacggaggaagtactgattagtgaaattataaaccaaaatttaaattttcagttattgattatgagtagctttcatggcgtaagtacctgttacggactaaaacggtacttagaaatttatctaatttgattgaaagaacttatgatgttaagtttgcatgtgcgttcagggagaggctagctcactctttgttttttttacttctgtaggtacatcatggcggtgctggaacaacagctgctggcctcaaagcagcggtattccctctctcccttcttagcccttctccctcctttctctctctcaaaagaaaaacctggcttaac

SEQ ID NO: 19037 - DNA, 547 bp, Oryza sativa
cacaagcggccgcatagaacctaccgaccccctcgtacagaaaaacgatttttgtagtagtggttgccgccgcaggtgcagaagaagccaccgccggatgccgccatcttcgaggggatgccgacgcgagtcgcggtggcgagacgcaggcgacccttacgcgtgcgtgggcgcggcgggagaacggcggaggccggtgcgtcgtggccggcagagagggcgtggagcgcagcgatggatagtgcggtggcggggccgaggatggcgaggacacggccgttctcgtggctcgttttcttccttccgacggccaaccttccacggcggtctcgatctccgccgccgccgccgccgctccggccctcacccgcacgcctccgtcaccgctccagtgccgctcctgggtctccgtcgccattggcccccgtcccacactcgcggagagaaagagaggggaggatatgatttatatgagccccacgtgtcagtgggacccacccatacttttggtgaatgattaatgggtcccacatattttttatttcta

SEQ ID NO: 19038 - DNA, 1284 bp, Oryza sativa
aacttcgttgtacccaggttgcgagcaggggcacaaaagttggatgccactctagagttgttgcaatggaaggcaaaaaatggggttagtgacaaggcatttggcgatttattgaaactcgtcaagaacattcttccgggggaaacaaattgcccgagacaacgtacgaggctaagaagatagtctgcccgttaggattggaagttcataagattcacgcatgtccgaacgattgtatcctatatcgcggtgaggagtatgagaacctagaagcatgccctgtttgcaaagcactacgatacaagattagacgggacgatccaggagaagttgacgggcagctaacaaagaagagaattcctgctaaggtgatgtggtatttccctataataccacggctaaggcgtttgttcaggaacaaggggaatgctagaatgttgcgatggcacgctgaagagcgtcaacaggacgggatgctgagacaccccgccgatggttcgcagtggcgaaacatcgacagaaaatttaaagaatttggaaaggacgcacgaaacatacggtttggtttgagtacggatggcatgaatccttttggagagatgagcagcggccatagcacttggcccgttacgatgtgtatctacaacctccccccctggctatgcatgaagaggaagtacataatgatgccgattattattcaaggccccaagcaacctggtaacgacatcgacgtgtacctaagaccactggtcgaagatcttaaacagttgtggaagaaggaaggtgtccccgtgtgggacgaggacaaacaggagaagtttaacctacgagcgctgctgttcgtaaccatcaacgattggcctgcacttagcaacctatccggacagtccaacaaggggtacaaggcttgcactcactgtatggatgaaacaaaaagtacgtatcttaagcactgtaggaaagttgtatacatgggtcatcgtcgattccttgcagcaaaccacccggtacggaagaaaggcaagcacttcgaacgtaaggccgaccaccgtacgaagcctaaacatcacagcgggaaaacagtgtttgctatggttaaagatcttaaagtagtgttcggaaaggggcctggaagccagcatatagagagcgaagatggtcacgcggcgatgtggaaaaagaactctatattttgggagttaccatattgggaattcttggacgtacgccacgcaatcgacgtgatgcacctcactaagaacctttgcgtaaaccttcttg

SEQ ID NO: 19039 - DNA, 1414 bp, Oryza sativa
acggtgccatcgaggacatatgggaacttgactatggtcctctcaaggttcctctgttccggtgccaatgggttaggttgactggtggaggcgtaatgattgatgacagtgggatgacaactgttgaccttaacaaggttggatactcggacgaaccttttgtccttgccaatgatgtaacgcaagtctttttcgtgaaagacatgtctagcaaaggaaagaagggcagagggcctgatgagcctaagcgtcaagtggttctcccaggcaaaagaaaaatcgtcggagttgaggacaagactgacgaggattacgatcagttggatgggcaaccccctttcacggtgacgattgaccctagcatcctcctatcaaatgaagacaccccttactcacgcagcgatcacaaggagggaacaatagtgaggagaaagtacgtgcggtcaaccgtcaccgccgatgtaatgccgtaattattgtgtacacgatgtaaactattttggatgtattgattatccatataaatcaattgatgtatggcatatgttaattacgcacgattattagaggtttcaacaagtttaaatcatgtatatgctagttatatgtgatacttacaatttttaaaagttttaaatcacacaggtggcaatttcatatgtatgttaattagagtttttaacatttaatttactagcattcatatgctaattataattgactagaggatttttaaaagttttaaatcacgcaagtggcaatttcatatgttaattagagtttttaacatttaatttactatcattcatatgctaattataattgactggagaatttttaaaagtattaaatttaatatatttttaaaattatcattcatatattagagtttttcacaatttaatttactatctttcatatgctacttatatatgactattcgaatttttaaaaggtttaaatcatgcatgtggcatttacatatgttaattagagtttttagcatttaatttaatataattcctacgctaagtatatatgatgattacaatttttattaattttaaatcatgcagtatgtacatacatatcttaattagagtttttaccaatataataatatcattcatatatatgctaagtatatatatatattggaatttttattaattataagtcatatatttgcttattacgatttatccacttaatttattacagacaaaaataatttttcgaagtaattgtcattaatctttgtactttaaataatgttaatgcattaacttctattttataaacacatatgtaagcgaaaatcatatgcagtgctataatctttagtcccggttcttaaccctaaccgggtttaaaaagtaatttcgaaatagcgggaaaagatatttactcccgg

SEQ ID NO: 19040 - DNA, 5944 bp, Oryza sativa
atcgaacgaagacaagcgagaacgagggaacgaacgtgaacgagaacaagcgaacgaacatgaacgagaacgagcgaacgaacgaggacgaacgttaacgtgaaatgcaatatatatatatatatatatatgttacttcgcatttatcctaatacatctttttgtatcttgtagaaaagacgtgttgtcggagtcgtccgtcaagcctgagtggaagagctagccctagaaggaattggagcaggcaagtgacgtaataatataaatgattgttatatttgtaatgcaattaattaagattattagacctgtaattagacttatcatataagattgtgtagtgttctaatattatttgagttttaatataaaattattttattgcaaattagacttagtatgacattattgactacggaattggtgcgactcctagcaattgactattgtagtcttaattagacttagcatatacgcacgaaacacttagcatacatgactattttagtcttagcatgtaatattatttgagttttaatataagattactttatttgtaattagacttagtatgtaattattgactacggaagtggtgcgacaagtagcaattgactattgtagtcttaattagacttagcatatacgcacgaaacacttagcatacatgactattttagtcttagcatgtaatattatttgatttttaatataagattactttatttgtaattagacttagtatgtaattattgactacggaattggtgcgacaagtagcaattgactattgtagtcttaaaacataaatgtctcgtgacttagcagatgtttgttgtatcaacagatggctgaccgcgatgaggaacagatattgtacgatataatcgcggagggaagcagccagtactggaatgaagaagaggggaacgaggatccaaaccagtacttgaacgaggaagggaacgtggagagggatgcggaggggaaccagcaggggcacgtggaaagggatgtggaggggaaccaggaggaggaggctagtggtagtcaaccctccgttggacagaagagggcacgcgggcaacgaggtgcagcgaagaagcttgagggtcggcacatcataacggaagtggaagaagatggacgtcctagtgccccggccgaagccgccaagaactatgtacgtcacagcggttgggttgtgcgggataacgtgcctgtcagtacggtgtactggcgaagaacaagggcacgtggagatcatgagagctttgtcccagattcggagaaagagatgctgtggaccacaatgctcgagacattcacccttcctgcgggtacagaggacaagtgaaaaggtggactctgaagaaaatggcagaacagtttcagagcttcaaagggagatctgtaccagagagtatatactgaaggggcatacaccgaacttcgacacattcccaaagctaagggatcactgggacgagttcgttgcatataagacaggtgaacaagggcaggcgatgatggaaagaaacaaagaaaattccgccaagaagaagtaccatcaccacttggggtcaggaggctatagcgtcgcgatgccgaagtgggaagacaccgcaggctagcttgattgagaggggtatcgaaccggcaacagccaattggccggaacgatcgaagttctggtagtatgctcacgggggaacgctcaacccagctgatggctcactggtcttcggcgatcagatacgagaggctgcgcgacgactaacagatgcagtggaagcctcctctcagggcacgttccgaccagacagagatagggacgagctgacactcgccctgcagactccagagcatccaggacgaacacgagggaaaggggtgattccttggaagattggtttcaaggaggacatccacacgtacaggagtcggatgaggagcaagagagataccgaggcgaagattgcatacctagagttccgggtatcgagctacgaactcaacatgcaagaagaggtggcaaggaaggttgatgaacgcatgtccgcacatcggtcccatgatccccagccgaccattcctcctgcaatggtgagcccgtcaggaaaccgtagcagctgcgcctcaacggggcaggtaggatcacagagcatggacgccatgcaaacacaggacgaatcgacctatcccgttgatgacatcactcagcggacaccatgtgagctgcatattcctttcaagaacttatcaataaaggtaagatttagccattccgctagttgctgcttatatatgttgattactaataaataatctctcacaacatgaaggtggcgtcgggcatggccatcccaacggacccttcaggtacttaccactgcaggccgattccagcaggatactcgaaggtcgaagttgagttggtcgaaggcgcgtacgaggacctcgagctggattaccctggaggagacggtgagacgcatctacgagacacaagccatgccattattctatggcgcaggtggtacatcatcctccctggacgacaagcggcgtctcgtgcaccatctcctccggctccgccatctcctcctcaggatcctgcaccgtctcctcctcatgctccgccagcaccgtctccacctcaggctccagcaccgactcctcctcaggatcctgcaccgactcctcctcgggctcctacacctactcctccgcaagctcctcttccggcaccttcaaagtcaagggcccccccagctccatcgcctgcccacacaagggcaacgaagaaggcgaaagttgacgccgccaagaacaaggacccggggtatgattgcacgcaagaggagcttgacgtttacgttgcatcagaagtcaagagacaattcaagcctcgaagtccagaaaagaagattcctatagaccccagtgtcaggaacttcttcaggggtatgtctgcatctgtcaaggaggccatcaagctatcggactatgagcgaacgctgaagaaagcatcttctggaaagtccaaaccagtccctcagcttggagagcaaccaaaccaggagatcgagccattggtgaccggtaaagaaatgacgatagaacaatttattactgacaccggtctaactacggatcaattgctaggagtcgcaccaatcgaaaaggcggaagtgaaatacatgtacgaactcggtaaaccgcttgtcaagcctgagctgctgcagtccctacccacacaaatgtacaagttccatcagctgtacatggagatgagcgccaccggtagagagatgatcggagcgaggatcagggacacggacttcttgcaaggagatgacattctctggatcaatttcaggggaatctacgaactataccagctggacgccctcgacgtctctattatgagttgctggattttgtaagtatatcgttcagttagatttcttactatacgtctcctttaattaattaggtccttgtatataagtagactatataaaataaaatactcccttttatcgttgtagaatggagattcaaagggcccgacggcggagggttttcgatactggattcatcgaccctcggagagtaaacgtcgcaatgctcgaccaatatccacaagaaacagaggacaatctcgtccatctcctgaaggcgcagcattacaagacgttcatactgttgccgtacaacacagagttagttcaattttactgtcttcctacataccaaatttcattcccgtacgaacttcctaagtgtttcatatgtaatgcatcccacgcacattgcagattccactgggtgcttttactcttcgacctgtcggcctgcaccgtcaacgtatatgactcaatggataaaaaagagtctacgtttgacaaggttttcgaacttatagacaggtaccgtcataagttcctctgttaattaagaaaatcttgttatgttaattgctactacgaatcatagctttaaactccatgttgggcttggtatcggttccgtcatttggtccgcggcaaatggagagaaagacttaggcggaagttcaaatttcctgtgagtacacatgctctacatttatatttctccgattcaaattaatacatacaactgtatagtatattaattagatctcacgccgttaatttgtcatttatttgtagtgcgcaaagcaaaagcagggaactaacttgtgcggctactacgtgtgtgagtattgccactgccttgcagaccaaatcatcaccacaagagagctcgatgtacgtacaaataaattcaaaatttcattacgtaacgatttcttgtttaattactaatcaatttcatacattcatatagtttattcgcatgagggataacctgatcacacacaagaaatttatcgcagcggttcaagaacaactcatgggattcatcaacgaagaaatccttgatcccaagggtgaattctactacgacggaaacacaattcaccggtccttatcttctgagctagcagcgactactactacgtcgaaatcgtagctagctaggacatataatggattgtaattaatacatgactacatatgtttctatatgcatgtgtacacattttctataatgtaaatatattttggtcatatatatatctatatacatatgcatttgcataacatatatatgtataaatacatatatattatgcatgtatatacatataatataatataatatatatatatatatacatatatatatgtatgcatatatatgtattgaaacatatatatgcatggtttatatatatatatatatataaaccatgcagcaacagggccatgcaaaaaaaaaaaaaaggtcagctcgatctttagtcccggttggtgttaccaaccgggactaaagatcgatctttactcccggttatttcacccgggactaaagatagcgatctttagtcccggattggtactcccggtttggaaaccgggactaaaggggggttacgaaccgggactacaaagggtttctccaccagtggtggtgcctcgccgttgcgtcgcttcatctcttcatcctgcgtaactcatgcatccgaacagcaatacactttttcccaactttcaccaggtacgtagatgtagcgtcggataattaatatccttaattaattcgcactcttctacgtgattactatttgattccatcgatctctacgagtcggattcatcctcattgcatgtgtgcctgcaatcgccatgcctgtgccgcagtgcctccaaaatccatatcccagacatgcatccggcggttgtaggatcggaggttcactgcaaggagaggagtctgccgtcatccggcggcggctggagtcttgcacttcgctagataccacagagtgagcgaggtcattcgtacgcatggcaactaatctctctagcaagcagaacctcaggtgcgcttactattttcgctatcatgtgatgtgtgtgttgtgtgttatgtccgctagatttaaatgagtccttaggtggatgctgaaagttttggcgcatcttcatttgctatggatttaatctttcgattgattttgccttttttttctagattaattttatacttaacgtttctcggtaaattcaattttgcatctattctttactaggaccgttattctgcattagctatgggctatggctgtttttttagataatggattataataaacccggcctctacaccttgtgagggtctatacagcctaagctatggctgtttttagttcacgtattgctactaacagcgtgccattaaaattttgctgtcctattttctgaattagaaatgttacttggtgttggatatgattctgatcataatcattagtcaatatatttcctatctaattgtgcatgataagaat

SEQ ID NO: 19041 - DNA, 1579 bp, Oryza sativa
gtctgacttggattgcatcacttcacttttgccagacagcacaatgcaacgattacatatacattttatgaataaatgttatatggatattccccatttaactaacttgatgacttaatctaatgtatcaccatgcaaatacagctccaaattctcttcatatcttagtactttctctcttggttactgttacgttttacaaatatactgatctttatattaacctagagaaatttgacttcgattccccttcaattccagcggcaacgcgcggggtatcatccagttaccataaaaattgcaaccgccgagagaaccggggatgaagagacccccggtcacccccacgacgtaatgaaggcaataatcaccgggatcccgatcccagcgatccatcttcttcatcatcatgttcatcaagtagacatccacggagatgttctcgagatgatgatcgtcgattagatttctaacctggaggtggctacagagctttcaagccttatctatgggaagtccgatggcccacaaacttccggacccgttgagaagtatgacggtaacaccgatcctgaggagttacttcatgtctattcaaccgtcctctacggagctggcatagatgatagcacgttgggaaattacttgccgactgtgctgaaaggttatgcccgctcatggcttatacaccttctcaagtcgtctattggatcatggagcgatctctgaaagcaattcgtcataaatttccaaggtatgtacaaaagacatgaggtcaaggacgatctacatgctacgagacaaaaaaaggtgaacctctcagggattttatacggtgattcaatgaataccgtaatactatccctgacatcacagacacttctgtcatcagggcattcaaatctagagtcggagatcgttatatcatacaagagagctggcaacaaagagaataaatctgttatgaatctattcgagatcgttgacagatgtgctgacgctgacgaagctctccgacgaaacgatggcaatgagaaagtgtccgatgacaaggtgccagcaaagaaggaagaacctggaactagcaagaagacgaagcagtccttcaagaggaacaaaaagaacaaggctgaggccgaagttctcgtcattgaccaagagcccccaacagcagtgctgatttgaaattcaaggtgaagcttcaggaaaaaagtggtgcccaataaacaagacatgttctcactctttggctggctactctgtttttcagaaggcgatggcaaaatagatggcgctcacacgagaccaacgagtatgtttgttgagagggaggatagccatccatagtccgaggacgatgctaactttctagacccctttcaccacgttgctcatatcttcagtggttgcactccttactcttcgaaaagagaatgcaaaaaggtgaaacgtgaagtctgtttgatatcctaggggccaaatgtcaaactacggtggtcagatcaaaagattaaattcagatgatgatcaccccaccatgaagactactcctgtatgatatcctatagtggttgagccc

SEQ ID NO: 19042 - DNA, 3878 bp, Oryza sativa
tctcctaaagcaagcaccgattaggggggaggttttcaactcgaaatttttgcttgaactctatacgaaaggtgaagaactctctatcctccttcatttggctccatttttgttatatttcgttggtggaaagtggagtttttttaatattttgacaaggtttgttctaactaatttttgcaaaatctagcttcaaaatatatgttttgatgggcaaattttgcatgtaatcaattgtacatactagttacatgtattgttgtatttttttttggagacaaatgcatttaaacttttgtatgaaatacctgcggtctatttttttatttgtaacttttttgcctttatataattagatggatcagtcgtcatggatgtatgagatgtggagaacgcagccgatatttattaaggaagcatctaatttattgatcaggctaaggcgcatgctttgagggagaatatgacaaagatcttttgtccgtgccgtcattgcaagaatcagaaattgttggtagatcctggtgaaatattgggtcacataatggagtacggattcaccgccaactacaaggtttgaacctatcacagggaattcgccaatccgaaagatgacgatgaagagttatgtttcgagatgaatgaggcagagaattttataatcgaagacatgtcgcgtgaaagaatggttgtcgatgtttccaccgatagtgatgatttcgatggtagttttgatttagaggatatgctacgccatgttaaaccagaggtgctagcgggcaggtcacgaggattggagaattggcaggcattagagaaggcatcgaaggatcttctttacgatgaaccgaagggatgtgataaggatttcacagtcttgcgttcagtgcttgaacttctaagattgaaggctaaacatggatggtcggacacaagttttaatgatctgatgagtttgttgcgtgtgttgcttcctaagcctaactttgtaccatcgaacacgtatcaagcgaagaaactcatatgtcctttatctcttggtgtagaaaagattcatgcttgtaagaatcactgcatattataccgtaaagaatatgcggaattggaatgttgcccaacgtgtggcacaagtcggtataaaatggggaatgggcccgtagattcagagtgtaccgatccagattctgataagggtaagcgcgggaagattccttcaatggtgatgtggtacctaccaattaaggaccgcctgaagcgtctgtactcaaacccgactgatgctgagttgatgagatggcatcaagagagccagaaaatagatggtatgattcgacatcccgccgacgctcgccagtggaagacatttgatgcaaaacacccagaatttgctaaggatcctaggaatgtaaggtttgcattgagcactgatggaatgaacccgtttggtgacataagcagctcgcacagcacatggccagtccttctcacaatgtataatcttccaacatgaatatgtcagaaacgaaagtacattctactcactatcctcatacaaggtccaaaccaacctggaatcgacatagatgttttccttgagcctttgatggaggacatggaggagctttggaaagaggggttacgactatgggatgagtttaagcgggagcacttcaatctacgtgcgatcatattcgttaccatcaatgacctacctgcaaacttttcattatctgggcagattaaagggaagactggatgtctgatatgtctggagaaaacttcatacagatacctgacgtcgtctttgaagacagtgtacatgcgacatcgacggttcctaccacaaagacataggtaccgtaagatggctagattgttcgataatacagtggagaatgacactgccccagtagcaagaggtggtacatacgtgtatgagataacaaagaagattaatgttgtatatggaaagggaaagaagaagacagtaaagaggaagaaagctgatggtgacaacggtactgcgtcgcctttcaagaagcactcaattttcttcaaatatttagattacaggaaggacctagagattcgacatgcaattgatgttatgcacctcgagaagaacgtgtttgatagcaccgttggcacattgctggacatcccgagtaaaacgaaggatggattgaagtcacgtaacaaccttgtatatttgtccatacggcatgaccttcacccagtagtgctgccaaatgggaagaccgagattcctcctgcttgttactcgttgacacttgaagagaaaaaagccttcagtaaatgtttacaaggggttagagtgcctactggtttcacatcgaacatcaggaagctagtatcaatgaaggatttgaccatttcgggatacaatgcgcatgactgtcataggttgctaacggtgttcctaccaattgctataagggcagtcaaaccagtccacacaaaggtggttataacaaagttgtgctactttttcaatcgaatttcgcagaaggtatttgatcctttggaattaggtccgcttcagacatttgccatcgagactgtatgacagcttgagatgtatttcccaccatcatttttagatatgatggagcatttgatcgttcacatcgtccctcagattattgaacttggtccattatacttacatcagatgtgggcctatgagcgttacatgtcgatcctcaaaggctatgtacgcaatcgcgctcatccggaaggatcattgatagaggaatacacaactgaagaggcagtcgagtgttgtatggactacataaaggatgctaatgccattggcattcctgttcatcgacatgaaggtagattgtctggaaggggtactgttggtaggaagcagttcttcaataatgattacaaaaaggtgtccgcggcacacaacagcgttcttcaacagctcgctatcgttgagccattcattgagcgacacctagaagaaatcaaagcctgcttcccagggcggtccaatgattggatatcaagagagcacaagcgtcgctttcctccgtggttgaaagatctaaacctgccagttggtgattctgtggaggaacttactttacaaagactggcatgtgggccttcaagtattgtcaattcatggcaaggttacgacatcaatggatttaccttgagtacgactacgaaggacatgaaaagcactgcacaaaacagtaggatccgtgtcgaagcgattgacacgagtggagaaaagaggtcgtattatgggaccattcaagaaataagggaactggactatggcctaaacatccagatccctgtgctccgttgtgaatgggttaaagacacaataggggtttccgttgatgactacgggctaacgatagtcgatcacagtaaaacaggccacaaggatgatccatgggttttagcagagcgtgtggctcaagtgttttatgtgaaggacccttcagatgaaagaaaaactattgtcatatccggaaagcaacagatcgtcggcatcgacaacatcgaagaccccaatgattacaaccagttcgacgatgtaccattgtttactgatcttcctatgcgaattaagaaggttgagagaacaatcgatgaagcaaatatgtcgtacgttcgagcagatggtgttgccaaggttattaagtcatagttatttcgtaacctttagttctcattgtgttccaaatgtacgtgcatgaatttaggtcccccttatgttgtaatcattagcatgtaacatttgattacgagttttgagcaattttcatgagttttcttagtgccaaaaacattggaatggataattgtggcgaaatattgggaaataa

SEQ ID NO: 19043 - DNA, 9834 bp, Oryza sativa
tcgccgccgcacggacctctcccccctcgccgttgtagccgtcgccgcagcacggacctctcccccctcgccgtcgccgtcaccaccgcacggacctctcccccctcgccgttgccgtcgccgccgccaggacctctcccccctcgccgtcgccgtcgccgccgcacggacctctcccccctcgccgttgccgtcgccgccgccaggtcgtccccgccgccaagtcgtccccgctaccgccggctcctccccgaagtcgccccgcccctcaccgtcgccgacgccgctgccaggacttctaccccctcgccgttgccgtcgctcggtaacatttacttttaaaaaaagaaatgtgaaatgtgcaattgtggattgtggattgtttaattgtgcatcgtggattgtgatatgtgcaattgtggattgtttaattttgagaaggtttaattgtggattgttaaatggagatttatgtttaaattgggacttatgttaaattgggatttatgtataattgggacttttgttaaattggcacctatgttaaattgggacttatgtttaaattgaaacttatgttaaattgagatttatgtatatttgggacttttgttaaattggcacctatgttaaattgtgacttatgtttaaattgagacttatgttatattgggatttatgtataattgggacttttgttaaattggcacctatgtcaaatggagatttctgtttaattgtgactgatgctaaattgggacctatgttaaattgtgacttatgtttaaattgggacttatgttaaattgagaattatgttaaattgggacttatgtgaaattaagttattgggacttatgtgaaaataagttaaattgtgacctatgttaaattgagatttatgtataattaggacttatgtttaattgagatttatgtataattgggacttatgttaaattgggacttatgtcaaattgagacttatgtgaaattgcgttaaattggtacttacgtaaaattgggacttatgtcaaattcttttacgtcaagttggaacatgtcgaacgaaaaggttccatcgaatgcaccaatagcgcctcaagaaggtaacgctcctcaaaattccggtagcaataagcagccagacgcttctagtgaagaaacgtggcgcacaccaagtgacccgtttccaatggaaataacacaagtcgccccccgcgatgatgatccggactacatacctatcgaacaggccgtaagtgttgaaaatcgttagccatgtattattccctaactatgatgtgacatgaacctaatggtgtatagagttacctattctttgcagatggtagtccgacgccgctcgaaacgtaaagccgagaggaacaggacagagcaagaagttgagatggacaccgctacgtctgcacctgaacgtacggagacatctacaagtgcaggcgggagtgggaaaaaaagatgtggtgagagaagcaagaataaattacccaaggaaacttacaacgtgattgctctcgatcaggatgggaagcccgtcgagccaccgatagtgcggtccaagttcagcaacgcatgtggcactctagtcaggacacgttgtcccattaatgtcaagttgtgggaaacagtggacgacaacatcaagacacttctctggaatgagttgcagaagtattttgtgttccctcctggatcagaggtcagggggagagattacgcacttaaaaagatgggagatcgatggcgacagtggaagtccgatctaaatcgggattatgttcagaagaatctcccaccgtttacggattatggacatatatcgcaggctgactgggacacgtttgttgcggatcatacaacagctgaagcattggctttgaggaaaaaaatgtcatacgctggtcacgtcgatcaatggcgggagatcgagcaaagatttgccgcggccggtaagcccctgctggtagaccccatggttgaacgtagcaagaactgggtttgggcgcgtagcacaggtcaagtctcggatgagggagacatactattcgagactccagacatagaagaagtgactactaatttgcagcagatagtcgagaaagaaagatcaggacagttcgtcccacggtggggagcgagatcagcttactgcggcgttggggacggctgaacactctggacgtgtaaggggtttgtcctcaaagacaagttggaaggtcgggtttccacaagacgcaccaagttataagaagagagacaaatacaaagaacaactatcggacaagatctatgcgcaagtgaaggaacacttctactcgttggcagctgaaaacccgacagcctttccaaggttattccctgatagccaacaacccacacaatccgcacagcaaacaactaatgtacccagcagtgtaggctcagtgcagacaactaccttccctgtggatagtataactggaccacctccgtgcagtctcatcgtaccaatcggtcgcgctggaaagactaaggaggttgcaatgggttttgcaatacccggacgtcaattccacaacacggcaatccctgaggattacgcaaggatacaggtcgccaaggtccatagcaaccacgtttccttggaactagacatacctacacttgaggggattgaacttctcggtgatgcagtgaatcagtttatcttgtggcaccgcagagacataatcctgagcgcggcctttcctgcagcaggatcttcaaccccatcctcatcacaggcaatgactgctgccgctcctgcaccaccgtcgccttgtcacgaccggaaataacccaacgggcgttccttacgtgcgtgcattaatccttgtcccaggaggcaaggtacaccaaaagttgatacaattcagagtttaacaagcggaagcgtaaatagttaatttattacatgggcagcgaaggcccagcacacacaaagacaaatgagaaacagcggaagactagggcgacgaccacaggcgcttgacggcaggcacgagctagacaccaaagccttcatcttccaggggctcctcttctgggtttgggaaaaattgagcaagactgagtacaaccaccgtattcaacaagacacacccacaagtacagaataaatgcaagggagtacaaaggagttatactataaagggttagggttgcagtaaacagcatttaaagatatttagttgctcaaaactatttagtaaacacgattctagaactatacaatattatttatcaaagccgtgaacccacacgaacctgccttaacccaaggcctacgatgattcagaccgaactggcaacccgaccctgggtcccagctcgtcccaagccaacccaggccaaccattccaccttttagttgttaagcaggttttaagaattaaaacactaacttgggtacattgctcggcttgcccataaccgagggcgcggctattcgaatagattatactctgatcagaggtgtacatctttacccacaagacacatcttcctcacgtgtaaccacgtgccacataccaccacggtatacagacggaagacgtgacatagtttccaacccatcctagccatagacaagagtaccgacccaatcccacctacggccggaacccccgggacaggcaggcaggactgagcccctagcagcaggacaccggccctgtgccatgacatctcgactaccgggccacagctcgtgtagccttcatttgtcctagagatgtccatcgacccccgacttcttccatctccatccgtgtacttttgtttataaccagactgagccacaaactaagccttacccactagacatgtggaagtacggtagtgctttgcaacagaggcccgaagaccggtccttatatggccgaggtgctactatcaaaaccatgcaccccgagcccagcctaaaaccattttggggattttgaatagaaggagcggtgtgaagccaattccacaataaccaaaccatttgtcacaccctgaaaattcaaaatatatatactttgcttaattctataattcctagatttttctgggatttatttgagctaagaaagtatttttaataaatggaattgcatttaagaaataatttaaattgaaaaaggttttaaaaagtctcttttggctttgggccgaaagtcggcccaaaatcccttctctctcctcagcccagtccggcccagtccgcagccgcccgcgcgagcgcgctgtcgctgacaggtggggcccacccgtcagtcgtcgtcttcctcgggccgaaaccctagtttcgcgccgccgagctgccgtcgccgccgctttccaaatccggccgttcctttccttctccggccgatttgttagaggggaaacaatctccgggatctcctctaccttttctcctttggaatctttggttaaatcgctttggaaagcgtcggagacgagttcgtttcggatcggttttccctctctccaagccgaaggtttccttcgccgttgccgtcgccgtgggccttcgccgccgcctccgagcccctttaaaaggacccccggtgtctcctctacccgtcgcagccctcgccttcgcctctcgtcgccggaagagctgtagcgccgtgtgccctagctttgccgtcgccgccgccgctccagccgtgcgccgccgtcgtttcagccgtcgccgtcgctcgggaagaccgccgtcgtgcttgccaagtcgccgccgtcctcgtccgccccttcgctgccgtcggagaccgccggagcatcgtcgccgtcgtcaacccgaaggtagccgccgcttccttctcgtcgccgtcgtcgtccgttccttttccgccgccgttttggtcaccggtgtgttcgccgcgttgtcctctacgtgctggtgccctccgttggtgccgtggtgccgccgttcgccggcgagtgtccgccgcccgagccgttttcttcgccgagccgccgccgtcgtcggtgatgtcatcgttgacgtcatcgggatcctctcccgtgagccggtcatggaccgatcgatcttggccgtccgatttggatcggatcaatctcggccgtccgttcgcgtgaaccgccgcccatgcgcccggtccaccaaaccctagcccgctgacgcaataaatccccttttccttttcaaaaataattcattattgcgtcataattcaatttaaaccgatttaagtgttttaatccgatttaatctttaaaaattcataactaattcatcttagctccgatttagttggttcaattctctaattttttctaaaattgagatctacacattaaaaatatccacatgtactgttcatgcttgtttatgtgctgttttggtgattttgcttctttttgcttagattccgtcgtttccggagagtccgttttcgcggaagaagagtttgaagagttccaaggccagcaaggcaagtcacacagatcccaaacaaccctttgagcatgttgatcctatttaaagctattgtttctattcaactattgcatctattttcgaatgtcattgggtggaattgacctattctttgttatggcccttttgtacattgattaccttattccttgataccttgggttattacaatttgactagttgagctttatttatattggttcaactagatattagatacaattgcttagccctgcttagaaacattagtacacttatgggataactaatgactcactattatttcatgatggcttattgatagttcacgatggtcaatcgtgattagttaattaattaatgtgccaactaaaacctgataatggtgggttgtgggcacatggttttgatggtcgtgctcatgacaattaaggaccggttcacgagtttcggttgtgaaacatttatcgtgccaaccacaagccagcatgggcaacggctttatcttttgtatagcatggttcattgcggggcaccagactgagaagtggcggagataagcccacgggggtcgctggggagtccatgccttgtttataagggggtgattatgatccaggaaggtgcgctgcagtggattgtgttatgcgaggggtattgtcacaactcctttccgagataccgtggtggtattgaggcacatggtgacatgatgtggggttgtgtcttgtgggtacagtggtacacctctggccagagtaaaactattcgaatagccgtgcccgcggttatgggcgggtctaacaatgtctttcgtgattagtctcacacctctcatcattgtaaaagatgcttaaactggtaataatttgattagctcctggtttggaatggtacattcctggtttggagatagaactgtgcagccggggtggttgttcagaatggttgggcctatacaacagggtatgttgtatagcgttggattaatattgtttaattacttaactgttttatcaaattctcaaatgtttgctaaatgctgcttttgcaaatacaaccatattatgccatcctttgttatcctgtgcacttgcatatttgctgcgtggcttgttgagtatgtcatatactcaccttgcaatcattcatcagaagaagagttctacaatgaggctgatggtgtggaggattaggtgtagccttggtcaagctgcctgtggagtggagccgtctgcgccgtttatttaatttccgctgcttagaactttattgattgagaagaactatctacctctgtaatgacattttattcgcttattaattagagtattatttgtactctattatcaatttgttattgtgtgcctcggctgattcctggacgagggttcacacacatgtaagcgtttggaattttggatagaaattccgggcgtgacaagttggtatcagagcccctttgaccctaggttataccaaatggttacccaaagaagccctctgaaaaatattggaaaagtagaactgttctcctccctttctcttttaattaaccaaactaatggcacatgcacttcataattttttttttaatggttttcattaaaaatttattccagtgttattagtactgtacatctattactgtactaatggctcatttatcagcaaaagttttacaatactgttttatttaatcttgctgcaataaaataaatttagtatgttgattttataatttcctttcatctcttttgaaaccagttattcaaaattacaaaatttgtgacctcgtttccaaatgttttaatttatttcgcaaagcttggtttactttatttacttccctttttactttgattttctaactttattcaaattaatccaaaaacttgtgctattaattggataaaggtcttaactccctcctttcacttgtctttagatgccgcgttacaagcctgagtacctgtttggtgttgagggttttgtccaggagttgcgtacgatgtcctttgtcattggatttgggactgcccctttttatacccagattcctcatgatcgtcatgaagagaagtgccgagtcaaagtcaccttgaacagcaatagtgaagatattccctcagtgatgttcgaagctggaggaagaaactacatccatgcatgtcaggaggtggcaaggatcgccataggagagctccgtgatcgctacagtgatcaattggccgacactgagtatcgttaccatcctcgccaaccccagggaagtgaccgtggcagttatcttgagactgaaggaattgagaattatgttaccacaagacatttggttgagatgttgtgggctatggatgaaagtcgtgcggagactgtgttagcagctcaagatcgtgaagaccggaatcatggtaagatttgcaagttagaagacaaggtggatcgtttggagaaggaattagccgcattgaagggagaagcaccgccgcagaaggccaggattcgtcttaccgcaaggaagagagctctatttgtccctcgctatcaactggcgccaaaggttcgtgtggtggagaaagaagttgccccagctcaagcggatcctccggtcatcatcttaagtagtgatgaagaagaagaatctaagcgcaacaattccaagattgagtgggtagcaacccaagatgatgaagacgagccttcaatcgacctccgatgcttggaagaactagagtgacttgttaagtcgttgtcatagatcgttgtgttagtttgcttgcttaaagtttgcttgtgtgtggctcgcatgtgatttacatcagtggtgggatgtaagtgcatgcgtttgtttgcttttgagtgttaggaagttggtgagtttagtggtgtgagagtcttcagtttgtaataatgaaactcagttaagatcaataaaagttaaagtaattctctgtcctaagtagttttccccgttttctcttcttgtgccctgtccatgccagatggtgaacactcgtagcaatgggaatggtcccaacaaccccaataacaacaatggagagaatcccactcttgctcaagttcttgctcaacaaacacagcttatgaacatgatgatgcagcaatttcagaatcagcaaaaccaagggaataatcatgcacctccccagaacaagttagcagaatttcttcgtgtgaggccgcctgttttctctagtaccactaatcctgttgaagctagtgattggctgcatgccatagagaagaagttggatttacttcagtgcactgatcaggagaaggtatcttatgcatcacatcagttgcatggccctgcctctgaatggtgggatcacttccgccttaacaggactactgctgaacctatcacttggcttgaattcaccgctgctttccgaaagacgcatataccatcgggagtagtgtctctcaagaagaaggagttcaggtcgcttactcagggatctcgctctgttacggagtatctgcacgagttcaatcgtcttgctcgttatgctccggaagatgtgcgcaatgatgaagagcgccaggagaagtttttgggaggacttaatgatgagctttcttacccactcatggttggagattatcctgatttccagaaattagtggataaggctattcgtcaggaggacaagtataatcgcatggagcagaagaaacgtcggattgctcaattcaagacacaacagggaaataatcagaagccgcgtcttactttaggaccccagtctatgccacagggaggttcttcgtctgttgttcgtccgcaacgtcagttcttcaacaacaatgctggcaacaacatccgtaataaagctccacgtcctgttgcagctccagtacagcaacaacctgccaagagggagcaaggcagcaagcccgtggtgtgtttcaactgtggagacccaggacattatgctgacaagtgtccgaagccccgtcgcgtgaaggttgtccctgcccagagtaactctgctgtaccagtatccaaggctcgtgtaaatcatgtcgctgctgcagaagctcaagatgctccagatgtaattttgggtacgttccttgttaactcagttcctgcaacagtacttttcgattctggtgctacacattcattcttatctatgagttttgcgggaaatcatgggatggaagtagaagatcttagacgtcctttgatggttagtaccccaagtaatcaagcactctctttgcaacgtagcccctcggtcagaatagaaattaaaggagtaccatttctggccagatcttatcttgttagaatccaaagacctatgatgtcatcctagggatgg

SEQ ID NO: 19044 - DNA, 3171 bp, Oryza sativa
ttttagggtcgttttgggacgcgacaaacctaccccccttaaacggaatctcgaccccgagattcggaagaactggcgaagagatcgggatgggctgccttcagctcgtcttcacgctcccaagtagcttcttcctcggcgtggttgctccattggaccttgcaaaaacggattacccggttcctggtcctgcgctccatggtgtccaggattttcactggcctctccacgtaggtcaagtcttcgcgaacttcaatttgctctgagtcggcctgctcggatggcactcgaagacatttcttgagttgtgacacatggaacacatcgtgcccgttgcccaaggaggcgggcagctccaactggtaagcgacttcttcgcgccgagcaatgatacggaaaggacccacgaaccgaggtgcgagcttcccttttgtctgaaacctgtgcacactcgcaatggcgtgacccgaaggtacacaaaatcgtccactgcgaattccaggttacggcgacggttatctgcataacttttctgccgggactgtgccacctttagattatcccgaatggttctgaccttcgcttcagcttctctcaggatatcagtcccgaacacttgactttccccaacttggtcccacaatagcggtgtccggcatttgcgcccatacaacgcttcataaggtgccatttgtatactggcttggtagctgttattgtaggagaactcggcataggggagactcttatcccaggtcttcccgaaatctaggacacatgcgcgaagcatatcttctaggatctgatttagacgctcggtctgtccatctgtctgcgggtgatacgcggtgctgaaatttaatctggtacccagctcttcttggagcttcttccaaaagtgagaggtgaattggcttcccctatcagatacgattttcttgggaacgccatggagactcacgatcctagcgaagtagagctcggctagtttgttccctccataggtggtcttcacaggaataaatcgagctaccttggttaatcgatccacaactacccatatagaatcatatccaccttgggtttttggaagtccggtgatgaaatccatcccaatttcatcccatttccattctggtacttggagaggttggagaagtccggccggtcgttggtgctctgccttgacacgctggcacacatcacaaagggccacgaactctgcaatttcccgcttcatactaacccaccagtatttctccttcaagtctaagtacatcttcgtactgccagggtggatggaataaggactttcatgagcttcctgaagtatcagctgtttatgttctctgacatccggaacgcatacccgatttccgttccatagggttccatgttcatcctctgtgaaacccgcagctttaccctgttccatattttgaggagtccacgcatgtccgggtcgttcttatgagcctcgcggatttgatcgagcaaggtgggcttggcttccaacgcagccaagaatccacgactcactacgctcagattcagggcttccatctgttggttaagttcgggtggaaagccacggacgttaagagtgttgcaatggctctttcgacttagagcgtcagcgaccacgttggccttaccaggatgatagtgaattcccacatcgtaatccttgatgagttctaaccatctcctttgccgaagattcaggtccgactgagtgaagatgtatttcaaactcttatgatcagtatatatttcacagcgattcccaatgagataatgccgccagatttttagagcatgaaccaccgcggctaactccaaatcatgggtagggtagttgccttcatgaggccgtagctggcgggaggcataggccaccacatgaccgtcctgcatgagcacgcaccccaatccttggcgcgaagcgtcacaatacaccatgaagtccttgcgagtatccggcaagattaacactggcgaggaaaccagcttttctttgagagtttggaacgccttctcgcattgcgggctccacacaaatttctcttctttcttcaacaactgtgtcatgggtcgagcgattttggagaagttctcgataaacctccggtagtatcctgccaaacctaagaaactgcgaatttgagtgactgtcttgggttgcttccaatcagtgacggcggtcactgttttggggtccacagcaactcctttagcagatatcacgtgccctaagaatttgacttcggacaaccagaactcacacttgctaagtttggcatacaattgatgttcccgcaactttcccaacaccagacggagatggtgctgatggtcttcctctgattgtgagtataccagtaatgtcatcaatgaaaaccacaacaaacttatccaagtattccatgaacactttgtgtcattaagttcatgaagaaggcaggagcattggttaacaccgaatgacatcaccgtgaattcatacagtccgtatcgcgtggtgaatgcggtcttaggaatatcttcttcacgaatacgtaattggtgatatccggaacgaagatcaatcttggagaatacagtggcacctttaagctgatcgaacagatcatcgatccggggaagagggtacttgttttttatggtgacttcattgagagctctgtagtcaacgcacatcctcttcgtcttgtctttcttctccacaaaaatcacaggagcaccccagggggaagtactcggacgtatataccccttttctttcaactcttccaactgtttcttaacttcagccagttcatttgctgccatacggtagggtcgcttgtatagaggagtggttcctggagcaagatctatccggaactcaatctctcgcttgggcggcataccgggtagttcttccggaaacacgtctccgaactctctgacgatggggatttctgacagtcctatctgatgaagttctgaactactgacagaggttgggggtgcaaagaaaacaaccggctgttctggccctgggtacagagtgacagtgcgtctcgcgcaatccactactccttggaattgagccaaccaatttatcccaaggatcacatccaagctcttggtgtctagcagaatcagatccgagggaaaaggaatccc

SEQ ID NO: 19045 - DNA, 878 bp, Oryza sativa
gtctggagttgtcagcacgtttctcggcgtgtcacgtggttcacacgaccccgtaatgacatccttaccaccgttgttggagcggggaggcgcttggccttgctgacgcctcagctttgggcatttatccgcaaagtgcccgggctcgaagcagttgaagcacagacgctgcggaccttgagcgtccctgcggctttgaccaggctgcacagttggcataggaggacggggcgcacgagtcccttgttgactctgctgctgctgcggctgtgggacgcgcaccacgaattgaggtcgaggcgcggagcgtggttgctgctgctgttgttcctgctgcgaggaggatccccctggatagggattggtgtagcggaccctttggttagcaccctgttggttgcggaaattcgccaagcggcgcttgtgtgactccagttccttgtgcttgtcttccaagcggatgctcttgtccaccagacgttggaaatccggatagtccccggagactagacggacggacagctcaggatccattcccgccaagaacttctcctgcttttcctcatcttcccgtacatcctccggggcgtaccgggccaggttgttgaactcatgcaaatactccatcacagagcggttgccttgcttcaactctcggaattcccttttcttaagggccacgactccggcgggcacatgggttctccggaaagcagcggtgaagcgggcccaagtaataggctgcccctctggctgcgtagcctggaaatggtcccaccatagagatgcgggcccctgcagctggtgggcggcgaagatgactttctcctcatcgctgcactgcacagtgtctagctttttccccacggcatgcaacc

SEQ ID NO: 19046 - DNA, 1708 bp, Oryza sativa
acacacttaggtaaaagaataatagtaccaaagttaagcgagaataaatgtaaagtaccattatgaaactccttaaaaaggtttattaaatcaaattttataacatcttagaaaacttgataaaattcagcaggaaacccatcaagacctggtgctttgttatgttccatctggaaaatagcctccttaatctcctcttcagtaaattccttgtgttagagcctcattctccaaaagagaaacttgaggaatgtcagtaaatttactctcatcaaactgaagaggagaatcatctggaggaccaaaaagacccttataataagtggtaatatgcgatttcaaattttcatcaccatttattaattggtcaccatcttgtagttcaaaaattctagttttcctatgttttccatttgcaaccaagtgaaaatactttgtattagaatcaccctctagaatatccttagatttggccctcagataccatttgatttcctcctctctcataattgaagataatctattcctataaaaccatctaatatccaattcctcctgactcaaaagaatatcctctttgtctcccatgtttcttttgatttctggaagtgcgtcattgcatgtacaagggcaaagtttcatgggtactggctccatcagtccgccgctgcttccactcaaaagctctgttgggcgacacgggcagcgaccgccgcttgcacctctaccccccacctctctccctcccgcctcaccgccgccggagccagacaccgaaaacgtacggcagcatgaatggcggcggcgagggcattaacgctctcctgcgcgggatctaggagctagcggttgctaagaggacaacggtgacgattgccactgctggcagcgtcgggcagtcgcggagaagttcaaagccaccggcgagagctcagaagcgcagtgggaggatccggcgaggaggaaaggcaacggcaggcggatccggtgaagagggcgatggggcggtggctcgcacgtcgtcagcagcctggcgctgccggcggcatagggttgtccaaggggagacatcttcgaccctcgtgactgcctacgcgcaacccctctttgccgccggtgaagctggacctgttcattcgcctccttggccgatttgtctagatccacttactccttggccagatctactcggttggggctgggaggtcggtggcagcggcgccctgacctgcccatgggggcggtgtgtgatggtgtcttcaagccgctagcgtccgtgccgccgccgcgtgagctatctgactagtgtcctggctggctttaccccctgctctgggttgaaaaccccttttggtttccacagcgtacgatggcgtcttctttcttgttgtcgtccttcttcttgaaggcatcatatttggaaatcccctgccataaccctcgggtggcttcttctcctcgtcattgttgtgccctctacctgtttgtcccctggcatccatcgtgtcctgcctacacctatcctcgacgcctttggtccaccttgccttgtcttttcatctaaccagtgttagtgttcctcctagtttccttggtttgagtcattttggttgttgtttcttgccttgcttcgaccaccttcaccttgatccaccataaaccacgagtatgcagtttcccctttcctcctcagatttcttccattttg

SEQ ID NO: 19047 - DNA, 5530 bp, Oryza sativa
cgtcgatgaggccagcatgggcgaagagaatggccgacctgctacgaccggacggagagctcatcaccctcatgtatttggtaattaatcgacggtatcaacatgtctaaagataataataatatcagccccgataagaactaaccaaaattaacctgattttctaaatttgttccttcattacatatttacatatgcatgcaggctgaaggacaagaggccgggccaccattcaatacaacagtgctcgagtaagatcatgcatattgatctttgtacaaatgaaaaatgaaaaaaaaatagatgtcacttgatcatcagaaaaataaatccgctttcccatatagttatatgttccacagacacgtaactgttctccagtatatagaaatctgatcacaagtctgctataccatgcatcatgcagttacaaggaggtgctgaacccgttgggtttagtcattacttctatcgaggacaatgaagtcgcagttgaaccacgaaaggtgattagttaacaaagaacatgaattattacatatcaccatattgcattaacattatttgcttattaaaaaaacatttcggttctactttactcaactcatggcctataacatctgctgtatgtatggagtagtagttactactccctctgttttagattataagacattttgactttagtcaaaatcaaattgttttaagtttgactaagtttatagacaaatatagtaatatttataatactaaattagttttatcaaatcaacaattgaatatacttttataataaatttgtcttgggttgaaaatgttactactttttttataaaattggtcaaactttaaacactttgactttgactaaagtcaaaacgtcttataacctgaaacggagggagtagttagctagctatgtaccacagtaaacccaatctgatgatactttaacctcgattaatttccaggggatggagaaaatcgcaaggtggaagaggatgacaaaatccgactaataagatagtggaggacgcgcgcactccttgttcgcagcataatatgtctacgtcacccgcacatgtctctaataaaaagaaggaaagaaggaaaaatgaatttaatgggcctgattcgagcttgtgcatccgtgtaaatacataatatagtgtaattattctatacatctctatgcaaaatgtatggcgtggcttaattgttacagtaaattaattacttttgtcttctattactactctcgaatagatctctttccctgtgaattacaccattatttagctcactcctctttctaaatctgtttctcaaaaaagaaacttcttttccctttcaactgattggattttttaaaaactgaattggtcgtcaattatgtggcactcttatggagtaaatatttgccttccaataaataggagtatgagtatactgtttccaaaaaagaatagtataagtatgttccgtatgctattgaactgcgttatagatctgtcatcttctttgacaatacattgatgaatttagacacaaatgcatagagaatggagcaaactgccatcagaagcaggtaaggattgccatacaggcgcaacaagttgatctcacagccacaaggccacaacaaacggtgtttcagtctgcttccaacaagcaatgcacatttttcctaggtcggtttccttgatttaaacaaagggctattcacacatgtaatctacatcaccattggggatgtccttgggaagtagccatgttaaaaagccctcattggtgtctcctcttagcctctgggatgaatactccacaagcatgtcccacaactcgccaaccgtccacctatggcgcaatatccactgggtcacctgtcgcagtatgatggggcgaaaaaaaaagagaggtatgaacataagaacaccagaggcttagcaaagaattgctgtatggattaacataaattggaagatcatgtctccaggttgaacatcacagtaattgtttttattgtgcaaattattttattaaactttctaaatgtgcaccagaccacatcaatgactgattcaaggagacactctattggaggatctacaccccttaaccccaaaggatatagggtttttaagttttaccactaaggccttgtcaagagagagggattacaggagattgaggggaaataattcaaaaccacgataggtgtcgaataaatcccctctaattccccttcaatcctcttgggaaaggggttgaatgaacaaggcccaagagaattttcatctcgttttgtcactaagctgaacatccctctcactttttccactcaattgaactagccccagtggctgaaacaaaatagacggcaaatctgagatatcataatttcctagtggcaaaagcaaaagtatccaaaggctagaaatcatagaatacattcacagagccatggacagcacaagacatggagcttacaattattcttaagattttactgctaaaatgaaacaagtactttcgtacagcaaacataaaatgtaggaagggtcgaatagacatgcattacctcttctaatcttttcagtgattcggactcaaaagtgtagtagttaataaaagatcggagtgcctgaaaagcaagaacatacatgaacactccaatgatgtaattacatgaaataatcggtaaaaatttaaattatcgaacattttcgctgtacctgtgatgcagcaatccattgaatcatgctcttgatttcagggtttccaccaaaagccccgcaaccccagtttccagttgaaactcctatgcattcatcaggaatgacacttggacagttatcctttgtatttaaatcctgaaccatgtgaagaaagttaagacataactagaacagactgcttaagtacttctgatgccatgatatgcattaagttactgcatcaatctgaacataatactgagcatattatgtcaggtcttatttaagatcatataatcaggcaacagagtgtggatttgtttgaatcgcccttaattacttcaatggtttacagacagaacaatgtgatagggacaagcagattccgataagtcaatttaacttaagcagagaatgcaacgttgactaatagaccatgatgcttgtcacttgtcagtgcttgaattaaaaagtgagttttgttaacagcaaactcctgaggtatcattgctcaaatacctggacaagctttgcacagagctgatgatttgattgatccaaaaatccacaaaaagccttgttcacttccctgcgtacagatttaccataaataaaaatagtagaagaatgctaaaaatatatagtatttttcttagagaggctgtgaatagttgaaatgacaggtagctagtaaaatatgaaagttatacagatttaagtgaaactgagtgaaacaagaacaaggcataccttagaagaccactagattcaaactgtaacctagttggacagtccaaagcatcaattgccactatcctagttttccgtctacccatcgcatcaaagggtttgctatctaagtagtcaccagtaaaacggaatgaggaaccatacctgtaaaaagcaagttaagagtttataccacgtaaaaatcatcacaagttgtaaagaaaagcatccataaatcacgccggttgataattgatatatgctgtggagtttatttcaaccaatgatctagatcaagaaatggtggataagtgtttaaaactaaccccatgtactgtgagaacctttctgcaccaacaatttctatagcttcattatcttccattgaaaccatgaagagcatgcccacgatcaattctgggtttatcatgaaccggatttcttccttcagcacagaaaatacatcattcataagggaatctcgaaaacatttatatgaatgtcattttttatacaaaactgagggcacttcaattcacatcatacacccatgcaattaaaaatcagttatgaagcgtcgtgactaatttcccaagtacacataatatgacagataagctacataaaagaatgcagcaatgtgctgtacaactgaatgatttgggaataaacaccacataactaatgcaaggcaagctccagatggaggcacttttacagagttgaagatcaagggagtaagatctgcaaaagaaagaaacctgcacgcagcctctggaaagtgcgccacctcccaaatatctatttgcaaagtcaacttcaagggcttcttgttcctcatcttctatcaagcctgaggaaaatacctactaatgaaaataaacaaaacaatcagcaggtttcatcacaccagttaaaacatttgagatgtttgaataatcataaaggcaaaggaacgcccaatttttatcttgataatcatagttttatatgatataaaggattgttgatgggttaactaatttaccatctcttcacaagatttacttcttatgtaacaaaagaaagaagtcagtaaaagggactctaaattttgaaacgcacccggaatgtgcaaaggggaacaccagatttcatccaagtatccatgtcagggtacgtaatgccatcagattcaggacggcgaggaagaaccttacgctcaaacgaaacggaaccagtaggtgtagaagcggtcaccctgtcaaaatagtgaacaaggcacctcaccttctgctcctggctttgcctcgaattataacacagtgccctatggatcaatcagtaaaccacaaaagcataaccaataagctcgaaaagttcaatcatttagcccaaatgtaccaactctaagaaaactagatcaaaatggcagtggaattacgcaaataggctatcgaaattgatcgccgggaggcacgcctcggccctatcggcggtggggaacaggcagaagagcgcgcaggcgagcagcgcggcggcgagctcctggctgaggagcacgagcccggcatcctgcgagctcaggatgcggagcccgcgagcctcgtcgccggcggcgcggtagtggccctcgagcagcgtggggaggcggaggaggaggcgggcgagggagggggcgacgtggtcgaaccagtcccgcgcctgcgcccgcgacaggaggtcgtcgaagaagagcgcgaagccctcggcggcgcggcgcgggagtgggtcgaggttgagcgcgaggcggaggtcggtgagggcgtcggcgaggacgtcgccggaggagacgcggctcacgtcggggcccagcgccagcgccttgagcgcctcctgcgccgccggcggccagaagagcgcgccgccgcggagcacgacggggaggtagggcaggatcgagcgcaggtcgccgcgcgcctccattgctgctcctcctcgagctcgaccttgcaatttgcatgaaccccccggaaatcgaaaatattttcgaatcagtctcgcttggatctaaatgcaattttcgtcacagcttatccgttccctcttcgccatgggacgcaatg

SEQ ID NO: 19048 - DNA, 10121 bp, Oryza sativa
cttcgctcatctcggcattctgccggacggcgagtttgagctagcggcggaggctttgatccagatgttgaagcagggattgaagccaaatgagcacacaatgacaaccattttgacggcatgcccaagggttctcggtcagcagatacatgggtatttgatcaagaaaattggtttgcggtcgcagagcgtctactcgtcgactgcactgatcgatttctattcgagaaacggtgagttcaaactggcaaaggcggtttttgacagtctccactgcaagaacgtggtttcatggtgctccatgatgcagctatacatcagagatggaaggctggaagaggcattgcaagtgttcggtgatatgatttcagagggtgttgatcctaacgagtttgcactatcaattgttcttggagcttgtggatccattggtctggggcgtcaactgcactgctcagcaatcaagcacgatttaatcacagatatccgggtgtcgaatgctctactgtcaatgtatggtagaactggtcttgtcgaagaactggaggccatgctcaacaagattgaaaatcctgatcttgttagctggaccactgctatttctgcaaacttccaaaatggttttggtgagaaggccatagcattgctttgtcagatgcattcagaaggattcacaccaaatggctacgccttctccagtgtgctgagttcttgcgcagacgtggcatctctggatcaaggaatgcagttccattgcctggctctgaaactgggatgtgactccgaaatctgcaccggaaacgcactgatcaacatgtactccaagtgtggtcagatgggctctgcaaggcttgcatttgatgtcatgcatactcatgatgttacatcttggaactcgctgattcatggccacgcacagcacggtgatgcaaacaaggcactggaggtattcagcaagatgcgttccaatggcatcaagccagatgattcgacatttttgggagtcttaatgggttgcaatcactctggtatggtagaggaaggagagctgttcttcagactgatgatcgatcagtacagcttcacgccagcaccttctcactacgcttgcatgatcgacatgctgggccgaaacggcagattcgacgaggcactgcgcatgatcaatgacatgcccttcgagcctgatgccctgatatggaagacgctgctggcatcttgcaagctgcacaggaatctggacatagggaagcttgctgcagacaggctgatggagctttcagacagagactccgcgagctacgtgctgatgtcgaacatctacgccatgcacggagaatgggaggacgccaggaaggtgaggaggaggatggacgagaccggcgtcaagaaggacgccggctgcagctggattgagatcaacaacgaggtgcatacgtttgcttcaagagacatgtctcacccgaactctgattccatatatcagatgctaggagagcttgttgccgtgatgcaagattttgacgaacttgaaccgtttgatgtacatatatgctgatttagatgccactccagatagtatcaaagaaagtaaagtttctttcttttcggatcaagaaagttttatgtgctgtgtttgctaaataaaagatgtataccaattttatttaggtaaggggagggcgtatgatcaaattgcccttgtgtatatatcaaagcccaaaggtttcctcttttggcaggcggcaccactcctcctcatcttcctccattaatagcggcggcggcaggaggacgcacgttgccgcggtgccgccttcacttcttccccaacaccaacagatcgagaatcatggttttccaatgttgctttactgccatgggaaagatgcggaaatctaagaggacggctgatataatctcacaagaagctccaagaacgaaggagagataagcagtactaagtcattgatctcaggtccgctggttttcctattttctgcatatcttcttgtaccgtataaccctatttgagtactaacacttgtgttgtatgtatatatggcgttttaaccaggcgacttaaattcgggctctaatcaagatgtctgggctattctcagtgttgaagttgcatcaaatttgtctaaaagcgttgtctcactcaccttgtctgatggtaattatatgttttgctattgttatacattgtcaaatttatatttgaacaatgtcccctgttataaatggtttaacctgcgatcttgtgtaggaaacacactgatatatgcatgctcgggcatagctatcgagtgccaggaggggtctggtacaattttcctgacctcggctagtttggtaacagctttctatgatactgaagaagtctatgataacttaaaggtggtgcttgttgtcatcctttactaatttttgcttgtttgcttaggatattttgtgactcctttcttgctttgccattatagattgaagtgcgccatgaaggcaatgaagtgctcaagggttatttggcaaaatatgatttagacaagaactttgctgttgtctacaccatggaatctcttgatgttcatattgtacttaccgaaaattcgagggataggtatatcaacaaaaagttagtagctgtagggcgtgacaaacatggcgtattaatggccaaaagtgtgatggtggctggttgtcgtgattcaaacagatctgaagatagcaaagaaattaggttgatctctgaggtaaactcgcataatgatacaagcacatcttaacctttttctgtactatatctatatgcactaaactttattatcaggcctgtaaaagtggaattttttttctatgtgaatgttgttcaatatcacttcctttgttcaaatggagtccttgttgaccatcactttatatttgtgttaggactgggaaggtggaccgctttttgattttgatgggaaatttgttggcatgaatcgtttttcggttatggatagaacatctgtcctgtcatgggtctcaattctcattattttgaagcattatttgccatccctgcaaaacaggattcttaaacggttacaaaatgtcaaaagagtcaggtatgtctttgcttatgtttgatcctcattggttcacccactttattaccctgcatgtgttcatacggtaggctggtttgcatgtcaaacaacatatgagcgaatttgttcttcaatgatctggattgttagctgctgttcctttttataggtcctcaaaacttcagatcctcttttttatctttttcctttttctccttgcctatgatgctaccctgtaggtgttggcattgtgttatgcactggtatgacccgttttacctttgggttggtgttcttctgcagggatggagagagacccacaggtgagctacctgactatcatcaagaaggtgagcacagtgccatagtgccataccttggcaccaccaaacatgcatgcaaattttggttgtatgtaatggtatctatttttaatattagcttttacatttgaactttctaattttacatgaacttatcgcatttagttagtgtatctcagcgctaatcacttggccttgtgcagcaccagtacatagatgtggtctcaacacagaacagtttgggtatctaaactccatgggttatcccaagccgccaataaatgtgttagacggtgagtcattgtttgtaaatttgctaacttatcgcgcatcacatctttctacagtttactactacgaattaatgactattctaccatgtatcttctaccagatggtatgattttggctaattcttttgaagagacttttggagatttatgtggtgaagatctttggagtgaaatcaataaaaaggttccttgtgacatacatcaaaatgttgttgcacttgcttcattcaaaggtgattttacactaattaatgtgctatattgattttcccatttcatatttgtattcggttgtcactaataaataataatcaaatgtatgcatgataatgcatggtatgcaggaaaaaggaggtcttttgcatgcacggtttctttattgaatggaagggatgtacaactattctgacatctgcgagcttggttagagagtctgatgatggaaacaagattgatgaaaacttgagggtgggtgctaatcatgtagctcctcctaattattttgctctttatttttaagtctcactcacttattcatcaatttatttgcagattgaagtgttgcttccaaacaaacaacttagagaaggaacactacagcattatagtttacactacaatgttgctctagtgagtgttaaggacaaggatttccatgctcgtccagcaaatattcagcttgatcataatcatggacctggagtagcagccgtagggcgttgcttcgaatcaggcaaattaatggctgcacggacggatgttgttgattggtcgggcacacttgattgtgagatgttccttatacgttcctcatgcaaaatcactaaggtacataccgctagatagctgttgattttaaatctctagcatgtttttacatgcacggtgaaaatttataaccatcgcgttggtttgtaggcagggattggaggacctcttgttgacttagaagggaaagttattggcatgaacttctatgataagaagataggaaccccttgcctgccatggaatgtgattctcatggttctggcatgttttgagaaagaaaagtattcgtagatttcttttctttttttttggttatttaagtgcttgcaataaaatctattcgattgtgtgtttgacagtagcggtggtgaagttggcagtggtagtgatccatgtggtgcgcctggctggaaaatccctcgagatgagagtgtcaggctaaacaggttggttttctgataaatctcaacagttaacacttaacactaccaatttacagggtctcatattattttctgatcgcattgcatatattggaactaaactaataggtggcctgtgcccctgccatattggcgtcctcatgacgatgtggatgaacaagaacccccagaaggctgtgagcacatctacacatacataaatggtgaaagatattgttacaggtagaatctgcttcttctactctgtctgttggatctactacgacgccgtttgctagcggagcttgctgccgtgattcaagattttgatgagcttgaactgtttgatgtacatatgcagatttagacgccagatgtaatatatattactaaagaaagtttattcgaatcaagagatctttgtgttgtgtgtttgcttctgcagaatttcctggtatttcgggattcctaattggatgtggaaaacgatcaggaaccctaattcttgccggcccatggtcatggagcctgaatctgaaacgcataagatgtggatgcgttatatgtggagttaatttagtaccacaacgccaaatcaggcgggaggttggacgtccgggggtataaaggaagaggcaagggtacctctgctgcatacttacctggacggggtcgatgggtgatcaataaggcccatggcctgggctaatggcccacattgcacttggtggatgcgttggcctaccatctccccaagtgggagagtggacgtcataatttgtggtagagggggtacgcgttcgcgcggccccttccaaatttatacaaaattttgattggcttcattttgaatcaatcccctaccaaatttatctaaaattttgattggcttcattttgaatcgaaactacttctgcttttcttggctgaattttgaatcgtttaagactaaagcttgtgctctgaaaatacttaatgggatcataggactttgcataatctggagaccggaatgcacccaactgaggataggatgtaccgtacaatgcatccagccataataaaattgcaatcttggaactcgaaagttcccagtttcagtttgaggataggatatatcatcaaagattgtcgcagccacatatgaaattcagaacatgttgcatctattgaaagttcaaacgatgtctggagtatttgacacctctgaagtgaagctgtggaaaagagaggaagcagtattcttgcacctacagaccaatgtacagcacaaatctcaaaccgcaaacctaaggtagcaacaaaaggcaaagagaaatccatgtgatctgcatccaacagagaaccccacaaaagaaacttcttaaaccaattgcaattacacacagaatgcgctgattacgaactggcatgtgccgggaggtctaccatgagctaacatcttaattctcagttgctggcgccggctctgaggcagctggcactgctggtttttgttgaagcagaggagagagcgccttgacaacaatgctcatgttgggcctgaactctgcttcgtattggacacaaagagctgccaccgcagcaagctgcagataagtgcaaccaagtacatcaacatgacattatttcaggactgctactccaaatgatgtaaaaagcatgtgcatcatagtgtgtgtatgtgtgggtgggtgtgagagagagagagagacgagagactgaccttagcaactccctttggaggatattcactctttaacctaggatctacacattgtttgaccttgtcttcgcttaatctaggagtagcctggagagaaaaagtacacaaacaagttaaatttggaacaactaccttttcttaaatttggaacaactaccttttctatctcactacgggagtagtctggctaattagatggaatcagaaaaggtgtaatatgtatttgagaaaaaaaaaggaaaaatgtaaactatttgagaaatcaaggttctctatagcaatccagatacaggttgttttttattcaaataatcaaatccaaagcgacctataaacctaactaattattatttagaaatcatttaagtctaggattgtcagtgtccagttagcagacagttattgctacgatttgcagtgctgattcattgaaccttcaataagttgatggactctgctagacgttcatagcggtatttcagcatgcttttgttggctagattcttttgtttcatgttcctcaatgatgtcttctcttgccactaattactttcttggtctttacatataaccagtagaaatgaagaaaattattataattgaccaaaaaaattagcaaccaaagcaaaaacaagataagaaaactagtaacatgtccgtgcgttgcaacagacgaatacaactgagaatgggttgcatgggcccatacgactgggaatgggctggatcgagcataaggcgcatacaactggtatttttctgttattttcaggcctagaaggcagtgcttgtgtgctttgtgacgcgtgggaaggagcgtatggacgactccgcttttaggtggtagagacaacttacccaagtgactagactttgctgtccccgaggcattgtgtggtccactggtttccttccagtcaggagttccaaaagaactacaccaaaactgtacacatcactcttctgcgtcagctggccagtcatagcatatctgcggcaagtagggttatataagttaagagaggaaatgcataaaaatacacggcatcaagtatttccacaactcatgccaagaacacttatcctcatttcgctgaaacgttcatctacctggacaaactagcaaacaaaagacttgtttctaaagaaattacaattaacttacacaagacggtgaaaagatcaaataacaacaaaacagataaaacacaaaattagtgtacagatttttcctttgtaggcagaggaaagtaaaggcattatgtttgctccagatataatagctttgcaggtagaagaaatatcgcaacaaacaaatataatatcataataatgctcaagaggtcagtcgtaaaaggttcctgcttaattcagcctaggtaatccaacatgatgttataaatcacttagatgcatcacactcattatgcaaattagcaatgttctgcataactttccagaatgaatgctgcatgcagatagtggttcacagaatatggagtataacatgtcagttgacttcccccaaaaagaaattaaggcactgcccaaatactggttgtgttgacagacctctctccaaaatggcatattcacacccaaaataagttggctttcccaaaaaaaaaatataaggcactatccaaagatagtggttgtgttgacagaccttaaatggcataatcacacccaaaataagtaaagttgttttttggcaacacctacatggtaccattgtcagctgtttttcaaacaaaaaaaaaaggttatgtaagaacagctacatgcataaatttcactacaacccaaaggcattcaatacttggttctacgtactatttgatgtttcctgccaaaccgattaactagatcagtttgctattctgctaacagaaaaatagcatacatagcttaaggcccaaataagtactacaatgtacaagacaactcaatatcaatgtataacaggatatcatactatcaaaatggaagtgtaatggccaagaaaaaaaaatagtcattgcttgattaaaacagtaaggtcagaattacttgtcatctcttggatacatagcgaacattaatttacttgccaaatgtgtaaaaaaaaactgttgcaattataaaaaccagacagatcttccacctcgtcaaggcccaggatcaccaagtcggccttagtttctaaaaagttatactatgaatttctatattcactagcctcagcagtttttcatgcaatcttgtgaaaaaagaagtcatcagtttggatcagggagttctttttcaaaagaaaaaaaaaaataccacaaccactcacactgtttggtccattgtcatttaggtcagtaagtctcacagtattgtgccatggcctccacatttgaggcttcatgcatgtggccctggtcggcagggctgccagccagccactgcctctggtgttactttggaggcactgagagtacacagttctgatcttaggagcacataagatagctctggtgatgtctattcgatatgaacctgaaggtatgtgcacccttgcccatgaatacaaccatacaagcacagcaaaaatatgaaagcaaactagacgaggataacctacgaatttgttcatccaaaaaaaacatatcagacctttgacatttcaaggcaacaatccttaaagatgggacctaccacattgacaagaatagacaccacagtgactctctcagtttttcaatacactatgtcagtattaacatattttagttggttcaaaacatatattttaactactgttgggctggattaaaaattgaagtaagacgcgatatagtgagttctatgaagaaatgcattggtataaattagacattactctggtgcatgatatccaaaggttcctaatacacgagttgaatgaaggcgtgctgccatatctggagcttgatttaagagattgaaatctgcaatttttgccttgaagtcctcaaacagaagtacattgcttgatctgatgtcccgatgaatgattgaaggctgaaccttctcatgcaggtactctaagccttttgctgcctctatagcaatttttaccctctgcgtccaatcaagtacaggaccaggctgcgcaccttgaactccttttcttcctgttgtgttaagagaagttgattataactgacctggatttgcattccacatgctaaagatagtaggtgctcaaggtcttaccatggagaacatcatgaagggaacccatggtcgcaaattcgtatgccagtatacgataattgccctctacacagtaacccaacatctccacaagattttcatgctttagccttgatgcctgggagacctagagtccacaaaaacataaacaaaagtaatagctttagaattgttgcactgtcatcaagtcctgagacagacaaatagacaatgtgaaatttaagctaagaaacctatgattctgcaagtgatcacctgtttcaaga

SEQ ID NO: 19049 - DNA, 3577 bp, Oryza sativa
aaatatactggcgcatatgttagtatggtccttactccaattgcatcataacaaaagaggagtaaaggatggttctatagcaatcttataatgggccaactgttactgaaattcacatggaaaacacacgacaaaataaccgcaccatccatcttattgccctgagcattggagcgttccttcccatggtcatcctcctcgtcaaagtggcaattacaacaaaaccactgcctcatattgtctcctcacaacttgaacacctgaaccaaatgcacggaatagttagcatacgtataaagatcagagcacataattgaccaatgcattaaattacgcaagaagtacacttctgtacagtgtacaacatctgtactctcagcaggttggaactaagtcaactagagtcttactgttttcctctacggaaaagcttacagtttccagattcaacatgcaacagtgtggaccaacatgccttcttagaagcagtaaacctaaaatctagtaatctacaaaccactgtgagtacggctatttcaggtactatgcgagcgtagcaatccaatcgcttaaataagcaataataataataataataataataatcaaagtgctaataaccaggatggattgggggtatccactcccagacagaagtatggatttgaattacgctgacagcaaagtgagaagcaaaacccacactgatggaacagcgatcagagcagagggctaccactcaccaagcaaacgaaatcaccgccgggttcgatggcgatggcgcgacgagagaattcgagacaccaccagggggagctagggttcagaggcgagacgaagtggagcttgggcgcgcacaggctcaggggagggtggaggaagtggccggcagcggcagcggcggcggcggcggtggcgcagcctccgcgtcctggttgcctgctcgagttaaagccgccgtccttatgggaggggaaggggattattagtattaatcggtattaatccggctcgttaatttcgcgattagtattaagagcggcgggattagcaggcgtgaggtggccgggaatgtgattgtgagctggtcggctgccgatttccttgacaggtggggaccagagacgtggggcccattagtcagtgcggttgggctggaaccaggtggccgtttttggaattttctggctgcgcacaacatcagcgtggactgatcctccccgtgtgggtgacatagggggacagtgagcatgtggggcccgcatgtgcttaggggaggagcgtgttaatccgcctccatgttcgaaatggatgtggggcccacgacagaaaacagcaccgaaaacgtgtgggtcccagcggcgtgcgcagataaaagcaagtttaataatgtagcctactactagctccaatttatctatagccaatctaatagccaattcatacgatagttgcttgctatactattaatatatggtcccacatatcatacacatgtcttggagtccgcgctgcagctggctacagatttatagcccgctgctcttctctctcatcttttatctcattaaaatatgcttatacctgactaatagcctgctattgtacctgctctaagggcaattattatgggcatgtgtaaacagtgaaatttggtaatcggcaaagacgtcatcggcttagaatcattatcggctgcagcatctcggaatcagtcgatgggagttatcaagtcaccaatagttggattcttgctatattcggttaaggaaatcaatctactaaagaaagcttatccctaagtgaccgagtttaaagaggatgtggcatggcagtttatctattaattaggaatagtttgttagtttccttttatctttaggaaagtgtgtttagtgtccgatgaggacttgtattttccttttatctttaggttagtttctttcttgtccgacaaggacttgtatcaacccatgggtataaatatgtacacccggggtctatgtaatctatcactctggatcaataacactctcggcgcatcgccaccctctttcccgaggtttttacttatcttccggcaggatttgggcacctgacgcggggctgcatcggttcagttcgatctccggcgaaggggtaagtcctacgttccgtcgggccctggtgaatctgtcatctacgtcggcatcgtttaaggctgcatcgcttcgatctcttggatcgctctggtttggttgattgatttgcctacctgatatctcaagtctatctccaattccattgtgtttagagacgcatcggtttagttgggactgtctcggttaggtccgatcttctgtcttagccgatatatctctacaatcacaatgctgttctaaatagatttgttatatccatcacattagacagatctatcggctcatcgagtattagattatcatatacaatctcgtgctgcatcggttaggttcgacctactagattgttgttgataatataagtcttgctaagctgataggttcatgctactgttttatcggggtgctagccgataagttatctggacgttgcatcggcttagagtgatagattacatagaccccaggtgtacatacttatacccatgggttgatacaagtccttgtcggacaagaaagaaactaacctaaagataaaaggaaaatacaagtccttatcaaacactaaacacactttcctaaagataaaaggaaactaacaaactattcctaattaatagataaactaccatgccgcatcctctttaaactcggtcacttagggataagcttcttttagtagattgatttccttaaccgaatatagcaggaatccgactattggcgacttgataactcccatcggctgattccgagatgctgcagccgataatgattctaagccgatgacgtctttcccgattaccaaatttcactgttaacacatgccccctagttttggagtatgaggactcatgctccaaaattctcttctgtctgatcttgtaatcggctttcatgagctgatactgatgtgtttgccccctagccgaggttgaatgatcttggcattgacttcttctttagacatgtggatataaaattcgtggtcccaccgggcgtgccaaaagcgtgttgacagaaaacacgaggcctgggagatctgcttaactcctgtgcaggtccaaatatgatgagatgtgggcgtgccagtcagtttgatcctgcaacggacaagatatgcaaatagtagatcaaaatagccgatcggctgacaagccgatggagtaattccagccgatggccgataatagccgatgccgataccagccgatagcgatagggtttaaacaatcggctatatgtccaatgtagatgatgatataaaggcaatcggctgatgatgatgtaataaaataacaatataatccagtataaaccaatcggctagcaatgacatgataaataagcatcgatccgaaagttaaagcacacatcggctggaggtccgatgtcatgaaatccacaagattagattaaacagttaatctttgttg

SEQ ID NO: 19050 - DNA, 3221 bp, Oryza sativa
tctttcgtgtgatagatcgattttttgatttagacaaaatttgacaaaattttgtctaaaatcaaaaatagtttgtgactaaaaatagtgcatacaagaggtgtaaagccaagcaaaggtggtaagaaagaagtacgtcatatattcagttttatgtattattttattttatgttatgcgaataaatattctgaaatttgtttatgttgttttaaattttcagaatggacgaatcaaacattccatcgttcacgttaggtgatttcgaccctaactacgtgtcgaggtcattcccaactagtgagtatgatgccaccggatcagctccaacaccaccagttatggagccaccggcgggttcagaagcatccggcactatgagtgggagtgcatcgacgaacaccggctcaaagagatcaagaacttccggtgtttggcaacatttcgatgaggtggccatgacaggccctgatggaaggcatgtaacattcgcgagatgtagaatatgcaaaaataagttatctgcaaaatcatctggtggaacaggacatttgaagcggcatgccgaggcttgtgcaaagaagcaaggaatccaactacgacagcaacaactactactaaatcctgatggtacggtacgtacgtgggagtatgatcctatggtagctcgagaaaatcttgcccgtttaattgctagacaagatttacccttgaactttggtgagagtcctgcatttgaaaattacataaaaaattctcataatcctaggtttcaagctgttagtagacaaaccacaacccgtgatttgaaaaatgtctatgacaaaggttatgaatcactgaaggaattatttagtacatgcaccttttctgtcagtgtcacctcagacatatggagtagtagggctaaagaggattaccttagtgtagttgtacatttcattgatgatgattggcaaatgcaaaaaagagttcttggcttaaggttaattgatgtttcacatactggtgaaaatatagcagagagaattcgagaggttattgatgagtttaaccttgcagataaaatttttgctgtaacaatggataatgcatctgcaaattctagggccatggaaattctacaaccattattttgtatttatgctcaatcatttcttctgcatcagcgttgtgcatgccatatcattaatctaattgttaaatgtgggtttaagagagttaatgtacacatcgacgctgttcgtcaagcaatcacgtggttaactgcttcaaacccacggattgcacagtggaaaaggtattgttgtgcatcgggtgagcccccacgtaagtttttaaccgatgcagaccatcggtggaatgccacttattttatgttaaaggttgtattaccttacaaggatttacttactgttttccttcaaacacgtaatggcccaaaaaacagtgacggccagccaatactgactgatcatacctggcacattgttgaaaggttcaatcaatttcttgaaacgtttcatgactgtactcttctgttatctcaagtatattatccaacagctaatttaattttgcataatattcttgaaattgccactttgttgaaagagtatgaaaatgatgaccttttaatgcccgttgtctttaatatgaaacaaaaatatcttaaatattggaaagacatccccatgttgtattcttttgcatttattcttgatcctaggggaaaattacggggattcctcaatattctttcacttattggagatattattaatgttgattattctacctattatgctgatgtcaaaactaaattctatgaggtatttcgaaagtatgaattaaagtttcagggagatcgcttgtaaagacccccacctgtccctgcagcaggtaagaaaaaattacagtggagcagaatttggggcggttcatcttctagccatggtggtggtaccagttcatcagcagcaagtggggacgctagatcgcatggtcctgctgaagagttgtccaactatttggatagcgatgccatcaggcatgaaacgtcagacttcaacgtactcgggtggtggaatgatcataagatgtcatatcctgtgctatcaaaactagcacgggatgtgttgacggtgcccgtatctttggtatcctcctaatcagccttcagtctatgcggaagaattatcgaggacaggagaacaagtctgagcagcgatcatgtggaaatactattaagcgtcaaagactgggaacttgctgcagaacatgcccaatacactgctgacaaccaagaattggccgcacagttcgaaaacctttatttagatgacgaacaattagggtagctagtttatattttttaagtattgacctgttggctgtactcttttctttgtcatggttttctcaaatatgagtttttacatgacaaagtttttaacgaggcagcatgtatcatgtaaacatcaataaaggtcattactcttttttccccatatttttctaatatttttctaagtctaattatttttctatttttctccaactatccattaattttctcttagcttagttaactttcggacctttctctttgatttgaattgttccactgacagagtgacaggcgatagacacacggacagaggcaagtcactgagtcagcattcagcaagtccagcgccacgtgtctcccttcggccggccggtcccgtggccccggccgctcgctcccgcgtgccgcgtccaaattttcatccgcgcgcgcgccttgtcggcgttgtcgccttgccagcttgcctgcagtcgatcgtgccaacgggccgaccacgacccatgggccattgacgtgcccgtgccggcacggcacgacacgacgttccctcgggccgtgcttgggccggggagtaggcacgtgggccggcacggcacggcccgctacaggagtcgtgcctaacgggccgtgccctagcgggccgtgccgctggcgtgcccgtgccgtgctgggccgggccgcccgtttggccaggtatactctcggcgcatcgccaccctctttcccgaggtttttacttatcttccggcaggatttgggcacctgacgcggggctgcatcggttcagttcgatctccggcgaaggggtaagtcctacgttccgtcgggccctggtgaatctgtcatctacgtcggcatcgtttaaggctac

SEQ ID NO: 19051 - DNA, 1843 bp, Oryza sativa
ctccagcggaagtcaagcaattgcacgagctctacaggcaagtagtcaccagatatacgctgctgtctaaagctttaagaaagttatcggtagatgaggatcagctccttaattcagtagatgattgatgaagccatgtaaaaatgctgaccagagatgacatgtcctattaaccacataattgatcgagattgtacacgcacgcaaagttttccattgactgtaggaaagcaaacgagttccaggcatctgcaacatggttccagggattccaggatacactacaggtatggccaaatgatcatcagagttgagaatggattcttgtgcctttgcattgcaacttgcaagccctctgtaatagcgtccacttctgtaatttttagttcctgtctgccccactccttggagctagcgtagtctctaggtgtgcgtgaggaactgcatatggcacatgttgctgttgctgatcatgttcaaccgttctacctcgtacttcgtatgttatacagcaaatcttctgtgctgaaaggtatctgtttgccttggtgcaatggtgggtgaacgtggtgacattgtgagacatatgcatgatttgctcatgaagtcattatggctgtgttttgcaaaaagtttctatgggaagttgttcttaaaaagcatattaatctatttttcaagttttttattattaaaacttaattaatcaagcgttaatctatcgctccgttttacgtgtgttcccaaccccttcaaaagaacacagcctattatatccgagttctctgcttcattgttgagcagaacagtatactgatgctgccacaatctgctagtgcttgtgtaattaactgacaactggaagcatggggcaaccaatcatacatggcttctcttgctagaatagtaatatgcaaatatgactaattcagaatattcggtgatcaattctgagggttgagcttgaaggttttcttgtactcgtgaaagagtgattatacagtatcatgacaaaaaaaaaacagagacagtttgcttctgtcatgacagaacaaaagttcaaaaaaacgtggtcggcaggattcgaacctgcgcgggcaaagcccacatgatttctagtcatgcccgataaccactccggcacgaccaccttggggttgcaatcacatactttttttactaattgtttcatacaacaacactgcaatttgattcatattcgctacagatatcgtatcttttattcaaacaccgaccaaatcagttcatagatatcgcagtcaccaccagatatcacacagcaatatcatgcgatggcgcgaactcatgttcatacatatatcactgcatcgtgtcatctgcgcacagctgcacataacgcacgcagctagcactgtcgcccaaacttgtcgtcactccagcttgtgctgctgggcggcgcgcccggggctccgagccgacgggtactcgagcagcgggtggagcggcggagccggcagcgcggcgagctggtggcgacgggcgctcgccggcggcgacggcgatggcgtggacagcaggaggcggaacgtccaggcgaggacgtcgggcgcgaaggcgcggaagacaaggaagacgtcgtaccagttggggtgcttcacgtgggcgtcgccgcggcacgcgccggcgaccaccatcctcgcgtacgcctccacttgcccgccggcgagcggcacctaattacatatgattaatcaatggcaagttaattaatcgacgagcagctatagcatttgattgttgaactaatctttacctctcgctcctcccctttccattgcatctctgcgccttcctcgagcat

SEQ ID NO: 19052 - DNA, 2855 bp, Oryza sativa
ccatgagctgagggaacgcgaccgtgtcgccggcctcctcgaagcagaaatcgtggcccaagctcaccgtgttcaccagatggtttactgcatgcatcaatattaataagaaattcagaggtttgattaattgcaagtgatgcgtggtacaggtgactgacactggccgaagaagctgatggtgtcgccgacgagcctccggcagtcgtcctccttgacgacgtcggcggcgatgacgaggacctggccggcgccgagggcccgcgcgttctcccgcaccgcgaacagccggtgctcccgcctcgccaccagcaccaggttcgcgttcctccgcgcgtactcgtacgcgatttgctgcatgcaaacaccacaccgatgatctttgacgttcgccgaccgggcactggttatatgcttagcttaattacctctccgatggcggaggaggcgccggtgatgaggacgaccttgttgtgcatgttctccacggtgagcgtcttgacgacccactccacgccgcgcaggaaggagagcgtcggccacgcgaacgccagcatcaccatgctcgccggcggcaccaccaggtccagcaccgcgttcaccacctgctccatctcgatcgatcaatcaatcgatctctcccacactatacagttcctcttccgatccacagctcaatccaatccaattgaaagaatggatcaaccagcccgcctctggtttctggggttcttgggaggtgaagaaccgaggaggaggaagaagagggatcaaagatcgagtctctcaatgagtttgccaatttggtgaggacgatgagcagataaggacaggagaggacggacgggtgcaggcgtgcatggatggcagctgcgcaggcatgccgccatagacacacgtcgagcaggacgggaggcgccacggtgagaccacggggggaagaggcaagctttggccgctttcaaagccttgttccatatgcctttctcctccgatcggctgcatatattactcctccaccttaatccgcgcctactacaacatttacagttctgatcagatacaatatgcatcttgatgtgaaatcagagaaagggcctgtagcctatggttaatctccataatttgccttagaagatgttgtactgtgtaatttttttttttaaaaaagtcaatctccaggatttgacacagtgacgaagacctgctgagcggtgagtgactcatgcatgttagtcctccctcctttttttttaaaatagacgatgccgtttatcattcggtctaatttaaaatttttgtgcaaatacatatgatatcaattatgcttaaagtatttttagtgataaaatatctcacaacaaatatttttttaataagacgaataatcaaacgtgtgcttaaaagtcaaagtgtcctttattaaaaaacaatggtagtagtatttgcatgtgactaaaataataataaaaagaaattggtaatatcaattaggatgatacagacaaatatacaccaataaatttgatctacaaataaagaaataaaagtaataagatcagacattgaacaatacctatacaacgtaaataaaatttattatttttaattttttatgtatagatcgaatttagacttgtatatttatacaatatcttatatcttatatcgcgtgcaggcgataacagttagacgtagaaaatatttccctgtttacacagtgtgtaaactgtaaagtaattttgcacagcaacccttcgtttaccccgtattattattttcacgcccgtattctggatcgctaccactcgtcccgtttaaccgttggattttacatgggcggcctggatcgagaaggaggagggcggcccacgcgtatttctacgtgagcccttcccttttggaataactattatctttcacgctcctcccaagctttcgattctgaaccagaattccacggtgaatcgatcttccgacgccagatcgacgcgagttgagagacggccgtgctcaggacggcggagcgccggcgagatgcggaggcggcggcgccgccaccacgcgcgctcctaggttactttcctcttttttttttctctctttttgatgcttgtcttcagatgttcagagttcagaggagttagccaggtagggctcttgtgctacgtctgtgagagcttgtgtttagaactttagatcaaccattttatgtttttttttgggtgaaacaattgttgtagcagggagacaacgccctctctcctatccggtcgaaacatctaagatggtttatggaaagttcctaagtgtaaaacaaggaaaacactctcgagttggaaaacactctcgagtggaaaaacactatcgagttggaaaacattctcgggtggtttcttatcacttatatgtaactcatcttgtttggagatgatttctgaatacatggcaggtgaatctggcgatcgggaagttgttgaaggatgtgcaaaccctcaatcatagaagacattcggctaagagagctcgaaggaaaaaacctgctcgagtaaagatccggtcgaatggaagattctgtgggggccgtttctcaaccactcttgccagctggagccaaaagactagaatgaccctgagaatgtactaaaatacccctagggttgctgacatggcaagggcattataggaagatcactaaagcccatgagggtagaaatgtaacatcacatgtaagaccgtaggctataaaagccggtcaagtccctatagctagaggagacattttttaatacaaaaagtaatcctctaaagtggtgtttgctgtttgagcttatttctaaggataggtaggaaaa

SEQ ID NO: 19053 - DNA, 1723 bp, Oryza sativa
atctcctgaatgtaatcctttattcttgttgcatgacaccacattttgacaattacaaataggatcacctcaagcaatccaatggaaacgatatcgatggccactagaaagagcaacatcttgatgtaaaactgctggaatctgtcgcggagacttggatagattggccctctctgacagcaccagcaccagctccagcctcatctgcagccaatgccttcttgctgatgatccggtagatctcagtgagcactgtctgaaaagctttatccacattcgtcgcgtcgagcgccgaggtctcgacgaaggataggccctccctctctgcaaagcttgttgcgtcctccaaggacactgaccggagatgcttgaggtcgatcttgttgccgatgagcatgacgacgatgttggagtcggcatggtcacggagctccttgagccacctcttcacattctcaaaagttgtggcctttgtgacatcatagactagcaatgctcccactgcgccgcggtagtatgcgcttgtgatggcccggtaccgttcttgcccggctgtgtcccatatctgtgcctttacaatctttccttcaacctgggtcacaaaattgaagcaatttaacaatggacctttggggaaacaatagtactgaacataaaaataaaaatctgtgatatcatggataacagcctaacaggatcataataaaaatctgtgatatcatggataacagcctaacaggatcatgtattcatttgttgtatgcagctaattaggttctctgattatgctttaaagcaagtgagccactagccagtgttagtttcctgtcaatctaaattcgcgtgtactgcaattcagtttgtacaaaatttcaacaaagaaagaactatcctttggccattttatttttttttttaaaaaagaattctgctttggcgtaagcaattgcactgtacccatcgatgaaaaccaaaaggagggactgatttccaagagaaagcgaacaatagttagcaaatcaaatagagaaacttgctgaattcctctgtcttctactagctctgaattctactgtcaagcatgggtgtcaaactatcaggtcagtcggcgatcgtggtcaagcccgccggcagcacgcatgcacaagggcatcatccaattcgagcaactcaagaaacattcagagaaagcagtaacagcgaagcaccgaagcagaacacaaacagagcaagcactagtaagcagaggagatcaggagaagcagaggagaagctagcactagcaggcatggtgacctggatggtgcgggtggcgaactcgacgccgatggtggacttggagtcgagggagaagctgttgcgggtgaagcgggagaggaggttcgacttccccacgccggagtccccgatcagcacgatcttgaacaggtagtcgtactcgtcgccgccctgctcccacggcgccggccgccgagccatcgatcgatcgattcaacctcccttctccttcctcctcagattttcgcactttcttgctgctttcttggagcctccgcctccgatctccgttccctcctccttcccgagaagctagctagcttcttcttcttcttcctctggctggctacttgcagctttggtttcttggctttggacgggaagacgcggaggctgatggcgacctgatcgatttttattggggaagagagagagagagagagag

SEQ ID NO: 19054 - DNA, 5424 bp, Oryza sativa
atgtcactagaacagtggattatgtcactagaacagtggattaagggctcatttggtttggtgccctaccaaatcattggtagtgtcaaatcatgggcaagatttgatactaccaatattttggtatagttggtttataggagttgtattaactttgttaaattttgacatcaatccaaacatctataaggtactattcaaagtgctaattatttggtagggcaaattttggcatcaaaccaaaacagccctaagtactactccttccattccaaaatgatcaaatttgaactaaaagagtgtacttatttcaagacggagggagtagatcagtaaccaaataaattttaaatcgtaaggtttattagcgataaaaaaatactttgtaagtaaaacttttatatatgtattattagcgtcttaaaagctaatgttaaaaaataaattatgatgataaaaacatcaaaatcaatttaaagttaagttttaaaatataaatgttagttgcggctagcaagccgaagagcaaacgctggtgttattgtgtgaatcaaaatgatcaaaatacagtggcggagccagaatttttccaaacctagggcccaattagttgagtgtatatgattttgcctttatcttctagtttttgaagttttaaaatggaatttcaatgaatatttagaatcaggagtagggagtagggctgcagccctagctgccctactcctgtctccgccccctgtcaatatagcaattaaaatgactagagatatgaaaaaaactatatataggtactgtcataatggccatatgttgaaaatatttatctcgggtgcatgtaacattttttttctagaaaaagatgtagttactatataacaatttacacctatggtataatgtgttttcagagtagtttcgcaactttctaattcaattttaactcccaaatagcattgttgacacggttatcccttgcaccagtaccatcaaccttccgcactaatggcaaccatggtaattggatgtggacacatcagtgtaatcctaccaatattccactatgaaaaagaaaaaaaaagattccaaaaccaaaggcacaattttgagaccaccctatcaaggataattctgccattctgctgagctgggaagaagatttgatcagttggaatagggaagatggtattggaatcattctaacttccaaacagaaacacacaggctctataatattaacttcaatcatgacttgacctcaaactaacaattaaacaaactcccttctgcctttgtttccgtgattgaaagagttatggatggtcgatgaacaggcaggaagaaagaaagcaatggaaaagagcaagagaattaacggctggactggaagagaacttttaaagacacgctttcgatgagaaccacacaaattgcccggcttctcacgagttaacaatctgcagcttgcgtgtaaataaaaaggggaaaaatggaaataagaagaggggaagatgccaccgtgtcaacccaagtatgcataaaaatggcgagggctatcatgcacatgaaaagtcaaaaacacacttgcaatagcattatccgacacaactcatcactgattattcgttcaataatagcatcactcacaagcatacaagcatacgtttgttcctttaataatgtttgcataatcatagggtatgtttggctagccaatagagccgctgcacgcagccataactgttgcagctacagacacaaacagtacactgtttgtgttggctgcacaacagtgaagttaagtgcagccgaacagagccaaaatcaacaattaatagtatcattttttaaaagacccaattactccgtcagacagacagtagcatgaaacggaccaaaggaagcagacttgcagaatagtgacattagattgatgaaggccaggagcagaagtgcgtgtgcgtctgtggtccgtccgatcgggcatcggacggtccagatggcgcgggaggttatggctggcgtcttcgtgcggcggccgcaccacacccacccgttgcgttgcggcggcctctctctctctttctctcctctctctctgcggctgcgcggtctccacggcgcggcgaggcagcggcggtagggatggtgggctcggccgcgtactccgcggcgtcggccatcgtcgtggtgatggccaagggcaaggggcggggcggctagtatgcggcctcctctggcgccaacaaggtcagctcattcctcctcccctcaggtaccaacagtttgggtaatgggtacagtatgatcgaattcagcgcggggagtttggattgaactgaatgtgcctgtgaatgaacattgctgcaagggattagaggaattatcagttacgaatcattgcttcacaaaattctggggcacccacatggaaggggaaaaacggctgctgtgcgtgctcaaccatgcaaaaaaaaaagagttattcatgaggattgagttatgttttttttgttgttgtattaatcagaacatttagtgtggtacattctcaatttaatagcacatttgttggattatcaacaaatggaagatcttgtattggacccatgggtaacaggtcggctttatggctttgcgtcctcacacatgacacgctgcctatttatgtgtaggtttctgagcgacggcctcctaggataacttccaatgtgaagcagagcttgaggattctaaaattttggaaggtgcaagctttgttgcattaccttttctctcatatgctaaaatctgtgatctactctgctgcactttgtataaagtcgtagaacagcatgtaccgaattcatcaggtgggtatggccaaacaggggcacccgaagcatccaagattaatcttagttctaacagttatttacccttgtgtgtgccttttgtattcttaagcttagttctaacagttatgcccttgtcatcaggattatgaaaggaggcaaacaagtggacctcagcctgctactcggtaccgcaaaaagaaagtaataaaagaagtgcttcctgatgacacagacttctacgatgatgcttcttccactcttcactagtcaggcttgcctctcattgcattatcaggacctcactacattttttgattggtggttcaatgaaatgctgacattgttttgtcaattaatctagcacaaatcagggtttggaaattgcttccccggttattcttgtggacggttataatgtatgtggctactggggaaagcttaagaaggacttcatgaatggaaggcaagagattgcaagacaaatgctcattgatgagctagtatctttcagtgcagtaagaggtttgtttgtagtaggaaattagatccgttacgtatggtctcaagcatgatttccttaaaactcacttatgctgtttacttaagctgtagctgttgaagctgatagatgttagtatactctgattagatgttaggtacttcttatctctattagagcaaacaccagttcaatagtggcttatagtgaaaaaggtagtcatggcttacaaatgtatcatcttgccaagtggggagcataagtagatgatgatttgtttttatctgccggtggtgcgtaatttcttctcaatagctatctgatgttctcccattccagcattcttatatcatttgtcattgtcatgcttgcagagataaaggttgtagtagtatttgatgctgcagcctctgggctttctacacacaaagaaacctataaagggtgagataatattgtgagctgatatatctgtgggaattgttacttcaagcagtttagcctgtagcgaaacttaacaaatagattttacttcatggaatagggttgatgtggtatattctggtgacttgtctgctgattcttggattgagaaggaggtaatgctgataaattcttattcagaacaaaggatacccctagttgaccagacatgtgcatttaccgcagtgcaaaattcacacgtagatttaaattaagcaacaaaagcattgatttatgaagcatgcataactggatgtctttatgccagaaaatagttgggtccgtttcaccagcagtaaggctccagtggtgggccttatactagttatatttttataccaaccgttcaaatacctggtgcttatgcaaaagaagatcggtagagcaagcataatttattcaagggttgtacactaatactgatctcaagtgatgcactcttggctcttacctgctgtattttcatccatgggcattaatttctcatattaacatggtaacactaaatttccgcgcctgtgacatttgaattttgaagcaatgagcttcaaatttctgtatgaaagcaagatgtttctttctctgattctttgaccaacacaggttgaagctttggtggcagatggatgcccgaaagtctgggttgtaacatctgatgcattggagcaacaattggcacatggagaagtatgttgtcacccttttggggattagctgcttctatcatatctgcctgccgttagacatttttgaccggtttatggtttagaacttttatctttttgtcatgttctgcaacatattctgaactcacagtagcagaaaacacattttgtatcctatgcatttaatcaccaaaatttcccaacgggggtccgaaaaacacaagtactggatgttatatgtccaaactgaatatttccttcaaaagagtaaaggcaggaaagataattgataattgatatcttgacatttccttcaaaagagttaaggcaggaaagataattgatatcttcaaaagaggaatgtatcaaacatgcataatgtgaatctcagaagtgaaacttatatctcctataggattttgctttgtggttttatcatcaaatgttttattcttgatggttaaaaggttgttcccactgtgtagggtgctcttatttggagctctaaaagattggtcaaagaggttagttcttaatcttttttatcctgcacacattacttgctcaaatagatgctcttcacttgaatatctgattacatgcattgtgctggtatagcatccttatttttggaccaaatgtcttgttgtaactatggtacaaaatgttttatattgtttaagccatgctgagtaatcaacaagatacagatggctgacctaggactttcaccaccagcctgaggcctgggactaaaagtccaatgcgttgcatttttttcactgtgatgctctaaatgtgacccaatacatgctgggctgcccagggcttgacgccaagttgggtctgcctgagtaggcttgaatctccaattcaaacagacatactgtaaatacgctattgaaaattaagcataagctgaaaacattactttgcaaaa

SEQ ID NO: 19055 - DNA, 1173 bp, Oryza sativa
tgtgtttatttgagcatcgcactgaaagtattctcctcgagctgcaacagaagaaaagaatgatgccaccaaattatttaaaagagaagaaaatgctaaacctgtttatatttggatttcgaaattggcagatcaacatcgttgcaagggaagctttttcagcacaagctgaaacctaaagtagtgcatgcattgaaagatctccggaataagcttgaagaagaagagcggagaaagaggtgactactgtgtgactgtatgacctagaggcatgaacaaatggctaacaaccgcacctgggcatgaacaagtttgtaaaatggctgacaacctcacttgctgccttgcattggatccgtagggcattgacatgatgtaagataggatctggttttttgtaaagaccccgtttggacttcgtagagagaggcttcaagaggttaggcatgcttttgcatcagaacaattttgcaagctgcagagaagaaaggcatgaactgtacaacaatgtaaatatcagcagattcctctaaatcaagctcaactaacgagatcttggcaggagatcagtgtactctgtttactttattctttttgtttcttcgaaggatgcaagaaaggaagaatacatgtatgcgtatatgattctggttttccaggaatgctactgtctgtcatgaaactctctacgattatacatagcgaagacggtagccagcaatgcagagttgcagacagagcactggcttgtcctgtccaattagtcaaaatctatccaaatcatccgtaatggagtagctaaacacaaaccattcatcacattcacactgatatcgatggatgaatgcaaggtggctacctccagaaccatcatttaatcagcaaaattgacaaccattcttcagtttaccattggaacaggttcctgaacagcattcgccctcacaaccagtatttggggaaaacataacgaaaaatatcaactgaccccacaaagaacaagggcctgttgattttattatcaaggtttccaccacaaattaagttgtcccgagtctaataaacatgaacaaaataacgggaggcagctagatgagtaacaacacaacacagcggctcagctcagataaggcagccaacaatagcaccatatgcttcagagcacagggcatc

SEQ ID NO: 19056 - DNA, 4711 bp, Oryza sativa
acatatataaaagttttacccataaatttagcctttcatatataactttcattggtaagggatggcaattttgcccatgggtcgggtacccgcggatacccgacccaatgggcatgggcgtgggtgtgattttttacctgtggacacgcccgcccgaaatccgtagacatcgtgggcaacagccgggtttcattttttgcctatgggtaacccatgcccgactcgatacatatgtattagctaatttcgacttatctcttaattcttatacccccttctcttgattcatttgtgatactaactaatactaataagttgtgatgtaattcaaattattgttgataactgataaattggtaaattgttgattttatttctctttgttaaattatgtatctttcgagttactattcatgtgagatccattgggtacccgtcaggtataccagtgcccgtcgggcatgggtgcgggcacagagttttgcccgctaaccctagtgggtagggtttggacgggcgacgacgggcatgggttcaggcatggttttgctctacccgtgcccgacccgacccgttgccatccgtaaaggccgctaaaaatttaatacattactacgcaagtattttcttgagacaaatgtacgtgcatacgtcctatccaaatattcaataagaacgccatcaatcaaactcctccatgaatcggtagccagtaatcaccacaggattcacggctggtgtacatcaaccataactatgatgacagcttccataaaaaatggagtggccagctatttaccaattttcttttccagttgtgcctacctctacatcaataattaccgcacatcttcaggatctgcaacgattatgatgcataacaatcacaataatgggaggtaacaaaatatgcagaatgatccccaggcttggtcttttctttaccttcaatgttcaccgctcgggtatttacacaagaacaaacgaaagaattcacatgtcaatggaggagtactcttgattagactaaatttcaagctaggtcactgcttacgagaaagcgaccgaattttagctgcttcaagatctgagatgtaacatgactacattcctagttttctatagacgagacaaaatgaccagtttgtgccacattactgtgttccgattattctgatgttagatctgctctacatccagaggggaatgcctcccttgagtttgttttcttgagaaagagttctttccttctgtatgtctgatgaaaacctgcggcgtgaaagataatcattagaaattagtctcagaatttggaaatgtcccagaaggaatgctatctcctgattagaaacaacatagcttccttatccagtatatgcaatgagcttagtatttgaaatgctgaaatttccagatagccaaactagttggaaggtgtttctctgtatcttctctagcgaggcaacagttaatgtgttgaattgcaaaacaaaaggctataatttcaatatatgttacacactatcaaatacaggaactccaaaattcacattgattcagacggtgcagttgcaggtgccttaagtaattttcctatacatgcatataagtgaactccgtaagtaattattatgctgataaatagaaaaggtaggaatggacacaacatataaaaaaaaaaagatgtacagccattcaacagatgactgcacatgacgcagatctattaacacttgatatatgttatggtcagtgccaagttatggtgaatcatatattagtagagaacatgatgccgtagtcacagggactaattaaattcagaatttcctgggtttatgaaatatttctgcccctacaacatctcaattttatccatcaatgtttgtgtgcccaagagtgtgaatgtgaactgtgaagtatcattaccattgagtttgggggtatctaactacaaaatacagggttcctgaatttacagtgtagaagacttgcctacatatcgtacaattttgagtgtatctgtttgtttccatgctctgctcatcaaaatttgcaacattcaatcgtgatgactgatgagctgatggtgggactgcttcggagttagagctcagaagtcagaaccctaaaatggtacagtaactaaaatgagaaagaaacctgaaatggcaccatctgaacccagtatttgattgctgtcatgtccgtctgccataaggcacttgatcgtcctacatttattataacacataagtgcatatacaaatcacattactacagtaaaatgttgattctggcaaactctacaaaagtactagaaatgcaaagtaagcatccacctgaaatatattctggtacatccactggactctagagtgctctgctgttgatgtagtttggccaaactatccaattttaagaaattatttacttctttttgtcagttgcacatgtgggagaaaaatcataaatggaaatgcaagcttcttgttgaaaagaaaaaaaaaacctgcatagtgttgcttggatgcagctgattgccataatggtgtgggtggctagactgcaccccataacggctatcaaaagatagctcatttggattaacttcttcctggaaggtacacaataaaaagtaactacatagtcaagactatcataccaaacaatgtacggaacaaaacccagcatcgatcataattactaccataaggtcaacaacaccatttgtcctgacatgagtaccaagatttgaggcagtagaagaagaatgaaaagcatccttctgactaacgtccgatgataccagtaaagaatccttcaatacaagaatgaactcgattagtacaaataacaaactagcgtaaagtacacatagtcgacgtaaggagataccttatgggcatattgatttgacacggactccacatttgtatctttactctttttgggaggacggccacggcgcttttttgctggccctccctcagatgagccagcttgcatgtggctgtcaccattaatagcacgttcagatggtgtaagttcttgctccaattcccggcacaaattatcatcaagaagggtccgtcgtatgtctcttattaattttaatgcatgctgatgcttctcatctgatgatgctccaatctcaacaagacggaggcactgcaaagaaacataatcatagcgctcaatatgattacttgttaccaaatccttccatggattatctaaggcgtgaagctgcttaaagtcattccgccacctgttaagcacataacaggggggtatatcaaaaacatgctgacatttaagcaccgataatgtatgccgacaaacaatgccactgaactggaacaggccacagttgcattccatcctgtcggtctccatacagtgaacgacttcatattttttattcaccatttctccgcttgactcagctagatcaataactacaatggaggatgttgaatcatccaactgaacttcacaattcatggttgcgttcagctcattctggagtttagtgaacattttaaaggtgtatagtctagatagctgttcttccataggaaacttcgatactagcaccctgcttctactcaatgactcaagatcatcatcttcctccattttgtatttgttctgtaaaagattcacatagctgctaaggaatgtcaccaatttggtctctgggttgattgaatcttcaaagaaggcatttggactctcatggtggttaacagtagataacccagcccagaaggtatctttcagaaaggcggggacccagaaatggcgattttcatacagaaaagtgatccattcattatcctgaaggccaaatctactgatcaagttattccaccttgcctcaaactcgtcatccttcaaggaatcatatattacagtttccaattcggtcttcattccttcaaattgtgctgattctcctaacttttcagagatacttcttaacacatgccaatcacttattcgatggcgtgcatttggaaatacttcacgaactgcggcttttatcgcggcacaatcatccgtaactatggcattcggaggccatcctttcatacaagtcaaccacgacttcagcagccataagaagctttccgtactctcatccgaaaacaagccacagcctaacagaacaagctcaccatgatggttcacccctaggaacaaaacaaggggtgtatcaaacctatttcttaagcaggttgtatcaatccaaacagcgtcgttgaaatattggtacgctgccctggacctcgaatcggcccaaaaaacactcctcagatggccttccccgtagaaatccatgagatagaagaagttcgcctgcttcgcctgcatatccgcgaaaaagccattgatggccgctacatcatcttccccaatcttgagcctcccccaatcatcgaatatcgggacctcgatgtcgccggaggtcgagcattcccctctggcagccctcaccaccagatctttactcatcccactaggcaacgtcttgtagcacctcaggaaccgcgccgcggagggattcagcgcgtggttgtgctccagattgacatccatgaggtgcagcaggccatcgctccagagcctcgcgacgacggtggcctggcagttggtcttggccgtcggcctcgcctggtagcacgcgtcctccttcccgtccccc

SEQ ID NO: 19057 - DNA, 3710 bp, Oryza sativa
taccacgtagcatgacctcaaagaaatttaactcctcatcttctcgaaggtagagatcagctggtcgtatttgcatctcgttcccctgcaaggaaagttcagatgccaacttggacattggtcagccagaaaccagagaacatgtctgacaacagacatttggacgagagaaaacccaacacaacatctttgcacgataacgtctctatagccaacaggtaaagtcaatggaattccctatcgtagtgccaggttcagacccctagtatttattttaaaatcagatgctccgataaaatattattaaatgatgacaacttcaacatcatttgcatatatgtttgtgaggaaacatgtgatcagattgttatagcctttttaggagcaactctagttcatacaatagacgatggagccatcagctctgagaatcatacctgctccgcaaatagctcctccaagacatcatttatttgtctatcttcagcaaccattgccaatgccatgctcactagttcatttgatagaacatagtcactgatttttgacactgacaataaattttttgtcctaggatccagaatctcactgattatgacagatttatcagatgcttgttgcatctccccaatccaagaaccttcacagaagcttcctcgagtaacatgtgaaaccatcgcctccctgaatggaagtcgctttgcctgcagtagttaaaggtgtgagccaactatctttgtttaaatgcaaaatattctaatgtaggcttgagaaatgaaaaatagtacatgatcgaagacaactgcatgtgatcagagatatgatctaaagcaatcctaagtaaaatccaaaattgaacaacagtttaaattagttccccatggctagagagaacctggatatccctgatcagcagtagtgttgcaagcgaccttgaatcagcttggattgctgaatcctcaacagattcatctgccagaatcagtatctgtgtgttgcatataagcatcagccggaggaaagaagcaagcaattgtactcataggaaggttcaacagtactgcttttttcctaaaggaactacagtctatgttctcagaacttacagaatcaaatgattctaaagggaggctctccaagtgacggcgaataacagcatttccttcacggtgaaccaaagtaatattttctagacgactgaagtccaggcctccgtctatcagctttctttctctgtccatctcaggaacgtcattgaacatccacaactctgaccctggcgctagaaaagcatcgagtacctgaatacctaaaaccaagtcacactgttgctctagatcgtaattaaatgcattatccattcatcaaaacaaaaaatcatgcactgcaacgtacatcatttggtaatcatatgttgctatataaacataactcttttttttaagaaaaaaaatgagcatatataaacaaaattctcatagtacttacattttcaaatggacaggcctgcattttttgatggacattcagtacaaaagggtttgaatatattttttattatactaaatgcaaaaatataaaaagaaatgtatgacaattggagaagccaagcacagcatatgattatagatgtttaagttaatgcaaccatttcaacatatgtatcaaactacagtattaactcatggggaaatcatgcaaaacacactatagttgctcatgatattagagctaaccatggatctgatcatgtgaagaaacaaaaggccaaatgccagtacaaactcactagtcactacaaaaattggacagcaccacagtgggataaaaacactgagaaagataaaacacagggcaaaaataagaatatcaggtctgttttccaaaacactaagcacttaatggcacattggcttgttccatcaaccatgctgccgtggcagtaattagaaataagtaaagctcagaacaggaagggatattatatcttttcatagttttgacacaggcaaattttggctccaaaacctttagtactaccatagcaataggaatattatattccaatagaggacacaaaatgttgttttcgatctatcatcaagttaccattatcatatcttccatatcacgccgccaaccacaaaacaatattctttcaggagacttgggaacaacaaaatctttaggtaggtaacctctcataacctgcagagttttacagaaaaaggaatattaggagcttcaacgaaaggcttaccacaatcatatcatctatatcccgtcgccatccacaaagaagaatcttctgaggatttctttcggggtgaacaatgtctatgtaaacagcttctttaacctgaataataaaattgacttcgcttttgtaagcttcgttacaggatgctctatatatgtgcagtatctatgttagaactttcctagtaagttagctagcttttgtagttttaggcttttagcaagtaacaacaaaggctaatactaccaccatcccaaaatatagcaacttttagctacaaatctggacatgcactagtccagattcatagctaaaagttgttatattctggaatggagggagtaattgccatctataaggcataaattgactcatgcagttgtcttttccggtgcttaatgagcaaagcaggagaaattacttttgaattgtgcaaaagcaatctagttccagttgggcagaagctaaaattctattgacaaccatgcggttgtctgcacttatggatctcaagagcctaacaatattacaaggagaagaattcgcataagacaccattggaagaactcgtgtgaaatactacagagttttgaagcaattaggttgatgcagtaagttgtaaataggatatggctagtgattcagataaatatatcaataaaagatgccaaatggtaaatgagaggaaatagcaatgagcttaaaaacaacgtcaaccaagatgagtatacttcatgaaatgcaacaagtagactagcaatgcacaggctgacaggcaccgataataagatatctaaggagctgtacagaaaatagttaaatatgtaaacatggcatgactaacaacagtaattcaatattaatgttacagagccagaagggatacaaaaaaaagtcctgatagatgatataaaaagaacagaaagtttcagataattttgttcttacagattaatggttaccttgggtaatggcgctggggcatatgtgtcatcatcttctgcaattactagcacctcatcaccctcttgcaagacataaaagtcatccggatttaaaataatcttgccaccataagatgccacctttatgccacatggaatggcatcaggaaagctaatgagcacatcttcaaattgcataccatccaactgaggccatcttttaatatagaactcacagttttcgaagccaaggatatcttcccatatctgtttatgcaactccattagtatttaaagggacacattaaattagtaaataggaaggctgtgcatgtagtagactatatgcaatactcaaacagccaggtaattatagtaagcattatgtacatgcaggaaatatttaagagtgaattattgcgcatgtagaacaagaagataggctagtttcttaagaattatgccgtgccaggctaaaaagaaccacagaagtagataaaatacta

SEQ ID NO: 19058 - DNA, 2066 bp, Oryza sativa
aattaactagcacaatgtacctggtcagcatttccttcttcagctaaaaccacaattgcacgcgctttagaaactgagaccttgtacatgaaggcagattcagttcaacaaagagttgcatatagatttagtaaagtaatagtgagtcattaaattaacataacaaccatccaattgtctattgattactgccaagtgccaacagatcataatgcgggttagcagaatcactacatcacaatgtttacctttttcaagtcagctagaatcagagggcttccacttctacaaattatagctgttcctttcaagtcaaactccattttagcaatgtctgcttccatttcctctttgtctttctcagccatcactacaatggttcctcctcccaaactttcattagcaatagcaatttggttcagcaatgatccctgttgccacaaaaggaaataggttagacacttagactacagtaatctggagaggaacagcttgtgctcagatcagttgatctgcagaaacagatatataagaaatttgcatatttaaactaaataccagaattcactaactactttacttttgtagcgagactgctatgcaataaaaagcaatgtaacagttgcaatgacgtccctagttagagctatatttaatagctattggtataacatcattcccaaacaacaaggaacataacaggacaggtaggtagaaatatggaattttgcgataaagattagcaggattgaatgcaggattaccagtttgtcactccacccaaggaccagcgtgtggctttgctctatgacctcacttcttcctttcctcagtgaatcaaacttctcagagatcgaatctgttacaagcccaagcatcatggcaaaaaccagcatcccaccgatactaattgaaactgaaactaactttggtccaaagccttctgcgtttgcatggttgcccgaatcagcaacaaaggtccaggacagccagaggcaatctaaaaggctatcatcatttacaccataaagagccaggccaccaagaccaataagtaacaatgtagcaacaagtagaaccaagggtttagcatatggttgaagtgataaaaatatatcaactcggtatgccaaccgcttgtttatgggaacttcttcttcggagtcttgcgaactcctcagctttaagaaaaggtccatgtacttaagaatgagtaatggggcgtacagcgtagaaagcgagagcagcaatgagaaattcttaagacctctgttctgcgaagtactgttattgctctgatatgataatatgctactcatatccatcgaggactctgtaatacaagactgcaattttgtagtagcttccgcaagctgagcctgatagaatccgcgtataagtgcgcagttatgcagaatgtgcattggaatcagttggaattttaccttcaaatggtggacctgatcatgtagcgaggagttactgcggacaagggaagagaagcagagcacaatagcctgcaagcatcaggtttacgcggttaaaccgtcagtcaacaaaagtcaaacgcgaaaaccccgcgagctcacccatttcttaccgccacggataccatccctgaccatcggagggtggtcgccgacgccgctgacttgctcccgtgcacctgcgcggccgtaggaaccgccgccgccgccgccgctttctcggcggtgagcgttcggacatcgccacggcggacgccagcataccgggggtcgcgacggcgcggggcgggaggaggcgtcgtcgggggcggctgctgctgcttctgctgctccggcggcgggaggggggagcgggagcgggagcgcggggtaggaggcggccggcggtccgggaaggagtatggattggaggagcgggaggtggaggggaagggggccctcggcgttcgggctctggaggacgggaggaagggcggcgccggcgggaagaaccagtcccggtgcggcggcgccggcgaggagtcggggtccaggggcattttcggaattctaggggttggcaggtaggcggcggatgct

SEQ ID NO: 19059 - DNA, 1146 bp, Oryza sativa
acatatcatatcactatgaatatgtatatgtttatgcagtatgtattacatgttgttttgtgtttatttatttttgggatggagagattcagctttcagcccccatcgtttggcatatctacaatcgaaaaataatttgtgaatgaaatttttacatacatattcttaatgatctaaaagtaaaggctgaaaaataagtttcgatgaaaaaaaaatcaaaatcaacttcaaatttaagtttgaaaatttaaattttggctgacaattcaaatttcccaaacataaatgatagaagaccacaactattttattaaaattgtagattgtagatttgcccaacttgagctaattttagaaaacaaaaactaaataatataggtggatcgggcccaacagatgctgtgttgtcgtgactacgccatccttggatcgggcccagcccacgccagaatggctgacctgtcaatttagttgcagcccaatcatggtagacccattagtaggagcctacggcccacatggtcttgcaagaggcccatccgaataaaacaaccggacgtcgtcttccccatcctggttgggttggagtcggagagccgagagcgtctcgccgcctaccgctcgctcatttgggcagaaaccctagccctaggcgagcccctaaaccccaacctcgcccgcgatttcctccccgagggcgtcgaggggaggtaggttggcgccatggatgcgatgaggaagcaactcgacgtgctcatgggggcaaaccgcaacggcgacgtgcgggaggtcagccgcaagtactacgaccgcgacgtctgccgcctcttcctcgccggcctctgcccccacgacctcttccagctcacggtaccttcccccttctcagtatccagtatccactcatctccatgatgcttctctgtgttttttttttctttgtgggaggttaatttggtgggtaagcgcttggggtcaggccgtagattagggttcggagtgtaaatcaatattattagcctattgcgttggtgtgaatcaaaatctaggttctctcatttgagataatttcgtgctgtgattctgttaactaatcggctattcattcatggcagaaaatggatctcgggccttgccccaaagttc

SEQ ID NO: 19060 - DNA, 2135 bp, Oryza sativa
tgccgttgcaacgcacgggcacccaactagttaattataaaaaatgtaattaaaagaaggggaagaacacatttttttttaaaaaaaaagcgaagatgaaagaaataaacgaaataagaggatacgaggcgacggacgtcgattgcctaacgccgacgcgagggtgacgtcaggggaaggatgacgcagagtagacgtaagcacgtcgttggcacgttccagctccatccattccaacctcgcccgcgccgcgccgcgattccggaagcagccgctcccgcgaaggaagaaaccaataaaacaaagcgtttttcatccacacgtgacgcgaggcagaggcactacacacactgctctctctgtttttttttggtcaaccccaacccaagcaaagcagccgcatatctctccattaatcacctaccaaaaaaaaacaaattattttgtttttaaagatcatttccaacaagaacaccataccaatccttggtcaaattctgctagtatttatcctcctagagagggacatggggagaggaggagtggatccacgatgatgacgaggagcatgatgaagtttttctctcccttctcctccgctatttataccaccctctcctctcgtctcgccaggatcaacgccactcgccacacaccgccaccaccaccaaagagcagcagagcagcaagatcactaacctgtactactgcctctaaccccagatccaaatccaaatccaaggccaagcatctcctgctgcttctcctgattgtctcgctcatcttgcttgcagctttcttgctgattcgagcaaccatgtcttcttcgtcttcgtcgtcggatgctgtcgccgcggcggcggcggcgacttttgagaagccgaggacggtggtgaagaagctcctggcggagtcccagcccgagggcgacggcgccaccgtgcgaaggagcatcggcaggtgaaggatcatcatcgattcaatcctatctctgaatctctgatcgatttgttttgccgaatcgtgttgggttctaatggatggggggcgttgacctctgttttttctgcaggtacgagctcaggaacctggatcctttcctcatgctcgatgaattctctggtaattacacaattccaattcaccggtagagtaaaatcgcggccctttttgtgcccgaatgatcttaattttccccttctgttttaccagtttccaagcctgctggatttcccgaccatccgcatagaggattcgagacagtcacctacatgctcgaagtacggatgactaaacttcttgtagttccatttcatcttttctttatgcccgtaaggtgtttgctgaaatgctactcatggtttcttccattcagggggcgttcacccaccaagactttgcaggccacaagggcaccatcggcacgggagatgtccaggtcttactctaccctccaactagggacatatctttcatcactttcagaaattgacgtttcaccagaaaaaaaaaagggtgactttgttttctaatttcagatgctgacaatgcaatcttgatcatgtttttgttcatcagtggatgacggctggccgcggcatcgtgcactcggagatgccggcagcggacggtgtgcagaagggcctccagctctggatcaacctctcttccaaggacaaaatgtatacacaccatgattgatttgatttgcactccaattttgcaagattgcatgtttgcaaatgctcattggatgaacttcttcaatgcaggattgagccgaggtaccaggagcttatgagcaaggacatcagctgcgccgagaaggacggcgtggaggtgaagatcatcgccggcgaggccttcggggtgcgttcgccggtgtacacgcggacgccgacgatgtacatggacttcacgatgcagccggggtcgcagctgcaccagcccatcccggaggcctggaacgccttcgtctacatcatcgacggcgagggcgtgttcgggagggagaaggcgtcgccggcgaccgcccaccactgcctcgttctcggccccggcgacggcctgagcgtctggaataagtccggcgagccgctccggttcgcgctcgtcggcgggcagccgctcaacga

SEQ ID NO: 19061 - DNA, 4274 bp, Oryza sativa
tcgtgttgtttggatgtagttcgcggcggattggcaggcggcgcgcgcggagagggaccaggggaagatcctgaaactgcaggtgatacgggccaacagcggcgggttgatcgtcaggttcaactccctccagggcttcgtgcccaaccctctccttagccccgcgcattggtgtaaaggtagtcagtttctctagtttgagttgtttgcagaatttgtccagatttttgaaccagctctagctgcaattgatcgccggattaagatgtgattgcagctgtgggctaccgtaactgaactcatggtggatgtatggttttttccttgtagaccccaaaaggcccattcaagatgttacaaaggaccttgtgggttcttccatttctgtcaaggtaattaagaggcttcaattaccttttgagctaccaattagattatgggtactataccatgcagtagtacaaacacatgctggttttggatcaaaacgctgatcaatgttacttttaggctgcttgtgtggcggaatttcagtattaaactgggtgtccctctccaaggaactgtgatattctttaactttgctttctaaactgcattatgattttttttcaagcacattctggcaaagttgtatcattggctttcaattctctattactatgggtacaatctaagagcgggcaccagattgtaggattcgaactttacacatttttcttcagaaactgaagctaattactttaggtggtcgaagtgaacgaggaagaaaggaagcttgtcttctcagagaaggatgcaagttggttcactcattcttctctagtcaagattggtgctatctatgatggaattgtcggttcagttttccactacggtgcatttgttcatctgcgatttcctgatggtacccattggcaacaccccttgtcatttttgttggtaaatgttttgttgattttctgacaaaatctatcctcaaacaggaaattatcatcttactggccttgtacatatctctgaggtctcttgggatcttgtccaagatgtccgggattttttaaatgaaggtgatactgtcaaggtcatagtggtgaacattgatatgtaagtatctaatacttctttactgtcttcctccacaattgtcagcatgtgtattcgcaatgtagtttctcgtgatctcattccatactttttcaagaaagtttgcaattatataatcaatgttgactgtaccaatgaaaaatagcatatgtttaattgaatctagcgatggagaatggcgcaatacaccttaaatctatatagattaggatttaacgatgcaataactattgagaacacagattgtctttaaggaataccaagttgatgcattgaaatagatcacttatgactcttgagggctgatgaataaaatgagaggagtttatgatctatttttttttcctatcattgctttcttcgcaatagggcaaatcagcatatgctggaagaattatcatgaatcagaaaattatgttacataatctgatactgatgcatttccttcacaaatagggagaagtcaaggatagctttatcaatcagacaattggaggaagatcctctactggagacattggacaaagttattcctttggttagtttgtcgaaagcacgtgtctttgtggcaggttatttagctttgttattttaaaggtcaactcatgcattaatattggtttataggaggctgatcaatcacctagtgctgggatcatatcatctgattcatctccttcagaagctgatcttcttccaggacttgatggtatatgtaatgaactattgcaagaggatgggtatgatttctgtttgtgtgtttttttttttttggtgtatggttttttgatgttgatgtactactttatgtgcccagtagctcttcttgactagagaacagttttgttaaccaggagggaacccatgaataggtttttacgttgcaatctccatgttttaatcagttctatttcttcacagtataacagacgtacagtttgggcgccgagcattggagaaacgtgttgtttcacaagatctggaactctggctttccagtgtatgatccaaaatgtctccaatttaaccagtcgaagctcacaagatagaaacatggactgatgtgttggatctcattgtgcaggtgccagctaaggacaatcagttcaagcttcttgctcgagctgggcgacaggttagtttcttcttgatatagcactgttttcttgttataaggagtttcattaggcaaggattgatgtttagtcggttttcagtcccaactgaacagaaaacaaaggtacatcctgtaaaaccaaaatatcaaacaagtcttcaaaatggttacaccggaagttagtacgacaagttttgtgaaagattgtaatggttgtctgatgagcgtgccgttggaataattgttgtagttgtgtgacagagtgtaagtaaaaaattataatcctttaaactggcaggtccaagaactatatttgacaaccagcctagaccaggagggcataaagaaggcggtacagagagtactaggacgtgttccttgagtttggagaacagcgagtatgaggcagcatgcctgtactccccccaattttctgaccaaccgactatagtgaaacaacagcacgagcagacaacctgaaaagttcgtcgttgtttcctcattctgatgctgagcttcctctcagctggagactacttaaccgaaaattgcaaattttgtcagtaatacaatgagtaggtagttatcttcgtgcatgcatgtacctatctgaaacctcaaggccacctgtatatatatcagtattcatcttcagtgtcatcaattcatcatatcttgttctggtaactaatagctagatatgcctttcttgtcaaagctgtttctgttcaacatgtaaatctactccgtaatactataagtccgttttccccctagagcgtatgaaccacttctttgtcccttaaaatttactgctaattctgtactgcctgaaccacttctttctacgtaccttgttacatgttctgttctgactgcaacatctgtaggatggtacaggcaagtaggtgagatcagcaattgtgtaagcacaagtactgctcttcttgcaaatatttttcgttacatattaggctgggcagtgaccactactgacacagttgaatcaaattgaatgggacatgcagatattatccaaattatccaaaaatgtcacacattgactcccctagaagtcatagaactaactataatgcataattgccaatgtgatggaacgcccatggtttcgtggcatttcgtggtgccttcttctgccttggctagtgtcaccatcttctcatcggttgatacatccaaaggcgagagaacaagaagccggcgatgaatccaagaagtaataaacagacaaaattctcaactatattagctcgaatccgccgcatcgagcaatctccccctcgcattgcctccttcgatcgatcaatcaacggcgacaatgtcgcacggcggcggcggcggccagccgtcgtgcgccgcggtgtcgcttagcaagtacctccaacgcaagctctggaagcgcatcaatggtggcaagccgaggaggaagaggaggcctgaggtgcggtcggcgtcgggcggcggcgaggtccccgtgtcggtggagctgatgactaccagctcgtggtcgtcgtcgacggtgaggtcgccggaggcggtggtgcgggtggtgatgcagggcggggtggtggaggcgtacggcggggtggtgctggcgtgcacggtgatccggaagcatccgccggggctctgcctcgcctaccccgacgtgttccgcaatccgcacggcgcccgcgcccgcccgctccagccgctcttccccggcgagaagttctacctcctcccggagcgcaccatcgagaggctccagcgccaaatccccgagagctccgtcggcgccttcgacaacgccgacgaggaggaggaggaggaggaggacacgcaggattacagcagcggcgcggcatcgtcgtcgtcggaggaggaggcggcgtgcgacgacgacgacggcgacgagtgcgccgcgcggaggtggtgctgcgcgagggagtacttcgaggcgaaggagcggtgggaggaatgccagttcaagaagatggtggcgcgggggctcgccgtcgagcagaacaccgagaaggagacggcgatg

SEQ ID NO: 19062 - DNA, 8780 bp, Oryza sativa
ggtcacgtattgttttgtttttttggttgaatcagcttcgactgcatgtcttgcactcactccaattgatcagagcagatacgattcaggtcgtgtgttgtgaattgtgtagccaattgcaaagtagaatgggttgtcaaatcgaatcttcttcttcttttacggatgtatccgcacgagactgaagcctaatcttttcgcttacgttcatacttatcaattaaaatttaaattttcaatcttaaatttaaagttgattttggggttttttcatcgaagtttctttttcagcttttaattttcgatcgctaagagcacctatatataagttttattcacaaattatttttcgtctacaaatatgccgcttcgaccatgaaactgaatttcctgtactggccgttagggaaatgggccgcacgtaattgaaatccaattctggcccaaactagtatgggccggacgtgggtcacggcacctttcaggcacaattaatatgggccgcacaaagtcctactcccgctgttgggccgcacataaccgaaagaacattcagatccggatatctctacaccatccgatgaagattacacggtccagatcgagttcaagagggtgccagggccagaggctctttttcacgggacaccctgtgttagcacggtttatcgtttatacccttcacgagttggatcgtccggggcctttcgccgccgccgacgcaagcggagaaggaaggcaacgaagaagaaaaggaggattgcactgcaaaacgcaatgtggtgttcttttctgtcagttattaccaaggggagttaatttgctttgcttgtgcaaaatcttactgtgggggttgggatgaaacgaaatgaaaatcttggtctcaagccttccatgatgctgtcatatcttcatcccaaattaggagagaatctgggcgagtcgacggccgtgggacccgcgcagccattgtcccttcccgcgctttccccaccgctcgaatacagcacatgtcaaccgcgcgccaaattctcccacatatatcctccacaaactcccaacgcctcgctcatctcgatctccatctccaaattaaacagaaccatttttataaattttagttgctgctcgttcctccgttgaagagatcgatatcaatatccgcgccatggccgccggtcaccggacgctgctgctcctcgtcgccgtcctcttcgcggcggccgccgtggcgctcgccgacgacgccaagccgacgatcctcacccccgtggcgaacaccccgctcggctccttcgacggcgactcgccggccgacgacgccatggacgacgaggacgccgcgccggtcggggcgcccatcggcaccaccatgaccgagcccaagcccgagctcaccaccacgccgggcgccgccggcgaggcggcaggcggcgccagcgccggttactcccttggtgttgcctctcacgtcggcgccgccgccgcgttcgtcgccggcgtgttcgccttctgagggcgaggatgctgggaacgagagaaacctccagccttgtgttgtgtcaatatatactgacaatacatacatacatatatacatacagcagtgctaatttgatgatgtacaattttcgttcttttcttcatccttgtacgataatgagcaaacattgcaaaagtttgcctcaaattctttcatgtaacagggcaccgtgcatttcaagattactggtagtttgcgtaaaatgctaaatgttgagtcgatcagaatgtggtcaaaatcaggcgaggaagacatacatttacagccacctttgcatctgcatcatggggggtcaacaaaatccttattacttcctcgaggacaatctacaagctacgctcttctacatcctgagtctcctaaaggcagaaaaagcacaatgctagggcattgtttcaaaaagattatgccgcctactatcttcttgtaagaatcgactcctgtagctgtatcctgtctgtctgaagctcgcaactagcacgtatggtcaattgcctatccttgggtgaacatgctgaagcagcagataggcatgaattggtgatcctccataggcacattatagcagcagataaggctagacccaccaccaccagtttccatttactacactgcagatttgtccattcgtccattctctacactgcatcttgttcgttctcttcgtccctcgatttatgagcgtcatgtgacgtagggtcgataactgaagaatggctgtcagttgattcctgaattatatcctacaatatagaatggttatattagaatctaaatacctttgattgattgaaacttgggtctgagagagctttgctatttgtttctctactttacctacttaaagatgtttgttgccttgataaggacaaagcatacctctttcatgcttccatttggtatcatttcatttgtactatggctaagtccaccattgccgttagctataattggttcattttcatgagattcctgttttgagtttgtcaacagcacagagaacttcagtttctgaaataagtgataaaacaatcaacaaaattacaaaaatgcctcacctgttcatctatgttgtctccagatgcatctgaattctgttttccatcgacgatgccagcttgtgtgcctgcctgttctgtctgttccgctttttccaaaaacacttttctccttgactcttcttcctttagttttctaaatctgaaactcaaaatgaatagaatatattttaagtactcatgttttcccctaacttgtgagattcaggaaactacaattggacatttcctgcatttaaatatcaatcacaactggacaactagattagcttctaggaattaactaacttttcatttaccaagataccaaccaaaatctctgttgaatgtccattattgtaaggctcatcgatctaatggtttgtgaccacggctgaaataatgcaggcattcaacaagcaatatctgaaaactagacagtacctttcaccacgttgtggtccacttggttctggctcttgactggccgggggtttaccaactttagggagaggatcactcttaatagcaggctcgggctttccaagattagttgattcttctttagcgagcttatcaatgtattctttgacgggatttttggcacctccaagcttttgaagccatacttgttgtgcagtgctaaggatattattcgtaagcctgcaagaaaagtattgctaatgacaaccacaaactatgaaaaattcaccagttaatgaagaagaaaaatgattaggcctgatgagagtttcacatatgtaaaccaagtttttcattccttcaatagccaaagtaacaggtttacagcgaattgcatatatttgccattctaaatagtgtagaaaatctggctctgttcattctaaatagaccatgaagaaagttatgatgaagctcttattattaaaagaaaaaaatctgaataaagagaggttgaaatctgtaaaacacacgcaccaatatagacttagtccagaaggaacagagagagcaaaataaccaattagcaaaggcaggaacttcactacagcttgagcaccttgttggctaggatcattgttctgcaggacaaatatagcaatcagtaagtttgaacacaaacttaatcagctattggtgtaagttggcatgatacagaaaaagaaattgtgtgccttgatcttttgtgctttttcagtggtccggattatttcccatgaagagggaacaaattatagagttcaacaaaattattactgtacagactacatatctttacaggtaatcttctggagatcttttcagaatcttgagttctataccaagaataattgaacccgatagaaattatgtgtttattcattagaagcaccatacagatataattcaactgataagaaaattcccatcggagtgttgaggaccaaaaggaattgaatacaatggactaaacatgctgaaaactttggtagaacaaacctgtggtggctgcattacttgagaagatacatattgggaaataacaagaagaactggtaaaacaaggtatgccagagtgtccgaccagccaagaggtggatgaccatcctacaacatcatcaattacactggagtcaagaaaaaaaaagagaagaaaagaaatgactccaaggtcaatgaaataaatgtcaactaacattcagaaatggtcctatccaaggcacttatataggttaatagcaagcagcattaactgtccgccgttaaaattccagaaataattagatgtgcatgtgcttgatttttgcaaatacattctagaacaaccaacggagtagagattgtgcacatacatttaaatcacatgcaatcacagttttctaatgcctgcaagcagacaacaccggcttacaaatggccttaacaacctgatcacaattctaaaagtcaaattttacaattaggtaaaaaattgaagttgcacatgaacaaaagttgcttgggtataccagggaattatcaagttctgtgtgcttaccgtaaagggaaatagccatgatattccctggccactttgccgtgcagcaattgttgtagggccagccaaagaaggtatccagaaaaagccttcggtaagaagtccctttcgaacaaagacacggatgcatcaggtgatgcggatgtttactcaacaaaaatagaaatgacaaaacacaagcatatcaacctcattagctacattggagagagctctgtatagaccaatccaaaccggtattgtcacaagagtaggcaagcaccctgttgtatagaaatgttaagtcaactgcaagtaaaactaatgcaggaatgtacctaagttgctaccagaaaaagggtaacagaaaaccaatataatgtgaaactattctacaaagccttgctatgcattgaacattgaggggcaaacactgataggaaatatatcaaaaatagtactacctgcgagcgggtcaacatctgacaacttatataaacgagcagtttcaagctgtatcctttcctggaaaatatgaataaataattaacctacagatggaagtgcctcgggtagtatttcaaatccattaatatgatctacaatgtacaccattgtgttaaatctcccgtgtgaaatgggtaaatggtagtttgtttacatggagtttatttgcagtatgcacttgcgtaataagtacctttcctacagaacattttgaacaaaatgacctcattagctgcatgtcttggaaggacttagatcttccagttaatgtgggcttcagtttattgctacataaataaggaatttacccccaatcaaatgaactgctaactaaaataaatgcaagaccttgccattagcccacagtgcacacagaagattcaacatgtgagcatgttatattattgtaaatcagatcaatatgtaaaatatacctacctgatcaccagcataacgttcttgaatagccttaacttgaggttgcagtgacctcattgcaattgcagactcaacctacaccagaaacaacaaatatgaacaaaaataaaaatttatgcaggaatagaatgtgtgtagttttactttgcatgaacatttattactacaaaatgccatcaattgatttgggacagaaggtgacagaatattcttgcagggtgaataaccatgtgatacacatgtttgcagtcaaatggtttccgcattgaagtctctgtcacaatgtcagtatggattaagtcatgcatgcatttattactggctccgctaagaaagtcctgaaaggaatcaccaatttattggatatgcttgaagctacagccggtatatataagaaatagaacagtacagatatgtaccaaatcatctataataatgtgttgaaaatagctacattattcgttcatctgtggatcacaatgtatcataagttgggttatggtaaatcttgttacttcctaaaaatgtgggtgaaaagtgcaggcaaattataatatgtctcacagaaagatctgccaaaatgaacattttcatggagtgatatgatcgtaaaagtaatcttaattatgaaaaaaaaaagatcagagagtatccttcaccaccttaatctgaacaattcacgatatgatatataaccacaacccaattataccactatctattctaacgcagcaacatggcaaaaaaaaatacctgcttctttgtaagaggaaatgtagctgccttgacgagaactgttagaaggatgattgcaaatccatacggataaggaacatggagagctgacagaccatcttttaaaacctgcaatagaaaaaagaaatgtaaatcacctgaaaatatgtagcaagcaaggtataatgttataagagtaataaaaatttatgcaaaccacaagatatcctagatgcaatgcataatggtggccactcattatgcataatggtggccactcacatgcacaaaaattgtagtggcaggagaacagggagataaattgtttgaagatttggtggtaaaacagcgtttgcccactgtcggttaaagagtgaaaacagttgaaattagatagcatggaaattccggccatacttttccgttgcaagtgatttaattccctaattagtaataaggcacagtacaaacagaatattgagtaataattgttggccattagccaaacaacaaatatgaatgtgatcacttcatatttccctcttcctatgaggtctccacacatatccttcagttcttttttgccttatggtccatcaacagctatgacaaccaaatcttacctaaactactttgggcatggatatcagggaatcgtgtttttgctttctttttttttgttaagtggatgaaagtgctgaagaaattccccatgattgaaccaaggtcacaaggtcacttctatggcaaaaccccttcctttcaacgggaatgctaataattgcctgatctgaaaaggatgctcagaaagctaattaaatttactccattcctcatagagaaagctttacccatcagcagagtagaatactactgtgcaactaacagcaacacagtgatacatggattacattgcccagagagtcgctctcgggcaatacagcaatctaacccaggttaagcagatttttcacctactactccgctacattcttaacacagaaaggttcataggtgacagcatcgcacaacactgaatggagaaggcgcgcgcgcacacggcaagacgctggaaccagctggatatgagaacaaagtcaagagtcacgctcaccttgagcacggtctccatggagttggtgatgccggagagccagtccccggccgcctccttggtccccccgccgcctccctgcaccacctccggggacgccgagacggccgcatccgcgaccgtgtagaggaacgcctcgacgcgcccgaacagctcccccacctccgcaaatccaccaccaccccccagcgccgccaccggtcgaagtacgacgcggcgcggggccacccggcgcgccgaggcgggccgcctgaagccggcgacgccaccgggggctcgcgcggcggcgagggctagggctcgcgggcgcgcgaggaggaggaggtgggcgtccatcggcggaggcggagatggtcggagtcggagaggcgagtggcgagtccacctaaactagtactcctactactaggcggagcatttggatacggaaatgaaattggggtgggacgcggcacgtgggccggtggtgcggggtgcacgacgccgcacaagtcaccgctatggtctatgcatgtgtgggcccacctagcagcgtggtgggccgggcctctttcgtgcccgtcggcctcctacgaaatttttttacgcacatgtttcatgcgagatcggcattaataattcctttggagactttgacaattcgggcctgtttggtacagctccaactcctaaataaaactccaggagttgagactggagaggagttgtggagctgtctaaacccagctccataactctagtatattttgtgagagagctccacccaactccactcccagttttggtagagctgaaactatttggttgagctccagctccaggaggggtggagctggagctggagctgtgccaaacaggctactttacctatatacgataagataagactatctccgtttttgaacataagatcgtgatgttgactttatgaatatgatgtttcaacatttatccctttttcatttattttatggacttgttttaccattagatgtatttaaatgtgccctttttctctttgcattttttgtattatatgtttgaataatataaatggttaaatgttacctccaaaattcagtagcatcatatatttaaaaacagatgaagcagataattagatgctaagccagcaacagaatgttgattatctagcggatatatcatttgtgtcacgcttccaaatttatggtaactctctaaaactttctttatcgatattgattacattgctttttccaagctattactccgtcatccatcatttaactctcaatctgtttcaaatgtgactttaaattactctatagaaccctctctgttttatataataagtcattttgactcttctcaggtttgataaaatttataaaataaaatttagcgattagaggtagcactatcttgaatatccaccccttattatgc

SEQ ID NO: 19063 - DNA, 10891 bp, Oryza sativa
atttattccggtcgacagaaacgtgaaggtgatagagtaactaataacccagattaaatccggtcttaatctagagctatcaaagtgcattgcgaattaatgccaacatgtaccaagtagtagtgtatcgacaccggcggctgctatcgcaacattataaacacacagatgcttagcgtgctcgacttgtaatattcgacatcatcgaattgcagaaatattttggcgattgcatcgtccgcagcccattagtgtttgggcccaaaaggcccagctagaaacaagatcgaagtctcccttccgtctccgatggccggagctctgccgctgccatagcactaggagagagctactactagtactatgaagcaagagtaaccatgtaatgccatgccatcgtatgaccctacaggattgctctctctgttacagagaaaaccaactatacaaaagtggcaatgcttttgcttttcttaggtcatgtttgtttcagcttagaattattataatctgtattattatgagtaaactgaaacaaacagatagcttattacgatagaatattacaatctataagctagattactataatctagtaatccactctaaaggtgctttttttcattattggtttgctaacacctaacaaccggctaataatcctgagaaacaaacatctaacaatttattctatgtcggcttattataatccagcttatattaatatgtctcaataatctagattacaataatcttaagctgaaacaaacagagccttaaaaaaggaagatagagaaaaccaacttataactctcttgatgtactcactccatctcaaaataataaaaatgctatataccggaatcccgtgtccacccctcgggatgggatcccctcacctcgcccatgatacgtgcggcaaagaagacggagagcaaaaatcagtccaatgcaaagcaacaggacagagagcaagacgcatgcgatatccgtcaagtatcaactaatacctatcggtaccatttatcagttggtatctgacaagtatcggccggtacctatgaggtatcgagatcttatacctactcggtatctcgttcggatgaaattttgtagtatagctaccgtctaacataaataaatctaatataaattatggttatatctttttttattctaaggtgaaaagagtagttcaaaaaacattgacgaagggaatacttcaatgtgagtatgacctccggtctgctcttggtaaaaggtgccctgtttagatgggactaaaacttctaagtccctatcacatcagatgtttggacactaattataaatattaaacgtagactattaataaaacacattcataatcttggactaattcgtaagacgaatctattgagcctaattaatccatgattagcctatgtgatgctacagcgaatattctctaattatggattaattagacttaaaattttgtctcgcaaattagttttcatttatataatcagttttgtaagtagtctatatttaatactctaaattagtgtctaaatacagagactaaagttaagtctctggatccaaacacctatcgaagcagatctgaattacgcgtaccatcctagtacaacgtctgattttggggtgcaatgcttccacctaacaaatcggcatggttatggtgcacacgcattagcgagccatgagtttccgagagtatagtagtactgtactagtactggtacattaattaaaatgactccactagtccacttattaaccccacaccaccatctgtcagtctcatgttggattgaatccccacacggcacacggcgtgcactaatgacactgcctgcgattgtaccatcagtctacaattactggtaggtacttctacttattcctgatccagagccttccactgtcagagataaaaaggagaataaaaatggtgaaaaaactgaagaaaaaaatattatcaggaaggccgagatcgttgacacaactaaagagtcgtccaatcctatatattccagtcgtatgtatgtactgctatcactaaataggattcgtatcacgcacatagtaattaggcgttaaggacgatgatgtattatttggagtagtacaatatacgatgggtaataccaattgggtaagtagtcgtagcagaactagtgtacggtgctattacttgtttgggaattattcaacgtccaactaattatctgcgcgggtaataaatgcagtgaagtttcttgccacacttgccctttacatgattttcatagatttttaatgagaaaattccctatatacccctgaaaatttactcaatcccttcaatacccctgaatttgacatcaccccttatatacccctgaattttcattttgatctcatctatacccatctccgttagttgacgattagttgaccgttaaatattttaaaatgactatattacccatcctatatacatatgtggtacctacccaataaattttcatatgaaaaaaaataacttatacaaaatacaagcaatataatcatttaattcccaacttaaaaaataaaacttattattttttatttttaaaaaattatgattaaatccatacattagtttcaccagaaaattaagagcaaaaactaaatgttatttaggtttaattttttgggaagatatacgaaattcatcaaatttgatctgaaatttattttctaatttgtgataaactaattacatctcctttgttttttcacaacgaatcttttttcactaaatatttgttgaaaagtaattttcaaattttgtgcagaacttttttgacaataaatattttttattttaatgaaataatgttttatttttaaaaattcataacaaatatttagtaatttattccttattggttttcacaactcaaataatttacacataaaaaaatttctagcttttaacaatataccaaggacaagaaagtaatttctacaataactaacggtcaaactaatggtcaactaacggaatgggtatgtaagggatccaaataaaaactcagaggtatataagagatcaaacaaatttcaggggcgtagaagggattgggtgaaattacatgggcatgtagagaattggcccatttttaatccatttacatggtcaggagtaatctagaaattaaattacctacggttaattcgaaggtggatcacttcactctctataagaagcagtggaagcggaaacacactgaagcacacagacgagtgtgactgacatagctagctagctcgatctcgccggaaatggcagctcgcgtcatcctgctcctcatcctcctcatcgcctgcgtcgccgtcccggcggcggcggcgttcgagacggtgtacgcgttcggcgactcgttcacggacacggggaacacgcactcgacgacggggccctactccttcggctacgtgtccagcccgccgtacggcgccaccttcttccaccgctccaccaaccgctactccgacggccgcctcgtcgtcgacttcctcgccgaccgcctcgcgctgccggggttcctcccgccgtacctctcccccgccgccgccaacgccacccacggcgtcaacttcgccgtcgccggcgccacggccatcgagcacgagttcttcgcgaggaacaacctcagcgtcgacatcacgccgcagtccatcatgacggagctcgcctggttcgaggcgcacctccggcggtcgcccgccgccgccagggccgtcggcgacgcgctcttctgggtcggcgagatcggcgccaacgactacgcctacagcttcatggccgccaccaccatcccccaggaccaaatccggaacatggccgtcgacaggctcaccaccttcatcgaggtatatatatatatacatacatatatctcattaattaattaattgttttttctcggccttttggctatgtttagttcctgaaaaaaaaattaattgcttttagttaaacaaattacacaaagtgctaagctagtagaacaagacaagacgagaatttagaggttgtccgatgcgggtccaggatagtaattacagtgacagtaaaattataagtcgatcggtctaatactaattataagttatatagtttattaaaataatggtaaaactttttttttaatataggtgtccttagccatttaaaaacgaatgcttaaaacgtaaacttatataggaaaacatcaaaatcaagttttaacacctaaattttgtcgatagcttgtactccctccgtcccaaaaaaaaaaaacgaattagcactggatatccaaattcgtaatactagaatgtgtcatatccagtaataggttggttttttataagacgaagggagtactccattcatacaaaagtacaaagtatttttttttgtcactaggacgaataagtaagaccaataaataattaacgcatccatcatgcactatatacatatattatatctaggtaacaatttaatttagcatataacgactagaaatagattttagagttttgaaaaactaaaaaaataaaatatgaattagacttttggatgtactggagaggaacataggagctgatattagctaagagcattaactaatactttcaccgtcttataaaaaacaatatagaattatgtatctgagtatactttttatcttggtacgttgtattagaatgtgttatatgtccattcctggatttttttttcgaggcctagattcgttttttttttactaagcgagtaactataaggccttcgatggttcagaaattagaacccagcctgtcctaatgtatctacccctgtcggtgcatttgctactagcatgacagatcaagagcatggcgaccctgtagctgcagccatggcgaccctgtagctacaggtctgcagccgcatgcagaagagtagatagatcaggaagcacagtgacatctctttaattttgctgtccctgttcagcttgtttgcaaacatttactgtactgcttatgggaattccctgcttatgctgccatcttcagtgtgcgaatacatgagttcgtagttcgtactagccggagtattcaccgagctacagcctacatgcgattaggagtacttagttgcactgttcatctcaagaatatggagttaagtcgctgaacatgatgttgggaggctacagtagacgctttgatgactggaatcaatcagccaaccaaatttgatggccaccaaaatttgacggccaccatttactgccttgctctttctcctcctagcacactatactctcaaattctgaatccataccaagtttgaatgcagctagccggacatgcatgtgcattgatctactacttattctgaatactggaaaagtaaaaaaaacaaactaataacaaacacaaaagagcactagcagtattctctctctttttatgctgttattttaaaatagttttcttgtttataattaagttgtgattttgtaattcgcagccattcaacatacaatctaagtatatgataattggtttaaaaaaacacaaatattagggaatgacctaatatcaaataattagagaggtggcgcttcgaacccaaatcgtctagcccactaaattgtggagctaaccggaagaccgcttgacatttctcgtataattggttttacctaccttctgtccttcgagagagagaacaataattggatgcatggcaggcattgctgaagaagggggccaagtacataatcgtacaggggctacctctaaccggttgcctgccactgaccatgacgctggcccgcccggaggaccgcgacaacatcagctgcgccgccaccgtcaaccagcagagccacgcccacaaccgccgcctccaggccagcctccgccggctccggcggcagcacccggccgccgtcatcgcctacgccgactactacgccgcccacctcgccgtcatggcggccccggcgaggtacggcttcacggagcccttcaagacttgctgcggcgccggcggcggcgcctacaacttcgagatcttctccacctgcggctcgccggaggtgaccaccgcctgcgcgcagccggccaagtacgtcaactgggacggcgtccacatgacggaggccatgtacagggtcgtcgccggcatgttcttccaggacggcaggtactgccacccgccgttcagcaccttgctcgccaggcggaacaaaggcaattaagcaagtgatcatatcttttctgccattaagcaatattgatcagtgttgttgtctctttagtagctaggtgatcattgatcagcattgccattgaagtattgaactgaattctgagcagcatcagtattaagctcttcattcttgaatcattttgtgacttgtgtcagccaggcataccatgtgccattattgtcgacgacagagcattcaataagaagaaacctagagttttaggtgaagtttccacttaccagctcttggcttaatcagttttgagcatcctctcttggatactgctccatagtaataagattaagtaagctgcaccccacacattctttgagcgatatttgttcatattgtactcaagaaaaaaatttctgtttccatttacaaccatgaaggcccatgccaactggagaacaacgatgactcattttgaaggactaactaacttctatctactgaccaccaacaaccatttgcttccaaaacaaacacccatgggaagattgcagcaccagctgaaaacaaattgcaagttcgcaaccaacttcggacaaggttaaaggatagtaaagcaattaactgcagatctcagcatatcaaaagccaagactcaggattgagaggtgattgctggtactctgcgtaacccaactggcttctcagatcttccatcaatatgcccgccttgatataccttgtctgtacagttcaatcctgtacagtgctttttgaatctccaaggacctaacaaatgaggtggattcatacattagaagccactacctcaaacttgcaatgcaaccaaaaattagtaaacttccttaccacttgaacaatgcgctagacagctgaagattggcgaggtaaggttcgagagacaagcacagctgctccactcgttgcttttgctgatgccatctcttccaggcgcttccatgcgacttcttgcttcaattttgtctccttctctttggctttttcatcctcgtatttccgctgacactcatcatatacaccaacatcatgatcggagaacaatttccgaacattaagtgtgaggctttgcacagcttggttccagtgcccattagcatttctctcgagtgcagggaagatgataggtaagatcaccctactattttgtttgatcagattctcgatatgatcattgttccacaaaaacaatgctctctcagcaacctagaagtagcataagcactattagataaaatccatcaaccaatatgcgtatatcatgtttctgctgcttcaatataatttgcattaacaattccccgcaggaaaaaaaaggatgcactggtaattatgaaatattgcacaattaaacaaaatttgatgtgctaaattgtgaatcctcataatagcagggagtgattaactgattacaaagaaccagaaacaaaatcctgcacttaaaagcagatttgagatgtaagacaggggctctattgaaataaaatgcaagtataccctgtgtgttgggtcaactctcacactgttaggtttccaaactccacagcatttttggcatagtcaaacaaatagttatgggagactcatgcctgagcatgcggaattagccctacaatatttctccactcataacataacaagaaataaacaatgaaaaacaatttctatgtaacaagattcagggaagacgcataacagaactaaaactctatacaatttcaaggtaagtttccaaatgagcagtgtaagccattaataaaaaaaaatgaaaaatacaccaggactctataaatgatcactgttttagtcaatcctaactgtgagcataacagggctctaaagatgaatgctgttttagtcaaaccctactatctatttgaagggcataaggagtcagattgttttctatttcaacttacaaaactccatcataccttgggaattgataagaaaagtcacagatgaaagatcaattgcccttcaagtttttggttggtaagtaacatatgaatataaatccgtactgatagcagtgtcaatgcattgatacactaaagtagctcgtggctagactaagaaagtaaaccatgagaaaaaacactccgagctacagcttataacagccagttatgctattctttgacgtggttgagagggattttgttttccatgcctctttttcactaaggacccttggaaacccaagtccacccaaagagtaacactaattgatggttagcacataacaaacatttttcactagtttgaaatttcaaacggcacaataatatataggaaaataacttcagaaatccactcagcagcctacggtgtacacgagaacaattggtaggattagcttttgcgaaagattggctgctcaccagttcttcagtctaattatagagtgaccagcccttagcttgtattctgatttaccaccaaacagtaagtcacttaaaaaagaaagaagaaacaaagcccctacaaataaaactaacaaatatttggacaaacgaaattatcatgacagatgattggaactttgtaaatgataattcactacattctgatattctattataatgctgagctgtatagttctaacttctaagtgaatacccaacaaagggtaattaaacttaataaacactatatgtaggctagcttaacttgaacagaaacaaaatgtgcaaaatgagacggttaccatgcaggaaatgcatctgtttcagttttaacatgataaactgacgaaagaaaattacattaaagaagaaatgggagtaaaaggtggaatgaaaaatgaaggggaaagtttttaatgacagtcacgcaattaatgttacctggaagtgagaactgtttagacaatgtgcaatctgacggaaaagaggaaccatgcatttctgaaactctgcaggttgtgtagcctctaatatctcttccaactctcccaaaaacaagacctccttggagctgtttgtgattggccaatatttcaataggcccctgataacagtgtctgcgagtttgcagtctttttcaacaaattgtgtaatgcagtaagacaactgttgatggtacatcccaatgcactttggcttatgaagtggaatcagggcccggacaaggaacaacttatgctcctccttaagtggcagtgcaaacccatttatgatacttcctaaaatctccaatagttctgcaattccattgtgtttttcagtttcatagatgaactggtaaaagatgttgttgattgccttccttataaatggtcgatgtaccatgaactttccgtagacacggtgaagtatcgtcttgaggtactccctctccctagggtcctccgagtcaaagaggtcaagtaatctcaggacaaatgaatgatcgatgtatctttttgccaacttggcatcggtctctggagactgaatgaacctcaagaacagctcataaacaatctgcaagtgtgaccatgcaggatccatcacaggctcctcatcatccacatcgaaggcttcaatcttattctctctgggcggggtagtcagtgtcctgaataagtttacagaaaccatccttgtgatctcttgcataattatctccggaaacttcccattggctgaggcaatatagtcaacaagttccaacaaagtttgcctctttacttctttctcctttacactctttgttggatctgtgaagtcaaatgtggcacagcacaagttcagtttttttacgaacaggttattcttctctgtgttgggcacatccttaaagcttggcaacagctcaacagtcggttgtaccgaattcccgttcacccttgagtttgcattcccaacatgcatgccactcccataactaagcccagagcttgagataaccggtgtctggctactcaaattggaggacctttctgcacctcttggacccaatggtggattcggcactgaggggcttgacctgccaatagggtccttgtctccggatttggatggcttcttggggaaccgtccaaggatttgcttgatcatgctatcacccagcttagtcaaaaccaaccagcagtagctctcgggtgcttctgaaacaacttttctcccgactccaatgtggcaattggtattactgaaaagtaaaccctaagtccatttccatataacggggatctctcatccaaacgatgaagctttttgcagagctagtgcaccaaatggagccactctgacctgcttgaatcaaattgacaaggaaaaacaacaaatcaccctaagatcgctgaagaaaaacaacgcctagctatccacaggatcacatgacagttgatcagaggacggggctgagtaaaacgcgctctacctctccatcgccactccaaattttgttgaggaggtagtaatggggggcttcgccggctcatcgattcggcgggagggagctcacctagttggctcgctggcggtggtgctccgcggagacctggcagctcggcgacgggagctgtgcacttgacggggacctcctcatgcggcggcggcggatggcaggagctggaatacacagagacctccgagccaccggcggcgctcagagcaaaatca

SEQ ID NO: 19064 - DNA, 3399 bp, Oryza sativa
tggggttcgcttttgctcattgccatgcaaatgcaaatgctttgctaggctgtgttgttgttaagtgctgtagatgctgttgttaatctttaagccgtgcaatcaggaaaaggcccttgccacctaatgtgtgaatgatgagcctgtctcacatgttgaactaactaatactcctgctaccactaaccaatgcccatcacatgatggttatatgttttgagttaggattctctcttcttctttttttcatatatgcaatttgcaaccagtgataaagtcattagtttttgtcctcaactcgttaatttctgtacggaaaaaaatcattcgtactcataactcaagtgtcactgttctatattttggtaactcaagtgtcattgttctatatttggggatggaggtaatactaactaaatacagtgtcatggagtactattgatagaaaacatgaaggtatactgtaattttcgtttgtcaatttttaacaaagcttgacaattctagatgccattcgaagtacaggaatagttgtacatcaaaattattaaccagcagactgatcccaagggggatgatgacaacctgccagcagagatatttaagtcaacaaactgaggcatattttaggacatacaaaggaaccacctcaattagattgctcacacatatgaacagcagcagagaacccttcaaagcaaatttcagtttcaggtcacgctacgattgccaccaagtttgcaaataaaaaaggacttagatttctacctcatggttaacatcaatcttccttattcccaaaattgaggactctaacatgggcatcctaggagttcctaccactggtactcctcaaggaatcttcaagctgaggtgagaggtttccttgtttctttcattcttttcaattgatccttatctcacatggaaccattttcaaaatattagctatgtcctttagatcccacaataagctaattttgcattcttttatggcttcatctataaagtattacaatcaggagtagtacaaaacaacatacagacaatgctactttctctctgaacaattagctgttttgcaaaggaaacaatcagcatataatcatgtagtcccgcaaacatcaggcatcagcctcccttgcctacaaaatttgtacagctaaggatatctgtttgagcttgcaacatcctgctgctaaaactttattcactcagccaagctggaagcatctttcaagcgctcccgaagtatgtcacagagcttactgcaggcatccatgcagagctccaccgcctattagtggaaggaatcaaaatgttattaattcataatgttttagtatcatgtgttaatatagtggaaaagacacacacgttcgtgattttgccatcagaccactctccagtaagagttagctgcgtgatctctttgcgggctggcatgtacgccaccataaggctgccgtcttgccatgcttcctcgtcagaggttggatcaatgattatgttcttcccaaaacaggactgacaaagaagcacaggtggattgtcttcaaattcaaatgtcgagttttaagtacacacatggtaaaggagagagaatgtgaggccataccacagatactgatgtaacaaggtcatacatcatgattccagcatcagccaacgcaagactagcacaagaaataatgatgggaagatcacctgaaatcaaagaaataatgatgggaagaatggaagatcacctgaatttccagtatgaacgaaagtagttcaattcccatttgcaaggaaataaagttctgtggaataactcatgatgatatgaaggcttctctcaaaaacataagcaagacacattcttgtgtgccatcatattataccttgttcacaaagttaaagtgcaggtcataattcttcctaaaataagtaaatacggattattacagtaaaacagcctgagcatatcaaatgcagcaagatcaatattaatatgaaaaggcagagatcaaattcaaggatagtatcttactgccaccagactcaagaaccaaggcaaaaacatcaacagtggtctttggaaaagtgtgcaacatcactgcgccttccagagctttatgaagcattgcggagtactccttgttatctgttccctggaacaaagatgcaaactttcaacacttattttcaagcataaatggtccagtaacaaatttctccaaagagacaatggagagctaataaagcagcagacctgcccacgtataggagtggcaaatgttgtgtagctcacattgcaattgagtctaccagtatcactgtacaacattgctttcttgctttctctcggtccaaacctgagaaagtaataatcaaataaacatgaccaagcaatcggagcaataagacaatttcaacaggaatatacaatctgataagttttgactgacaagatacatgaaactgatgtaatatgaagctaggaagtacatgttaaaggtcagcctcaaggccttcaaactatcattgcgattgcctttttttttttgggttgccccttgagaaagggtaagccatagagacaaaaccctcaaaagtcataagagcacaaatttataaaatgctgataaatgttagcatgctaaactgatagatgtataaaacatactgatacatgaatccaagctgattatgaactgttctcaagagcttagtaacttttaagtgtatttcaagttcaaagaaagaagtttgaagtgtaaacatatttcagttgaccttaacttgctaatatttggtcccacaaatgccaaaatctttaaaaattcaaatttggaatgatgtgtaggaggatagattgggaatatcataatggaaactgttaattatgttttagtagcaagttgagtttatgagacacctttcacattgggatctaatgaaagatatgttctttaacacttggaaactaaaccataacgtacttacatacataacgtgattgtataaaaatgcaactatacttacactgacacaatgacctttgtcttcccaaattctgcataagcagatcctgatgcagcggttgttggtcctgtttgcataactgcaaacaaatcaaatttattattggctctgagcaacatatgagtcccactagtttcaagcatcaaattccagtgatcatagaacaatttgcagtaccattgaggttaaaattaatacttacaaggaagaaagaaatagaggtagtgaaacacagtttcaggtaatatatcaaagaaggttctgcaatcatgtaacatggatcataatattcatacatgaaaaaaattcgttcttccttcaaggttggtagatgcatactgtaaaatcctatataaattcaagtttttt

SEQ ID NO: 19065 - DNA, 1293 bp, Oryza sativa
ccatcgactgattccgagatgctgcagccgataatgattctaagccgatgacgtctttgccgattaccaaatttcactgttaacagcgaggcgacatctatatcaaatttttacaaagcctgaatagttagttttactggttttggtttatttataggtgttgttaaagtgaggtttgcattaagagaatgactttagaccaacatcataatgtcctccaaagtccaaaggggaaatggtaaagggaaatagggaaaaaaaagagtaatatatgaaaatggggaaaaataggaaatttgtagcaaacaatagatggaccagacgggccgtgccgtgccggcccacggggggaggcgtcggaccaagcacggcccacaggccagcgtgccttgccatgactgggccggatacagtaccgtcgtggtcggcccggcccagcttagcacggtccatttagcctacaatacccctagccagttgccactcccgtcccaaacccttccccgaatcactccaccgaaagcggcgctgctgaggaaggccgacgcggccacggccacgctctccgccgccgccaccgccaccgccaccgtctcgtcgctgcatagttcgccggcctccagtctctctcgaatctagagacgcacgccgagctcagagacccgatcctgctaaggtttggttggtagctcgagcagccgacggcgacgacgcacacccagttcccggcgatgtcggcggctgccaccgctgggacctactctccggcttctgccgcgggggaaaagcgtcgggagaggaaggaggagctgcggcgccacctcgccgaggacgccgactggccccgcgccgacggccgctccttccacgactgccgtcctgcatgtaaatcctcctcctccaccttctcaacctgctccgatttctctgtttgctctgatttagtgccgaccctcatctccatggaacgcccccattcgtgctcaggggtccgattaagcaacattttctgccatcgcctggtctgcgctttaggtgctcgacgttatgcctgagtagtacacacatgtcttacatacaacggtagttccatgtcctcagtggcagagcaaggatgctgatgatggtgttgtggggcgaaacattcccactgtcaaatgttttcttttactgttcaagtcatcgtcctactgtgaatataccacgccttagactcttaggcactgacgtaatcgaaggaaaatagaacgacattgcgctctctatttgagcagggtattgaggaagaccttt

SEQ ID NO: 19066 - DNA, 1920 bp, Oryza sativa
aagtcttataatatgaaacggaggaagtacttggtttcaatagttcgtagttataagttttactaccaaaatacttaatctttctcgtcaacatgtagattttgaagggaaaactgatgataaaatcaagaccatggaagtggtggaagaattaagatctaaaagggctgacatgcaggtattattttgaaagcttgaatatatgtgctctcgattctcatagtttgtgtataccagcacatgtaactaatagtaaataaagttttaatcctactggcatttttcttctttgttgcaggctacccttctgcttgatgcctttaacaaggacagagcttcattacctcagcctactccaacacctcaaatggcatcagtaccagcacctgctccccctgatgctcgcactcaagaaatgatcaacgaaaagataaagaaagctgaagagcttggtatgaaaagaaccgctctactttattactaagtagtatgcatgcgggttgttttcttctgtgaggttactggctcagttacaagggccaagatatagtttatttttgtagtttatctcagtttcactcactcagttcacagcacatacagtttctagtagcaatatgaactatttgctagtcaggcagcagtgctttttttttcccttttatacctatcaactccaatcttttcaagctaagatgctatttttgcagtgtactccatccgtcccactcactaaggcgcacacgcattttaagattcaaatctttaaatatttgaccaataaatagtttattataaattaaagtttatttgattaaagtaataattggactatcatttaaatttactttcatatgattatgattttgttgttacaaacattatagtatatgagaaatttaaagtcaaagatttgtcttgaagactatgccaagtttgaccgcgccttagtgagtgggatggagggagcatttgcattggttatggtgctagtagttttttaatgacataaagaagtttatgtgatataatcttgctcatccttttgttaggtgaacaagggatggtagatgaagcacagaaagttatggaagaagcagaggctttgaaaaaggtagatatcgtcatgtacactgactatattgtgtccatcctttcacagcctagtactgggttaatttctagcctttcaattgctggcagcataaatgataactcttatttttttaggacgttggcattttgtctatttttctgtggttgtgtagatcatgactaatgccttccattattgttgctgttgttctatgaccagttggcagcacggagggaaccaacttcggatcctactaaatatactgctgctgatgttcgaattgtgagtttaatcctaacatggttaattttatttgattacttatttttgttgtattaatttacacagtgctatcactagctttgccttctttattgaagaccagtagattctgcaatgcttattgtcgccttagacacacttggtttgctactagttattcaatgatattttttgcccaacacttgggttgctaaagagctttttttttttctataagattttactctgtactgggatgctgataaaaaatatgcatttcctggacatgtatttaaggacatttttataaaattctgtacattttgatagagtctgctattaagtgaaaactcatattttatgcattaagaaatttatgcttatcatgcgagctattgttgctctcaagggggtatgtatcattgtctggccatttgcacatatgttactagaaaagtgataagccgattattctataatcttggagtacatcttttgcaacaccatccccatagttcagttctttctaaaaattaccatgtccattcatcatatttagatgc

SEQ ID NO: 19067 - DNA, 1229 bp, Oryza sativa
aggaaatttctatgtcagttctatttgttgtgtgtatgagacgaggatggtctgtgccgcggtccttctgtgtcttggcttgatcaagggctcgtgcccaagtcctagtcctcaaatggctcgggtcggggctagtgcctggggagatccacatgtcgagactggccaggccgggaacgtggtgaccgagggttatgggtgacccgattgtgggtttttgccgattcccccccggagttcaccacgccccggggcacggctcggttctgggccccgtttggcgattttagctgaccgaaccgagcccccgagggcaaggttgagcacgagtgacctatttcaagtcaagattcttcaaaaaggaaacaaaagcacagacacaacctttaagaaatcgaaaatgcttttgttgaaatacggaagagaaaaaagataagcccccggccaaccctgcacgcccgggggggtgcggggttggcccgagcccgaaacctgacacccgacccccactaggggtagaagcgacgaaggtgtttgatgttccacgggttaggcagctctgtgccgtcgcccgtggccagccgaacggagcccggccgggggacgccgatcactcgatacggaccctcccacattggtgagagtttgctcagtccagcacgcgtttggacgcggcgtaggacgaggtcgtcgacgcagagtgatcgggcccggacgtggcgctgatggtagcgccgcaggctctgctggtagcgcgcggctcggagggccgcgcgccgccttcgctcttccaagtagtcgaggtcaaggagcgccggccttctttctgtcgctcgcagacctcccctttcgggtggccagcgaaacgccctcgacggcgaggacatgaccctcgtcgtcggaatgggccaacctcttcttcctcctcctgtcccgccgccctgtctgagcagcggatccgggggcggccgaagctgccactccgggaccggaggggttccaggtccatgcctcctccttacgagccactcgatccgcaagctgaaaaagctccgcggtagtctggggctctttggaggcaatcttttcgagcatgcggttgtgccgcacaccccccctgaacgcgtaaatcaccgcgtgtgcagggatgcatggtatggtgttgcggactgacagaaccgctgaatatacgagcgaagtgactcatcatcccttcgttgaccgcgtgt

SEQ ID NO: 19068 - DNA, 1767 bp, Oryza sativa
acgctcccatcatacttctcggtgatggtgggccggaaccttgggggccaacggacattccgaagactcgccacaaaggctctacagccgacaccaccagccgggggcacggagggctgatcctcacgtccatgtcgaggtgacactctggacgaggaggcgccctccgttgcacggggagtacgccggctattacgctcgatgttgaggcgggcatccggctccccatgctgatcctcccgagtcgacggtgtcgacgagggagtggcagccgaatgacgtgcagccgccgccgctcgccgcgccctccgccttgatgacacggagccggtggtagcggcgccggaggtcttggtggtgacggaccgtccaccagcacccaggcgttgctgcgccgtcatgaccaagttggccacgtcgtccagccatcgctgggctggagactccgggtcagggacgacaggcgggtgtcgtaggagcgcgccagcagcctgaagcgcgccctgaggcgtgctgccgtcgccgtagacgaggaggcgacgctccccatctcgccgttctcctgcaccacccgcgactggtgatgctgcggatttctcgactctctcgagcgcctccccctgcttgggactttggcgtggaggaggtgggggagtgcgagctcgacggcgcgggtttggctccccgtcatcgccgctcacactcggagagagattgtgcgcctttgcttgctcggccattaggctgaacaagggaaacttggcgcacacggaagagtatgagagctcagaaaacacacgctgagccccctacctggcgcgccagatgacggagctcgtggctcctcaccgggagaccgcgcaggcccccctttgccggttcggccgggggcttagggtgcgatctcaagctctctctgtatgtggaaagattactcgccggcaagacacacgagacacggcgatgtatacaggttcgggccgctgcgaggcgtaataccctactcctgtgtttttgtggatttgtgtatggacaagttacaaaggatcaacttcctttcccctcagccttccaaaagggaaaagtcccccctctaaatgggcaaggtcctccttttatatctcaaggggataccacatgcacctttctctttccaaactggactgttctttttctctttaatgggcggagatcggtacggtttccatccgggagcccttctgatgggacagcccacacctacccccacctcccccgaagacagagatgacgcgggaccgtggctgtctgtcgatgacgcgatcagtgccagaccggtcattcttgtccaccacgcgtcagcttaacaacgtgcatgtttgcccttcttcgtgtaacaccttgcctgtaatggttaggatgaagcctggtataaatctgaccagggctaacgtgccatctctaagagataacacgctagctccggcttgagacgagttgccttgaggctttcgtcttgacgggatggggcgaggcgtgcgtcagaccgccagtcgccacctaacccttgatctgaccggtctgtgactggtcacagaccggataaaagagcgtgctgtactgcgttgcacgcagcgtgacacgcttgaccagactgcaataaatgctgttaggtgagcacagctgtgctcacttatcccatatatgtggcgcagacttctttaaggggtcggggtgccccggccctcggggccggggcaagcgcaaccgaccccccctgggggaaat

SEQ ID NO: 19069 - DNA, 3804 bp, Oryza sativa
gcactggcgacgctgtcgtcgccgagccacatctcatactcgagcatgttgaggcccaggtcgaagtcattcttgttctcgagcttgagatgcagcgtggcggtggtctcctcgaaggagaacctgtggaacttgatcttctcgacgtcgacgtcgggcttgtaggggatggggatctcgccggacttctcgagggggagcttgatcctgccgatgatggggacgtcgatgaggaggacgaccctgacgaggtaggggatgatgctcccgggcttgatgtcgttgtaggtgctcttgatgtcgtcgtagatgagtgagatggggatcttgacggtctcctcgccatgggcgtggattgtgccggcgtccgggatgaggccggagacgagcttgcggccgtcgctctcgatgaggtagtcgatgtcgacgagcgggatagggaccgggttagggttcttgatgagcacgtcgacgacgaggtcggcgcggtggaggctgatgtgcgggatgtggacgccggagacgtcggcagtgggcttgccgaagccgacggccccctcgatcttctccccgatgtcgtggatgaagtccttcaccttctccatgaatcccccgcctccttccttcttttcgccgccgtcgtcgtcccggcggtccttcccgccgccacgctccgtcaccgtggggttctccgacgaagacgacatgctcgctaacttcaggtagcaacaacaacaagcgatcgaatcaagatctcacagcaagatcaaatcaagcaaacagatcgcacgccattgctaactccacaagaatcaccaaagacttgatcacaagaaagattgctttcttttctctttcctattctacacggctaggctacacacggcaacaagatctgaggcacaaatatcctccaaaacgaagcgagagcaagtagaaagaaacatagattgattttttcttactttacctgtgggttgatgcggagatctggacgaagcgagtggagatcgcgagcggaatggagaaatttagagagagaagaagaagaagcacgcggagagatgagcagagcagagcacgagcttatcgtggagcaagtacggcgtggggcccacttgcagtgacacgaacggactgccagctcagctatactgtcggctggacacgaagtcagaggcaaagcgagaatttttttcatttttaaatttttattttttaatatttaaaaaatattataccatccaaaatatttacataaattacccctgacacctaagggtgagtttgagaggaggggaaaagagaagattgggaagatacgtaaaacgaggtgagctattagtacatgattaattgagtataaactattttaaactttaaaaatagattaatatgattttttaaagcaactttcatatagaaaatttttgcaaaaaacacaccgttagtagttcgagaagcgtgcgtgcgaaaaatgaaacaaactaactcacaaactcctcctgccgaacgctccctaagtggagggtggcaaggtgtgcgtattttgcaccgagatataatgcaattttcaccttgtaaaaaatacagttttctagttttttttatcttgtccgtcctcacatcaccttgccgccctcgggatctacttctgtaaatgttttcgccgtacaatatttctgtaaatattaaaaaataaaaatttaaaaatgaaaaaacttaggcaaagcgaagtggctggaacctttacctgggccaatcaaaagccggtccatttggcccactaaccccggcccaacaaaaaccggtttaatgggcctccatctaaaaatcctatccttatctatccactggacacgaaggcaacacacctcgcctacctccactctctcgcgctcgctctccaatgccgccaccaatggcgctctccatctcctccaccgccgcggcgaccgctctcctcccgactctcccgccctcgcgctcgcgcctgcgcgtcgcgccgcgcagggcggcggctcgggtggcgcgcgtggtgtcggccggatacgccgcggggttctacggcggggcggcggctgcggccggtggcgagaacgacgaggtgggggatgaggagggttcgtcctcggggttcggtgctgggctagggataggaggcggtgggcttgggatgtcggccgcggaggcggcgctggcgctggaggagcgggagatgccgccgtgcccgcccgggcttcgccagtacgagaccatggtcgtgctccgccccgacatgtccgaggaggagcgcctcgccctcatacagcgttacgaggaggtaaaaatcaaaattactagtaaataattagctgcactgactaggcgccaatgcatttgctatctgctgcagtagacatgaatttccgaggaagatttgtagtggccaatgcatgagaattttatcttttgccagtttatggtaaatcgggctgaatttatggcacactggtaaaactcaaaatcactactagtggtaaataattagctgcattgactagacgccaatgcattttggatttgggctatgctgcagacctgctcctgcagttgacatgaatttctaggaaggtttgtactggccaatgcatgaacttgtcatcttttcccagtttatggtaaaccaggatgagttaatggcatacttgtttcttattaaaaatgctgtcatttggctcgttctgtcattaacattgcttaaaatcatatatcagtcattgtaggtgaagctgaagcaaatcattttgttgcaaatgtatactttctggtcaacagctacagccccatattatttgcgtatgtcatagtggagatacaggaagcataaaattgtttctgctgtagaacatacgtttactacagaacctaccaaaaaaatagttttgttattatatatccatcattccatcctgcgcgcacaatctcctgcattgtttagtaggagtagtagcaatcaccagttaacacgcattcaagtttaccttggtctttttttttttttgtcccataattgtcttggttgatgatcaatcaagcctcttgcccattctgtaaccttaaatttgatggtatcctgaagtgtgacttcactccataagatgttcacttgctacaaacctatctgcaatttgcttactgagttacttatggtggtttttcgcatgtcttgcagctccttgttgcgggtggcgccatgtatgtggaagtcttcaaccgaggagtcatcccactggcatacagcatcaggaagaggaacagcaggactggtttgccatccacctactacgacggaatctacctccttgtgacatacttcaccaagcctgaatccctggatgctctgcaaatgaggctcaatgctgacgacgatgtcatccgctcaaccagtttcaaggtccgcaagcggaaagccttttaagatcagtttcaccacctggactcaggtttccatgttttggggaatatgtttatatcatacaagaatcctactgccatgggaggagattggtttttcgctgcaatcgttgagaaaaaatgtcgccctttctgttgataatttagaagaaatttgtcttccttttttttcgttatagcactgctctgatcttacctggtactcctacacgttaagggatattgaacgaacacttttgtggagcatggcctgctggggcctctggaacaagttatgctgttaacaaaatcagggctcatttcctgtacgccatggcatttcatttataggctgccttacccggcatt

SEQ ID NO: 19070 - DNA, 959 bp, Oryza sativa
tatccatgctccagagttcttcagtaaaagctcaacaaacacaatatctcggaggaccacaagtatcatgtagaaaaaccagaatactccaaaatcagccatcatggagcaccagattcagtatctatcgtggcgcctgaaaataacaactgtctaatgttagctcctagtgatataaaggtttccatatcaaaagcagataatttcattgtgtttctttgtcattatactgtcaaaagtttatggtcggaataaatcgctatacaagaaaggcagagagaagtgagcaaagaaaccattgaaccatacctgcgctccctggatcgagaacgttcccttctccttgaatcatggccacgcgaacggtcataatctctatcccgatcgcgatcatggcggcggtccctatcgtggcgcctatcccgatcacgatcatggtctcttctgctttctcgaggttcaactctgtcctttctttctgaatctctatccctggatgcctgaccattgcggtccttgctgtattctcttgatctgatgagcacagcatgtactttcagattatgctgacactacatgaaaatgaaactaggatggaaaagcacataccgcctgtcatcttcaggtgccttccttcttttacttctctcctcctggaaggcggcatagaatattttataatgataaaatcatgatatcaaggctccaatttgcataggagggaaacagataaaggaaaaaaagtaacatatatataaaaaaaaggtgcaagagatacattacggttaaattgctccagcaattaatttacaaacttagtacttacagtaaaagatggcaaaaggagtgcactttcagagtaacttaaccggtactatttatcaccatctctacaaaatatggatcacccagcagaaaacaatctccagcttctgatcaacataatactaagcagatta

SEQ ID NO: 19071 - DNA, 1465 bp, Oryza sativa
ggcggcggccgggtcgtcctcgccgtcaagcgcctcaaccagcgcagcctgcaggtcagtacagtatcagttagctgtactcccatctctcctccctctgatttgcatttgctcctctcgaaaattcgccatggtgcatttgattttggctagatttgtcaaaacgtaccgaatttgttcatcaggacgattgaatggcaaaagaagaacttgaagattttgtcttttcagcttgggcactgaccacatggctgcatgttttttcagagtttcaaaaaagaacttcgcttttactttctctagactacattcaagactcgtagcgtacaatcttcacagaagattcagaaagacggcatgcacttaaatatatatttttcggattcacacattttggtatgctaacactacagatttactactgctgaaaatgttcttcaaccagcaatagttaccaacaagcgatcctgatttggatttggatcgagacctaaaatcaaactcaggatattgttcttttgcaccgaaatcatatgaaattcttagcctcgtgacaattccaacaaatagataaacacatcccgtaggacaaggacacccacacatgtcaacttcaaccacagatcacacaccaaaccacgtgaacaatggtccggacagcatcccaagtcaacctactaaattccagaattcagaatcacgttataaacaacgtaccaagcttaatcacgccaaaacttgatgccagattgccagtgcataggacaaaatccatgcaattttcaattgttaaatcaaagattgcatttttttttaaatatcaacagattgaaagttatgtttttctttttttttctgatttcaggggcacaagcaatggctggctgaggtccaattcctaggtgttcttgagcacccgaatctagtgaggcttgttggctattgtgcagtggattcagaaacaagcaagcacaggctgctggtctacgagttcatgcccaacaagagcctagatgatcatctgttcaaccgagctcatcctcccctctcgtggagattgaggctgcagatcatgatcggcgccgcgcggggcctagactacctccatgaaggcctgcaagaagttcaggtgccctccaaagcattgtcctcctctctgaatccataaaactcaaaatatagatgcctcacaggatacattgtctgaattctgaaactctgaactgaaccattagtttagcacctgcggtagctagtagtaagccttgtcctatctgaattctttaatgttcaagtatgatatgatcaatctggcatcttcccaatatctgaattttgaactctgaaactctgagctggaccattagtttagcacctgtagcagctagtagtagcattgtcctatctgaattctttattgttcaagaatgatatgatcaatctggtatctgtcccaatatctgaa

SEQ ID NO: 19072 - DNA, 1119 bp, Oryza sativa
aatatgcagctcacatggtgtccgctgagtgatgtcatcaacgggacaggtcgattcgtcctgtgtttgcatggcgtccatgctctgtgatcctacctgccccgttgaggcgcagctgctacggtttcctgacgggctcaccattgcaggaggaatggtcggctggggatcatgggaccgatgtgcggccatgcgttcatcaaccttccttgccacctcctcttgcatgttgagttcgtagctcgatacccggaactctaggtctgcaatcttcgcctcggtatctctcttgctcctcatccgactcctgtacgtgtggatgtcctccttgaaaccaatcttccaaggaatcacccctttccctcgagttcgtcctggatgctctggagtctgcagggcgagtgtcagctcgtccctatctctgtctggtcggaacgtgccctgagaggaggcttccactgcatctgttagtcgtcgcgcagcctcttgtatctgatagccgaagaccagtgagccatcagctgggttgagcgttccaccgtgagcatagtaccagaacttcgatcgttccggccaattggctgttgccggttcgatacccctctcaatcaagctagcctccatctgctcccacttcggcatcgcgacgctatagcctcctgaccccaagtggtgatggtacttcttcttggcggcattttctttgtttctttccatcatcgccttcccttgttcacctgtcttatatgcaacgaactcgtcccagtgatcccttagctttgggaatgtgtcgaagttcggtgtctgccccttcagtatatacttctggtacagatctcccttgaagctctgaaactgttctgccattttcttcagagtccaccttttcactttgtcctctgtacccgcaggaagggtgaatgtctcaagcattgtggtccacagcatctctttctccgaatctgggacaaagctctcatgatctccgcgtgcccttgttcttcgccactacaccgtactgacaggcacgttatcccgcacaacccaaccgctgtgacgtacatagttcttggcggcttcggccggggcactaggacgtccatcttcttccacttctgt

SEQ ID NO: 19073 - DNA, 558 bp, Oryza sativa
gtgccttccaagactcggaatcgcaacagttggattcaggacgaaccgtttagggatagagaaaaattcacaaggatttcatacgaatacaaacatttgcgccatttttaacggataataaaaaggcaacggcccagagttgtgacgccacgctgacaaccaaatgcaagtaggttggatggatcaatcgaacgtaacacattaagcagtttatgcttgactgaaagataaatgatgcataggcatagcgatgtgtatgtaacaacaatgcactagctgatggaaaaacgaaacaaaagggtgacagaccagtggcttcgttcttattgatcatacaacatgtcgattgcacgttatcaactggaaaaagggaaattaagttgtttgcaccctggaggtgctaagttctgctcctagatgcagcagggctcctgttcatcagtcttcttttccatagttgtagataatctcgatctgcaggagtcatataatcaccttataaactgattgcgacactttgatgcacgaaacacaaaatcaaaggaaaacaatgtgaca

SEQ ID NO: 19074 - DNA, 1550 bp, Oryza sativa
cgtagccgttgccgtgggcggcgaggtggaagccgggcgggatgaggctggagacgtcgtagcgggagccgatcttcatcaccaccttgccgtcgatctcggcgacgtaggcgtcggcgtcgtgcagcatgatcttgagcgagctcgtcgccgtcacgccgttccgctgcctcaccgccaccagcgccgcgatctgctcctttaacccccaatcgaagaaatggtcgtagaactacatgtacatatatacaggcacattattgtgcaattttagatgactgatgagtgtatatatatgtacacacgtgcattatgcaagtttagtagacaactgataaataagggcaaaaaagtattagacggctaataaatagcaaaaaattgatgaagtattcaatattaaactttgactacttccttacttggaaaaaattacaaataattataaatatgttttactactgaagtctgtagggtcacaaatatagctattaccaaagtgtgtttcttaaaaaaatatttatagtcaactgaaatgacaataatcaattaatagtgcatgttattcgagagtcaattaaccaaataatcaattaatttatgtaaatgtataacatataaatcatgcttaaagtactttgagtgataaaacaattcataacaaaataaattataattacattattttttaaataagacaatggccaaatatgtgataaaaaatcaacgacgtcatctatttaaaaacagaggtagcagtagtaggagtacttacgatgcatgggttgccgggatgggtgaggatgtaggcgtagccctgcatgaccttgtcggaggggaatggccacatctgttgcgtcgagccagtgtcgtggttgtcgacgaaggtgacagcctttgccggccaccacccgatcacccccggtgccttcccctgctggtcgatcagccgccacagctccccctccaccgccgtgttcatgatccccttcgtcgtgaagtcgaacaccatccccgccgacgccgtcccacccaccctgtccacccagtccaccaacgcctgccggtgtgcgtcctgattgtactccggcttcccgtctccgccgtacgccatcgagtcccacagctccgccaccgccaaccccaccggcgttgtcccctcaatgtacaccttggccacctccggcgagtacccccttgcgaagtcgagccgccacgcatcgaagccaacctcgtcagacttgagccagaggagccagtcggtgagctcccgctggacgacaccattgaggtggtcaatgtcgggggcagcggcgaagtcggcgccggtgtcgaggttgcctgtgccgtcggagaactgggtatcatcgcggcagatcatgtgggggccccagtcgaggcggccgtcaggtgtgccgccctcaaagatgcagtagatgccgcggctgtccttgtagtcggcgcagcggtggttgatcaccacgtcagcgatcgcctgaatgcccttgccgtggagcgcgctgatcaacgacttcaactccatcgacgtg

SEQ ID NO: 19075 - DNA, 1017 bp, Oryza sativa
catgatttttgcacatccagtttaaatgtttagaaatgatatgttttcgtacccacaggaagtacagtagtagtttttttttattgtttttagaaaataaaaacatgataataaagtggcatattagttacttcggaaagtgaaaaaaaaacatatttttttcctggaaggagcttaattactagtactcattattacactaattatatatcattaatctttttttctaactgctgacagcttacctttgtattgcatctgtataagattagaatggggttgcaagattgattgacccttacgcatgtcagtgtgatattatctagccaaaaattcctcaactaaatcagtgaaacatctcattccaacccaaatgaaataaaggccaaagtgacaatcattatccacacttcgcaatcagggtagcttagttagcgtgctgtccactccacgcttgcaggatcccaaatttcgccaactccaaaatgttcagagtttagtttcagacaaggaggagcagcaggagaaaccgaccttgcgtggagacggagtgcgacggcggcggcagccagacgtgcgtgacgccggcggcgacgatgtcgtcgaccttccccatcagcaggttgtaccaccctccgctctgcctccacgactcccagttgaacccctgaagagaacgcaacagcttgttcagaaactgaactgaaatcggtcacaacttcagttcagtccgtggctggctgcgtacctggaagagaatcttgtcgccggaagccaagccgagaaggaggaggaggaggatcatggagaggcgtcgtccggtcgccatggcagcagccaggctagctctatagctcgatctctctccttgcacagaagcagggacactctgctctgaactctgaattgatgaattcagaagatgattacaggtgttttgatgattgcagaagatggctacgcgtgtagggtatttataggacgcagctgcggcagggcagaattgatgaattcttt

SEQ ID NO: 19076 - DNA, 957 bp, Oryza sativa
atataactgcctacagagcctatctatgtgctagccaggtgtttcaggaagtagtggattagacactcccccgtttgtctactcttcttcaggattaaaaaagaaccagatctaggttttactttggacgtttgcggtaaggatacatgatatcatccatggtgtctttaatgtaggccccaactttatttaagttccttgctacaccattagccacaagtccagcattcctctgaaatctgcaggttcatcgggaaatccgtcattcattaaattttgatgccgatcttaagggatctaaacataatctaaaacagaagaggaactcacttggttaagaaatcatctcctctctgtgcaggcttatatcgccgtggttggggagctgcagtgttatcaagataagttaagtcttcaagaatagaaatgaaatgtagatactttggacagttactcataacaaactcaaagagattcatattaatgcaatttccgaagtgaccagattgtttcaccaataaagtcaggaccagtctgagatccagtaactccgattaatgagaaattggtcatacaagtagtggccaggaaacatttctacacaaccgtgataaaagtacagtgtgctaccatgtgtgcaggttggtcacaaagggtcaacaagtaagggcaaaattggtctatcatgataacatttggcggtttcaattttacacaggctcaccaaaaataatagggataatcaaggaggcaacattcgcactcgaccattgttgtgcactaacaatcctcattcaaagttttttctggagggaacaggcaggagctctgccatttcattgataggagggaaacatcagttacaacgctaaaaaaaaaggcatactgtgtagaattcaggtatatgtataataggtccaatatctaaaccaactagatgtgacaacaggcaaggct

SEQ ID NO: 19077 - DNA, 1136 bp, Oryza sativa
  unsure (1)..(1136): unsure at all n locations
tggatgatgccctggacgcggcggaagtggtcgacgccggaggggatggtgatggcgcccttctgctcgaacccgaactcctcctcggcctccttgaggagccccacgaacagcgggtgcttcagataacccaccggcaccacgaacctctctccctccgctcctcctccgccgccgcccacgccgccgggccccaccaccctcaccgccatgcaccccttcggcggcatccctccccccgccgacgagccccccgccgacgccgatgactgctgcctcttcagcaagtgcacacccatccttctacctatatagatatgactatatctaatcgaagaaacgctagcttggtcgatcgatctctagctccgacgacgagcaagaacgcgccgccgttagagcggcgggatctccatggcggccggtgaggtggcctcgctagcttgatggtttcttggctcgaggaggagttggtggaggaggagagcgtagggtgcgcgtgtatatgaggaggccggtgactgcgcccttttgtttctatctgtgaattttttttttactcttttttactatttatgatttattgatttcctttttcttctactgtttcttttcctgcagctgctgattttcctggtgagaaataaatgtcatatctctccccataaatattactccaccatttcaggagtgatattaattaatccagaaataattatttatcttagctttctctttgggatgtttaaaagaaatgtgttttttttttgtgtgtagctagctgttggagatagagcaaggcactaactctacagctttgtattagctacagcggagagggcatctgatccctccgtagagtgtagctggccagtatgccctggtgttgcntaggctttgtgtgcttacaagtgtcagtgagaacaccatgtgtttgagatttgagaatgtggtaccatacatattagaattagttagaatccgtttaccatgttgtatattaactctattattcaaagcaaaatatttatatctttttttactgtaggtaatatctatatcttatagcttcgttaattcgaagtaattcatacatttattatacccacctacacctacctcggcctggtagtaac

SEQ ID NO: 19078 - DNA, 1160 bp, Oryza sativa
tttagtatttttcacattatatatatttatatagatttattaacatcaagatgatttctaaaaaaaacattaagatgaatatggaaaatgctaaaatgacttacattgtgaaacagggaaagtaataacaatgataatatcatagtattaatgagattttagaaagctaaaccgatagtatatactttacgcatctgacaagcatatgcagtcctatttatagtaggagaacaatgacttttgtttgtgatcaaaggacacgtgcggtttttccattgacggtacctgcattaaggtcaaaattaagcgtgtttcggttttgaagaagccaaatccaattttcaactatgcacacataactaccatttcgttcggagactaaacccagcaatttagcatacgtggtctaatcctaccatcgacaataataatataaattaataataacagaggaaaaacattcagcaacagtattactcacagcaagactttttaatcttgctgtatctgtaacagtacacccttcatccaaaaaaaaataatttcaacaacaaatctaaatatagactatgtgtagatttataataaaaaaattgattcttttaattttgaatggaaggagtatgcagtagtagtaaaaatatctcctagagaatttttattctatgagaacaaattatatattaagctcttttttttgcctatgaacacacgcacgcaaaccctacccctatgagcatcttcaaagactgggccggactgggccggcaaatcctggagagattgacgaagtaaaccctacccctatgagcatcttcaaagactaggctggactgggccggcaaatcctggagagattgacgaagttaccacaggcgcctagctgttgacgggtacgtcgcctaccactgaaagcacaacgccgataaatcctggaaaattcgctcccatggggagtcgaacccaggaccttaggtgctactgaggctcttgtaaccactaggctacaggccgatattaagcttttgaaacaaaaaaattggttactattaatattttgaagtttctaaatgatggtcaagaagttaatcgacttaatttaccctattcattttcatattacaagttgttttgatttttctaatcaagtttgtaaaaaa

SEQ ID NO: 19079 - DNA, 611 bp, Oryza sativa
aaatccaattaacagaatcagcggctatgctggcacaagtggattcatgcatgaggtttgccgttcgcaaggtcaactggtgtagacaaacattacccaaaggaagtaataatgaactaattaatggtggtagtaatactaaaaaaaatcagcagtgaacacagtaagcaacaagaaggaatgaatactcacatctgcttttcgcccatctttctcattgttcaacagctccctgatagggtagaatgctgcttgcttgcacagttctagaatgtctgatccagtaaatccctcgcatagaccggcgatgtaatcgtaattaatgttaggctcgacattttctcccttcaatacaaccctaagtatcttgcttctttcactctgaacaggaatcccaatttcaaatatctgagtaaagcgcctgaggatagcctcatctagctcagagggtctgttagtagcagcaaggaccataacacgggcattttctgcaaagccatataaataaatcataagatgttgcacaggagtaaccaggaaacttgtttgctagttacaaaataagttgctccctatgtttgaagagactatgtctggcaccctaaataata

SEQ ID NO: 19080 - DNA, 584 bp, Oryza sativa
acaaccaccgggtttgccagccactccggatggataacctagcggatgaagccagcctccaggagccgcgccacctcctctcggatgaaggcttgccgctccggggcttgacgtcgcactttttgccggatgggttgcgcgtccggccgcacggcgaggcgatgctcgatcacctccctggttaccccgggcatgtccgacggcttctatgtgaagacgtcggagtttgcccgcaggaaggagacgagcgcgctttcctatttggcgtccagggtcccgccaattttggcggtcttggacggatcatcgccaagggggatctccttgacgggcacctcatcagccaaggtgaggcgcttcttggaagcgcgggacgcggaggccaccggggcctgcggctccatggccaccgccaggttgttggcgtgctgctccgcgcaggcgagggcgaccttgacatcgccaaagacggtgatggggccactaaggcccggcatcttcatctggagataggcatagtgggtggcggccatgaacttcagcaacgcaggcctgcccaggaccgcgttgtagagcagattgag

SEQ ID NO: 19081 - DNA, 4928 bp, Oryza sativa
tgcacgattatactcatagtagattagtagattaggggattggattacacgattcaatcagaagggttattgatgccattggcaaaagagtattgtagttgtcgcaaacacgtgatattaggtggttttttttttgccccttatttgggttaagatattggtaccttgaagctgcctcttgatgaggcatcatgggcaatgtgtctgatgtgtggcgagggatttttttcccctttggatatggctcacatgagtgctgactatttacaaaaagcaaaaggaaaagaggcaaagaactacctttcccttcagagagtaaacaaaattaatttggaataaagatatgacattctctttctctttctctttttcaatccctaccgtgtctaagggtcagatacccatgttgtaccaaaaaaggattaagtacacaaacagctgctgcaaaacttcttcacaacttcttctatttccaattgtgaatatctcttgataacaatggaagaaataatggttaattttttcaagcaattcttttcttttgtctccaaagattcaaatcacattgctaactttgtgatgccatgccaaattccattgtaatatttaaacaccaaattcacactcatgtttactgcatttggtctagaagaaatacacaacagctagtataagagaatacctaaatgtggtcccattcttttttggaaaatgacgaataaagcaacatatttaaacaagactcgtataatatgtttgctaactctctttatggtttcttgtctactgccaaatactatatttatttccaattttccactgtagtgttctgaccactgtctccttttttttttcttgcagggagtaagagtttcttctttgcatgagagggtacttctagaaggatgcataggttaattttctaagattttttttttcagcctatgtttcatgatggcatgaaacagtggagttgctgtaagcaaaaaagccatgattttagcctatttttggctattcctgggtaaggatccctctctagtatttccttttcacagcatgcacccacaacataagtcaactatgtgctatcaacctgaacattaccatctgggctggcctgttgtgtattttagcaaaaccaagcatgaatgcatgaatcgtatgctgtactgctgtgtaggtgcaaaactggaaagcacacaactgagaaaccaatcacaaaagcagttcctactaaaccatcaaaggcagttccagtccagacttcgaagcagagtgtgggagctgacacttgctcaaggtgccgtcaaggtttcttttgctctgaccatggtgagtttctgtctataagcataatgcttggatacaactgattgatcccctatttgggtgtaacagctgattgtttcgttattattttaacgactgacatccctatgcatttttatgtgttgatagaataaatcgtaacttttaatttaacagattatgcactgctattttttcaggatcacaacccaaggcacaaataccaaccgctaccagtgatactaacatggtacctgttgagaagcctgcagttccaccaccaaagaaaaaaattgatctgaatgagcctagggtttgtaagaacaaaggatgtggtaaaacctacaaggagaaggataatcatgatgaagcatgcgattaccatccaggacctgcagtttttcgcgacaggattagaggggtatgtttttggttcaaacttattgttgttttgctctattccttgatttttgccatcactgactctgacatctttttaaaaatttttgcagtggaaatgttgtgatattcatgtcaaggaatttgatgaatttatggagatccctccgtgcacaaagggttggcacaatgctgatgccgcatgaattttcaccatgccccatcttggaataagaaccctattagcataaggttctcttgtatctcgtagtgcataaggtgcaatttttatggagaattttacttggagttggggagtgtggcaaagataccgagaataggctgttttaccgtgctctgtgtgactgctgcaaaagtgtgcgtggtgtttcattttttgtctgaaacggggacttgaaattgtgtgtggagacttcggtctcgttcgttggctcgttgccaattcttcatagttagaaaatcaaatgctccatctaaatgctatcctgcagacttttggtaacacccatctttctgtttatatgagaaataacatgatttcgttatcatatcaaacacttccttttccatccctacgcaacaaaattgggtattaggtagtgtcttcgtttctcaacattttgtgctactaaagttgataacaatacttaactttgacatcaaccatacacttcttttccatcattcccaactgatttggcgctgccaaagctttgcccaaccttcaacggtacttttacatggcatcaaattaaatcaaccctatcaaattttctgtggcatcaaattgatccaattctgtccgatttaatgcatacaagtttttaaaactaaactatggattgtgacaccgcaagaatcaatgtgttgctgtccaattccagtactctgggcgctcgagtcgaaggacaccactgtttgatgtgatgaagtgcactaaggctctgttctttttggttgagttgggacccatccctccggtacgtaaaacgaatcagtccattagcacgtgattaattaattatttgctaatttttttttcaaaaatggatcaatataatttttttaagcaactttcgtatataaactttttgcaaaaaacacaccgtttagcagtttgaaaagcgtgcgcgcggaaaatgagatgggggagttgggaactccaggaaacgaacagagcctaagtgtaacaacatctcgaccaacttacctactccatccgtcttaatagaagtgtaatataatatactccctccgtttcacaatgtaagtcattctagcatttcccacatttatattggtgctggtagtatatgtgatatatcctaggactataaatctggattattgtctatccacgttcgtagttttaggatatgtcacatcctactactactattttttttccaaacaacagtattctctctctatattggttgtcggttgttctctcctcaccctatcacagctgctgcagcttcctcatgcaccaaatgttggattcatcgttgttgagatatggagggttgtggcactcaacctgcggcggcgggagctgcctccactgatcatcgtggccacaaactcctcgcagcgggtgaggcgtgggagttgcggcgacgctggagaagaggtggcgtgacgcgtgactgagtgtggggtggtgtgggaaagagttagctgaatcgctcaatcacatgagcggatagaagatagagatcatacgcccaaattcagggaatacgagggaatgaactgaggacgcctcataataggggatggtatagttgctagagcacactttttcgccaaattctgtaaatttagagataggggattgtataagattctgggtagaggtgctggtcgtgtttagctccatttcaatttttttaaaagtatacggacacatttgaagtattaaacgtatactaataacaaaacaaattacaaatttcgcctgtaaactgcgagacgaatctttttaagcctaattaatctgtcattagcaaatatttactgtagcgccacattgtcaaaaatcatggcgtaattaggcacaaaagattcgtctcacaatttacatgcaaactgtgcaattgttttttcgtttacatttaatgctccatgcatgcgtccaaatatttgatgtgatgaaaaaattcgaagtttgaaggaaactaaacacaaccgttgtaatagcaaacagtgaactccgcagactaccactataatttccaactgtgccatcaatatttctagttatacattgagcaaacaagacctcatacaacctcgtttgcatttatttggcatttttgacttgtgcttacctcctcgtttgcatttatttggcactgacttttaccgttttaactttgactattttttaaatggttagaccaaaatgaatacatgatgcaactggtatataatgtgacatatttttaagaacttgtatttttttctaaaaaaagaaagataaacattgtcaaatggtatgaatgttgtcattttttaaaaataaaattaacaactatttgaatagtgtttgaacaaataaagggacatttcctcgaaagcttacaacgatttccccacattttgttgcactttaaaatttgccggaagaaagaaaagttcactcttgagcttctggaagcctggaactggtgccatatcttctgctccctccgttttaaaatgtttgacaccgttgactttttagcacgtgtttgaccattcgtcttattcaaaaaaattaagtaattatttattcctttcatatcatctgatttattgttaaatatactttcatgtacacatatagttttacatatttcacaaatttttttaataagacgaacggtcaaacatgtgctaaaaagttaacggtgtcaaacattttgaaacggagggagtattattgtcttattggtagatgtttacataatcatacagtaacagtaacatagataataactataagtaggtaagtaagattattattgcaaacccgaacataagagtagcacaagcagaagcagtaggcgacgccgaccagtacattcaggggatgccgatgattggcaggaaagggaagaagtagatgagcggaaggcccgggccggtatcctttctagtggtatccaatatgcatgtagtgaagggcatgtgagaataaactatttacgcat

SEQ ID NO: 19082 - DNA, 4369 bp, Oryza sativa
  unsure (1)..(4369): unsure at all n locations
cattgatgattgaatatctctcaagaacctaaatgcaattttagtaatggagtgaaatgcaaaatcctttaaatgtagtatgttgcatttgtcttggtggaaaccggtccaaatttcaatattttccggcttgttgaaaacacaaaccgcttggttttcggtctagttcaaaaattttcaaactgaattttaagttttgacatgatttatcttgatttcattttctttttgttatcaactgtttttacaaaatccaaagataccactcgtgagaggttttgatccaatatcaaaattgcgaatcccaactcccggagtggaatgaaatcatgcatcaataattccatcaaggtgctaaaggtgtgcattgtgctttcctataaatcattttttttgaacgaattataaatcattttttcaatcgatcactaatgtaccggaagtgttctcacctagacgctcaaaggcaactcgtcaccaagaaagccatcagagttaaacatgtagtcattccaagagagacggagtataacaaatatagtacctcatctgtctcaaaaaagaaattttacatggatgtgatagtatttgctagtactaggaagtgttatatcccttcaaaatctctcatactccctccgtttctaaatatttgataccgttgactttttagcacgtgtttgaccattcgtctcattcaaaacaattcagtaattatttattcctttcatatcatctgatttattgttaaatatactttcatgtacacatatagttttacatatttcacaaatttttttaataagacgaacggtcaaacatgtgctaaaaagttaacggtgtcaaacattttgaaacggagggagtattattgtcttattggtagatgtttacataatcatacagtaacagtaacatagataataactataagtaggtaagtaagattattattgcaaacccgaacataagagtagcacaagcagaagcagtaggcgacgccgaccagtacattcaggggatgccgatgattggcaggaaagggaagaagtagatgagcggaaggcccgggccggcgtagggcggaggggtggcgcgcccggcgcgcggcgtcgccctgcgcgcccgcggcggcgcggggctctggacgttaccggtggctgccgccgtcgacgacgctagggcgccgccgccgcacctcgtgaagacggcgaggctgcacgccagcgcgtacgagccgtgcttctcccggccgcccgcggcgaccacgggcgcgacggcgagcccccccggcgcgcagagctgctcggcgccgccgaggaccctcgccgcgcaccgcgggtggctccgccaactgtcgacgtcgtctccgccggccgccggcacggccacgtcgaagcccccgcgctcgtccgtctgcgccgcccgcagctgtccaacgccgccatcgccgccgccgcatctcaccgccaccaccacacctgcagccaccgcgcgcgacgtcacgatcgaccatgtctgcccggtgcgcgcgtgaccgcgtgttactacattacataccggagaggtcgtggcccggggcgcagtcgaggcaggcgacgtagccgcggagcgtgccggcgccgcgcaccccggcctcgccgtgcgcgacggcggcggcggcggcgagggcgagggcgacgacgaccgcgaggcgaggagccatgacgagtgtagtactggttgttgcacttgcaccgttgcacgcgcgcggctatacgtgtctacgtgctacggtttgtgtgtgtgtgtgtgtgcgcctttttgtagtacgaggatacgcgcgatcgagcattgagtacgcgcacgcaggggcagatgggcagatcgccgggccttaacgccggccgccaccatggctcgcgcaccggctctggacgcaaacgtacccgaaaaggaggtccttttgccgttgcagggatgtacttcccgaaaaggagggcaccgattgctgtaaacgggccggcccagagttggcaagaccgagctcggtgggatcaaagggaggacgggatatgtatggttttagtatggaataagtccactttgactcccttaaaaatgacccgaatctaatccgtgactctcaaccgtaaaaccggataggatgactctccgaactattcaaaccagtacaatttgactccctcagtggttttggagggtggttttgctgatgtggcgttgacgtggcgatgttgacttgatctgtgttgttgatgtggcgcttatatggcattaaaataaaaaattatatggactccattcgtcattcacatgaaaaaaaattgcgacgccaacatgtcatcctctatctatcctccttcccccccccctctctctctccctcctctgtatgtttctcttccaccagattcggtgcggaatctggagcgccaacgncggcggcagggtgagggccggcgcggagaaaggaacttgagcgggttgagcggcggcgacggcagagagccaaaggagagccggtggagtggcgacggccacagcttgccggagaaggcgggggcgtccggccggtggcctcccccacgatggtgccgcgccaggctaggacgaacgagagggctaatgcagacggcgaggcctgagacgctgccggccccagccgtgcctcccggtctgcaccggcagggggtgccgcctctgtttctttctgctcggagaacatgcatgtgcacagcgttgcctagcagatgcaagtgcagcgccggtgtggggtagcaatgcgcggccgccatggaatccagtcgaattttggcaggaccagcagctgtaggacgaatccgtcctaccagcgtggtccacccgagtcctgcagatcttgaggtcatggactggtctgatttttttctttctggtcactgtttgcaaggtcttgaggtcgtggacaatagctacttcatcaccgaggacaacgtcggcatgctgaagctcgccaaggaggccaacagcatcttggttcgtcgatcagcgcattgactcatgttaccaattcgcctatgaaaattgctaacatctaaccgtgacatccttttgattaattggtacaagaagtttgactgccgtatgccgcgccggagacagtgggttgcacagtggtgcactcaaacggccataccgcggcggccatgtccacgagcggattgatgaacaagatgaccgggcgcatcggcgactcgccgttgatcgggttgggagaaggcaaggccatcatatgctccacgctggcgcgcgacgccgccgccgttatggagtacaggggcgtcgggctgcatgaggccatcgactactgcgtcaaggaacggctagacgaggttcatcgggctcatcgcggtgtccagcaccggcgaggtggcgcacgggttcaactgcaccggcatgttcagcgggtgcggctgcaggagaaaagagagagaagggagagagagggggaggaggaagggttggagagagaaaggatgacatgtgggtcccacaatatattttgtgtgtaaatgacagacgggtcccacaaaatatttttaattgtaatgccacataagctccacgtgggatgaagaccaggtcaacaccgccacgtcagcaaaaccgacatccaaaaccgctaagggagtcaaattgcactagtttgaataattcagggagtcatgctatccggttttacggttgagagtcacggattagattcagatcacttttaaggaagtcaaagtgaacttttttccttttagtatcacatcgggtgttgaactgttgacagccgaggaggggcaaatggcggatataaaagggggttggagagcattgttgcaactcatatctttcttggtcctttggataagatcaagtgtagtactccctccatattcataaaggaagtcgtttaggacagcgatacggtgtccaaaacacatttttgacttcttatttctataataatatttattgaaaagtgatatatgtatacttttatgaaagtatttttcaagaaaaatctatacatatagtttttacattttcaaactcaacaacttgagagttattcatgatttatattcccaaggtttgacttaaacattgtcctaaatgacttcctttataagtatggagggagtatatgttatcagtttataatactattatctggcatgtggactatgtgcgcccactttgatattaaatttattttttttgggaggattcactgtagtggcttgcaactaggaggaccctcgtgtgttgtttgggcattgcattgctgccaatcttagagcaacccaaccaaaatgaagtaaattttgttaaactg

SEQ ID NO: 19083 - DNA, 1873 bp, Oryza sativa
  unsure (1)..(1873): unsure at all n locations
actactacacagtagtaacaacctcggatctgctgggatcgacaactttagtaatcatatcgtagtcgatggattcaaatctacgtgttctcttaaggggtttggaacccttttcctcagtatgcaaaccaagtgttaaattaatgcatgatacaaaacaaagtgttaaattaacacatgattaattaagttttagtaaagaaaaacttgaaaataaattaatatgatttttttaaaaataacatttgtatatattttttaaaaaacataccgttcaacgttttagaaaacgtgcaagtaaaaaaatgatgcaataaaagtttgtataaggctatgttcgtttgtatcggttgggaacgctctcttccggcgtggaaaatagagcggttcattgacacgtaattaattaagtactagctggaaaaaacttgaataatggattgatatgattttttaaagcaactttcatattgttgatgcgaaaaacacacactggcctaggagatttgcttagctccagtacaggtccaaaatcttgccttgagattcgcgagcgtaccagttgatttgatcctgcaatcaacaagaaataaagacgaaagaaaccacggttaaatccgtaaacgatagccgattggccagtcgccgatgacatatcatttattttcaagccgatgtcatatgtgaatcgatcggtagtggtaaataagcaggataagactaaatctactcgatcggctgtagatattaacgctatataatctttctgttgatgtatatttaaaccaagtgattgggatagatcggtcgccatactgagacagtataaatcacttagatcgaagtatgcattaacataaaggttataaacgcttatagcatagctgatcaggtagatctagcatgtatcggctagtactccgatactactctatgttaagatgttaaaacagatagaatatatcacacagaagcctaatatactttattgcaataagatcttaatataaagggcatacttagcatatcaattaagcatgtaaaacataagactaagtcaggtaagatcggttgaaaccccgatactatctctctcaatgatcataaaacaagccagatattcataattaataaatacaancttaacagatcgaactcaaccgnnatgcagcatcaagcataaagacaagtatgagatctaaacagaatgatgaaaatctacaagagatggtagatacaagatacaatctagattaataacaaaatataactctaccgattattccctaatgataagaaccagccgataacaagctatatagtgcacactaacatagattgcaacagatatatgataactcgactgattacagaaatagggttaaagtatcataaagatggaagcattaaccccgataacgtaagccgccataacaagttttacctttagttgaagatcgaatcgatgcagctcaactcaaaagtaagaactcgtcgaaataaacgaaagtaaaaagggtggcgatgtgccgagattgtattgaacgattgttgtttgattacatgggttcgggtcatatttataccagagatacaaaatatgtccttgccggacacgacacttatctctaacaaactctaagatatcataagtcttttgcccaaacatatctctaaggaaattacataaaatatcctaattaatagatacaactgcctaaaccgagagctttatctccatcatggcaatccctgtaaagcactttgaacaattctagaaacggccttgaaaccatcttcatcggaatcgattgcattacctctatcggctgtatcttttatcctctgtcgggtaccgagctcgaattcgccc

SEQ ID NO: 19084 - DNA, 1555 bp, Oryza sativa
atcagatggcaatgatcttggctttggtagaagccctcgggagagccagtaacttggtaagagactcgcacatgcacgcatcgttcaggacatcctcgtcgtccctgaccaccttcagttcctctaaggtgggtgaccatctcaggagcagtccaacgagatcaatttcgtgttccagccccacgaaatcgttaatcgtcaccgtcacgaggtgatgcaaggtaggctcttcaatctccgcctgatcattatcccatattggctgataccaaaattcttcatcgctgtagaagctctgtagaagttgaagcaactagtcagtgcaaccacacggaaaaacagccgacggagggaaaatagtgccaagttaactgcagaagagtgcagggaagcatacccgtatctcaagttctctgaacttagaggcattccgaaatattgaacaagcacccaagactctgtccagacccaagagcacttctcaatacaaatcttccttagacgatcaaacacgcctgggagttctgccaacaagcacccttctgatagatactgccaccagaataaaaccaatgaattaccaatataattcaaccagcgtgttagttaaataacacaaaactattagtatgttactgtcaagaatgagccacttatagtaagttcttcgatactagttaggctgacaaaagcttgcttcagatagtttttcttgtcacccacaactgcatcagattgttctgcttctgttttgccgagtgtaagatacaacagattaggagcatgcagatgcaagtcttcaaaatccccttgaacctctaaaagctgtagtgtctgagcttgaatacggagacaactgataccctcaaatatttcagacgcaacatattcagccaggggcacgaggagatcagcttatatatatctctatctgtcaaggagaaatatttcagattcaagacagttagctgcttgaaaccttcaaactcctgaggcaagccaatggtgcatctttttataacaagtgtttctattctagttaggctgacaaaagcttgcttcagatagtttttccagttgaccgcttcttccgtttttgcgggtgaaatatacgcactggacagattgggtgaattcagatgaaagtctttaaagttccctttaacctctaaaacctgtagtgccggagcttgaatacggagacaactgatgccctcaaaatatttcaaacgcaatgtattcagcaagtggcatgaggagatcagattatttatgtcactgtctgttgaggagaaatatttcagattcagaactgttagccgcttgaaaccttcaaactcctgaggcaagcggatgatgcatctttttaagtgatttatactgtctcggcatggcgaccgatctatcccaatcacttgatttaagtatatatcgatacaaggagtatatattgttaatatctacagccgatcgagtagatttagttccttcttatttactcatggttgccgatcgatacatatatgacatcggctcaaagataaatgatatgtca

SEQ ID NO: 19085 - DNA, 658 bp, Oryza sativa
aagatcctgaatctcttgaattcaaagttatgaaggagagaatgtataaaatcttctcaaatgcaatcgtagtcagctattcacacttgctgccagtggtgctgtacaacgctttcaatccccctccaccggtatgtatttaaaatctcacctttctcaaaagcatgcttttaacatctcaaaattgattgaaaacttgtatcatcatgcctaggaattcaccttgatgaaatcagaccctccaactgctcaacgccgatcaccccatcggcaaactggtcaagctggcggaggacctaaaatccggtctgattctcaacccagcaccactcaatcggccaaccaatcagacttccgcaagaggaaattggttatgagcgacgatgaaaatgatgactctgaaaaagctggcagcaagggggtgacttgaaaaccagcaaggcaagctaacccgaagaagaaaacatccagtcgtcccatgccgaaaatcaggaagtcctccaggtacaaatcatttatccatcttccttgtattgctgctcactcactatcgaaatagcactgatagcataactcaaatttgtaggaagccatctgacatagatccttctggaaaagaccctgagccgactaacatggagacgggcccttcaaaaga

SEQ ID NO: 19086 - DNA, 813 bp, Oryza sativa
gtgaaacgaggaggagagcgcgcccaaggcagggataaaaggataaaaggcggggactttgcatcattcctttgccgactgctcacccgcacacacgctccataagccctaacactctcgccactccacagtactccacacaccaagcccctcgtcgtttcaccgccggtcgtcatggcccaagacgctggcgacgctgtgcttccggcatcgcgcatcacggcagataggcaccttagtcttccccgcaagattatgccggaaggcgccgccgtgagggcgggggaatcgcagccgcggccgcggtacccggagtgatccgtacaccttctgtccttcgccatggcggggttgatcccaccattctccaggttcttccatgaggttttggatttctacgagatccatgccctgcatctcgcacccaactccgtgatgacgctggccatctttgcgcatctgtgcgagatgttcgtcggggtgcggccgacgatgcgactgttccagtccttcttcgtcccgcagctgctgcaaggtgcggtggtggggggatgctacttccagccccggccaggcacggcggggcaatacatcgagagtcatctccgcaagaagtgggaggactggaagaaggactggttctacaccgcgctgccgaaccacccgcaacttcggctcaccggccgccccgaacgatccgccgcatggctggcggtttcggaactaggcgaggagtacgacgcagtgcgggatcacttcaggggcttgcgaagccagggcctcacgggggcgatggtcttcggcgattacttc

SEQ ID NO: 19087 - DNA, 3429 bp, Oryza sativa
aaatgtttgcaaacaactcgtgatacaaacaattgtttacaaacaactcgtgatacaatcaattaattgtacaagaagagtgtaaaattaccctggtctttcgatatctggagacacgaatacaaactccaatcatcctcagcaacaagcaatcaaatatcgtgcagcgtgcaacatcggccaagaacaggagatcgatgtcagggacgatctggccggtatatcgcagatggcgagtgatgatttaataatagcaattaattaaagtcgccatcatatatatccgcggcaaattaattaggcgccattcataagcggcttcttcatttcccacgctttcagatgtgaaatcttaatatccgcctccccattgttgaagacgtaaagatgggccttgtcacctatcgccatcgacgggtaaactctcgacaggatgcaggtcttgcccccggcgccgaagctctcaaccaccgaacggtcaatctgaaacgaagtcacaaacaatgatgcatatataagactaatcatggtcacagtcaataaagcattggtaagttatatacgagaggcactaataaaaaacgtggttaattaagctcgtagtatatgtgtgtactataccaagcttctcaaggagatcttcccggacgagatgtcggtgtcgacgaacccggcaaaagttggcttgtagagatccgggctaagagaagacctgctcaataaaaaaaggacagtaattaatcaacttcagagctttggatttagcattttaagttgtctactgtgtttgggtaattgcgaaaatgtgacaggagacgtatttgatagtgctgtgataaagggtgtgtgattccaactctaagatcatgtatttcttctctcattttttttttgaaaacgtggcagacattgatcagtgcatgcaggatgggtatatgcatgtgtgctgcttgcattgtaccgagacatcacaaggtagtagtatagatttggctggtagtggtatcgtacttggtagggtcggtgcacatgaggacgacgggcttggcgccgtgcccggccggcttgaagacgcggaagaagacggcggttttctcctccaggccggcggaggccagcacccacagcccgaacaccacgccgcccctcacgtccgcgcccttcgcgccgcacagcctctccgcgtcgtcgccgaacgccgggtccaacgcctccgccttctccagcccggacacctccaagctcacctccacgtcagcctgatcgacacacaaatatcaaagcaaaacttgtaagcgtcagcgtcacacctagaaggcgaatatgcgatgcgttgcaggttcctctccggccaaccggatgcgtccacgccgttgaaggtgaaacgggcgggagcggaagctgacgccgaccgagcggaaaaatcgccggtccggcgacttcgcgatcttcgcgtgcacgagcaggaattgggcacgcgatgatcgctgcccatacggaattggaccggagcgagcttagctagtactccgtataactaggaagctcctgcacatggggcccttgacggcagcaatatatatggccaatattctagtctcattttcttgtggatggaaatttcaagttactggtttttgattttgtagtgtagcaacctggtaggttccgaggcccgtgacttggaaatgttccccgggcttcaccaccttgtcaaagacgctgaccgatttgcccctcagcgtctccagctcctcgattggccactgcagaagctgcttcccgctcgggtccagccatacctttcttgggatcgcctgccaacgacacaagccaagccatcaatctccaaatcaattctaattaaacctctagtccctccaatttttcttttacgtttggttagctcttgaaattaagataactaataacatcaaacatttgtggaggtaggtagtacaagaaattaggattgcaaaattgtaactatgatttacatggatgccggcccagcccttcgccttgtcgtaggtgacgctgtcggactcgttagcccacccaagcaggatgcggcggtgcttcaccgggtcgaagaaggtctttgatgcgtagaagttgccgtagtcatagcggagccggtggtagtcgccagcagggttgtccggcacataccgctccgtcaccttgttgtagatgcccaccgtgtagtagtcataacgggtgagatcgaggctgtcttgagcacgtacttgctgctcggcacagatgtgtcgaggccagcctggagacctggtgcttgcaacggaaagaagtctgggcactcccacatcccagtgagcgccgaatggagtgggtgcttggcccgaacccatgtcttgaagtcccggctccggtagaggtaggcaaggccgaggcgagcccccttcaggccaccaacgagcatccgccaatgaccgtcggcgtaccaggccgttgtcggatcgcggaattgcgttgcgttcataccaggctccggcgtggccaccgggttgtaggccggcttgacccactcacgaaggagcgggtctgacgcattcttgggaaatgcgatattctgcacctggtagttgatgttggggcggtcgatcccagtgtagaggatcgccggcgtgccatcgggaaggatggtggcagagccagaccaacaaccgtactggtcggaggggatgtcgggcttgattgccggctcaagggctatccagttgatgaggtcctgtgataccgagtgagcccacacgatattgccccacacagctcccttggggttgtactggtagaataggtggtaccatcccttgtaatacagtggccctgttcaatgttctcaacttatcaactcaaaagctcaaaacatttttcatgtataactggggcggatcccccaatttttttttggggtgggggtgggggttgggggggggagcccatagtacacatgttaattagatctattcttgtgtacaggtacaacttattgcttatcaacttatcactttttatatggtttctttactgttttacaaaaatgagttgtttaaattaaagtttattgtgaaattgattatgtcttgtcatgtctaaattcgtataatcaaattgagattcacttccagacagtgatacgccaaaggaatccgttgattgatcccattgtcaaattttaagaccaaacttcgaaagcttgaccagcttaaatttttctgcctactgcaagaggccgttgtatatacgcattcgccttgcagcatgtgcgtgccggcatgcaccattttaatgttaaactgtcctttctcttagctccttctaaaaaattggtctttaatcttcccatatttaaaaaacacatgcacacaagcgttgctgttcattatactctcaacatcatagatc

SEQ ID NO: 19088 - DNA, 1664 bp, Oryza sativa
tatggccctacagccttgaggcaagtgtgtgatttcccaagtgtcattagagaggatagagtccatctcactttgcactgcttccttccagtatgcagcttcagcagatgcaaatgcttctgacagagtactgggcacatcattgacaaggtatatgataaaatcttcaccaaacattttctcagttcgtgatctcttgctcctccttaaattaagggaatcatctgacaaaatgctaattctaggttcaacagaaataggttcagaacttggagattttaccttcagtggaaatgtatcttcgaaaaaggtcgcgtcacatgattccatcacagtattttcacgaacttctgtagtttcagatttaactaccaggaaacgataagctggactgttctgtgcatatcctatgaacacgcaatcgacggtcttaggtccgagctttctcttcttgacaacaggtatatttaccttggcaaggcacccccacactttcagaaaattcagatttggtttctgcctttccatagttcatatggagtaacttctgttccttttgcaggaacacgattcagcacaaagcatgctgtgtacagagcttcaccccacatattgtttggaagacctgaattgctgagcattgcattcactaaatcagtgagagtacgattcttcctttcaactaccccatttgattggggtgaatacggaggggtggtttcatggatgattccatgttcttgatgaaacttagagaattcaattgataagtattctcctcctctgtcagacctcaaaattttaattttcaaatcaagctgattctcagcctctgctttaaaaattttgaaatgctcaaaagcttcatcttttgttcttaagagataaacatagcagtacttagagcaatcatcaataaaagtaatgaaataccgtctacctcctttagtcaaaattccattcatctcacatatatcagagtgcactaattcaagcatagagctgtctctatcaacagatttaaaaggtttacgaggttgtttagcttgcacacagatttcacactttatacctcgtgtgtcatgcttgggaattaaatctagtgacatcatacgagatatagatttgtaattaacatgacaaagacgattatgccacaaagaattatcagtacgagcagaatgagatgaaacagcgaaagctttattattatcactaaaacttgaacaaggcagcaacaaagatagtctaattaggccattatctaaatagcctttcccaacaaaagaacctctaatagttattacaactttattactctcgaagacaagcttatggcctgacttcattaacagacttccactaatcaaatttgctttcgctgctggtacgaagagcacattgtgtagggtcagaacttttcttgaagaaagcttcaaatccactcaaccactacccagcaccctagacttgctctcaagacgagtcacagaacggcctccttgctgttcctgaaaagtggagaacaaagatcgatcaaaacacacatgaacagttgctctagtgtcaacccaccaatctgcaggttgacacttatcaaatttttgagacatgttcgaaacgcaccttgcaacttcagcttcgtcaataaccatattgacctt

SEQ ID NO: 19089 - DNA, 2511 bp, Oryza sativa
aatcttttgagcctaattacgccatgatttgataatgtgatgctatagtaaacatttgccaatgacggattgattaagcttaataaattcgtctcgcagtttacaggcggaatttgtaatttgttttgttattagtctacatttaatacttcaaatgtgtatccgtatacttcaaataaattttagcacacgaactatcacacagcctgcgtttgtattgtgttttaaaagaaaacgatatgagaaagcaaaccacagcaagacaagagcccaagacatcttgagaaaagctaaaggaataagtctattttacgtccccatacctttgatcgaatcatctccttgaaacgcaaaaccggtataatacctcctccatctttgaaaatggactaggcacagttttcaaagataaaggaatcaagatagactttttttgagaataaatcaagatagactcaattgcaaaactaaaaggaaaagacgtaccctagcatatactgggccgcgttacgacaaggagcccaaaggccgaagcccatatgcccccagctgaacactacttatataaagcgaattgctccagcagccgtcccttgagctagggttttatcgccgccgccgccgcttctccactctcccctgcccccgtcgccgtcgccaccgccgccgccatggtatgtttcctgtgacacacactatctctctctgctctcctcatgttaggccgaatgatgcgttgcgatgaccatggtgctgcgtttgcggttgacagtccgggaggaagaagacacgggagcccaaggaggagaacgtcaccctcggcccgaccgtgcgcgagggcgagtacgtcttcggcgtcgcccacatcttcgcctccttcaacgacaccttcatcgtcagatcccgccctccctctcctccccccctttcccgttcgattggtcgattgggattttttttttttgcttacccctgtgcgattttggttgcgttgcagcatgtcaccgatctgtccgggagggagacgctcgtccgcatcactggtaaaatcctcccctcctaagccccttccccgtttatctcgctctctatgccgatgtgatgcattaggggttgcttattgtctgaaatggtggagacaatttgtgtttttgagttcatgtcgcgatgttttttttttgctcatttgttaagcacggcccttaagatcgcctccctttcgtcacgtgggagcgtttcgagtcatagctgtgctaaagtaacaatgagggacctcggagtttttctttggtccttccctcttcctgttttgttctaggtatctccatctcagcttgtgtatcccttggtgtggctcggacttttatcagtcgcaattttgtgctgattgcctgagctgttcaccctgggaagcctcggtgaattgaatggagatgtctatattatgggagtggacatggtttatttttcttcaagaatgtatttttatttgcccacgctctgtgtgtatatataacttattaccgcattttctgttagacgtaattattgtaggatgttgtgaatatatcagttgagattggtaaaaagttcatgatagcaatcaggcagtttcacagttaatttaaattatcgtgtagtcattagaaaatagttgtttttgttttcagagaaatggtctcatttttgtctttactgtggatgttgctgtcattttctttataaacttgaattatttctgtggttatctttgttaaccggttgtgcgacggacttaagttaaatgggtgaaatcacaacttaattttacatgcttaagattaatatcagattgaccatttaatataatttatatattcattctagatgtgtcttttgtaggctgttatcattttctttgttataacaatgttcagttgttttaatatgttaattgtttgttgtcaaggtggcatgaaggttaaagctgatcgcgacgaatcttccccttatgctgctatgcttgcttcacaggatgttgctcaaagatgcaaggtatccccctactttggtcaagataatactgttgtttgtcagttaatgattaatgccttgtatccattttgtaggagcttggaataactgctttgcatatcaagctccgtgctactggtggtaacaagacaaaaacccctggtcctggtgctcagtccgcacttagagcacttgctcgatctggcatgaagattggtcgtattggtaagcatacaaacatttatttttctgcatgatgcttgctgatatatttgttggatgatggttggtttatttgtttattctgtttgaactgttggcctgttctgttctaatattattggacagcatgaagtctgcaccaggaggagcacttcaatgttaaaattttattgaaacaaatcctgcatgtaaaatatcaacgtataagcattgcttagtttataacttgtttcaatgctatatcaacaaataaataatatatagtttaaccactct

SEQ ID NO: 19090 - DNA, 1332 bp, Oryza sativa
aagcaatctttggccgcgtgattggaattaggatgatgcagacattgggagttcatgattttgtcaaaagtgttgagcgcgaacgttgtcgggaggatactcttattttccaagagcataatttggcaatgcctttccttgctttttatgtcattctgttcgtattttccttgataataggaaggcaatgaacacttcttttgtatttactcgaatggaaatttacagaagaaacatctgtacttgcatctgttcttttgtggcctagttgaactctatttcgaatgtatgctgtttcattgtaattttcagctgatgacgtcttgtcaattttctgtcatacagaggatgttactccagtgccgactgatagcacacgcagaaagggtggtagaaggggtaggaggctgtaatcttcatgcggcctcaaaccgacaacactctgctctcctagatgttaccgtctgcattggactattttgtttctgtgcttttcattcggtggattatttaaaccagttttgaactctgtttctgcatcaattcatgctgtcctcaatgtaaccaacgttatctgcttcgaccggtgaacatactcctgttggattacttgagcatatgccactacaggccggacactgctttcgttgtttattcgggagagcatggcaaacttgggagatgaaaacctggaaaatggtgcgaggataatgggcataactgtaaaatagtgcgttttgtacgaaaactttatatatgaaagttgttttaaaatttcaggttaatccatttttcaagtttgtaataattaaaacttaataatcttcatcttaaggacattcaaacaccatcaatatgtgcattgtccggtttatcacaatatactcacaacgtaccttgctttcataagaaagaaatggtactcccttaaactcccttaaacgtttgactgttcggtttattcaaaaatcacataatatgtgatcacataatatgtgcattgcctggtttatcagaacatacttagaacataccttgttttcatgaaaaagaaatagtactccaaagcatgaaagaaatagtactcccttgaatgtttgattatctgttttatttaaaatttttgtgtaaatataaaagtatttatgtcatactgaaacaatatttgatgataaattacgtcataataaaataaattataattatataatttttttaatgagacgaatggtcaaatattggttaaaaaataaatggcattaaaatacaatactgagggagtatattgcgaatattgtcacacagttcatcctgatcctgtaggagtaatgg

SEQ ID NO: 19091 - DNA, 3398 bp, Oryza sativa
ttgtgcatagttctgaaggaaaatatacttgaccctgcagatgtcattgcacattgggcggtcagttcacatgtgcgtcaaagatatcttgaacatcttttccagaggtttggaaattgcacagtgaggctgaaagatggatatggatttgcggtctttgattctaatgatgatgcagctcgagccatgcgggcactgcaggggaaatttgtttgtggggagcgcattactgttaattggtcaaaacagcagcccagattttctaaggatttcagaagttcaagaaacattgagtcatctcaccagagggcacccagagtcagagatggtaatattaggttcagggattctttagctcagaagaatcaccctgcaagtcatgatcagggtcacagtcctgatgttgcaccagaacagaaatcatctgatggtgcattggaaaagaaatctgatgaaaagaaatctgatggtgatgttgaggatttgaaggatgtgagggaaactgttggtcaagatccagtggagatgaagaggaatgaagatgttacaagtgatgcaaatgtaattgaacatgatagatgggaggaaactggaaaagggaatcctggtagagatgatgatgattttgaccgttatgaaccttatcatggctatgccaggcaagaagaaagagcaggggttgtcaaagcaagttctcaggagacttatcatcatagattttcttcacagaagtcgaaagagtatcctgctggccatactgctcatgattgcccccagaaaacagatggaggattcgaagcatggagagatgcattgagtaggcaagaaaggctgagaagatttgggtctccctcaaggaggcaaccagatactcgtgattgctctaagaaaacagatgacagattcgaagcatggagagatgcattgagtaggcaagaaaaaggtatggtgaggctgaaaagatttgggtctccctcgaggaagcggacagaagaatttcgtgttgataaggtggtagaaacacatcgtatggtacaagatggcaggaaacaattttctgataggactagccacgctcacagattgagtaatgtttctagagaggacaaaaggcatacccgttgcagtgaaagtataccacagacccccaaggagtcacgcaagagaagcagatctaaaagatcccgtgggtcatccctctcttctgacaggagtacctcacattcaacatctaaatgttctcgttcaagagcacattccccatctcattctgcacattctagttcaaaatcatttcagccaactcagcctgaaggtttaagatcaatggcagtatcaaatgtcagtccattgctggtgtctggttcaccacaacacaacttaccatccacagcggaaaacaagaactcagattttctggtgaattctcctttggagggcaatttagattccaaaacaacaactggactcaagcatacacgtggttaccagcaagatatcaaagattcaagattgagtggagagtctccagttattccactcaggttgaaaatccaaaggaatggtgaattgcctgtatctggtaaagatgcttatctggatggttacacagagaccaacttgaataataacttggtttatgatgacaatgttgctgatggtgtgcaagttcagaagaccaattctgaggacgcttcatcagtgaagtcaagcaaggatattctggtgaaaagtgagaggagcaactctttgaagctaacaacaaatgaagtggtctctgctcttaagcacaatggaatggaagcacgtggtacagatttattgaaccaacctgtagagaagtactttggtgctgcacgcctatggccatgggaagtcatttattatcggaagcttaaaaagggtccaatttctacagagaactacgctaagcgacttgagcagaacaaagaatatagtattgtagatcggtatgtcagaagcagcagtggttggtgggagtgccactagaatgccagactggtggtatagatagatgcagttgaggctttgcgtgtatgctgctgcaggtacattttgaggatgacaaggtttgccttctaatcagtccattcctagagctccatgagtgtaagcagacccttaactatgagaattattaagtattaggttctttcattagtataattttgttgagtaagggtttgcacaattgcacctaagtagcttattctgccaccaatattatgctgttgcatggtcagtatgttttaagttgtaatgtttcaacgactcgccccagtgaggtacttggatggccaacaggtaagcaaagatgcttattttatacatgattttttggggaaaagaaacaagcctcttgtttagcagttatatagaggaaaggttctctctgtagtttatgatttccttagtactccctccctctggtttcataattcttgacattttggacaatgatatggtctccaaaatatatctttaactatgttttctctattataatatatacaataaataagtatatttttacttttattatagtacttataagacaaatctatatatgttgttttagtgtctttaaacttaatattttagaagttattgatagtcaaagttataaaagtttgatcttaaccttatcctaaacaccaagacttatgaaaccggagggagtatgactacaattatttttgtaatcaacaacttccataccccgctaatcgagctgaaatattacagtgatgccacttcgtgatagatttcatatgcaagatgtgctcccccggcttacaagcttttggataggaccaagaaattcttcgcatgtttgagtcgtcactgttatttttgtgtagctgaattggagtaggtgattgaagctttgctaactggattacctgttacttttatgtagctaccctatgaggattatgccattctggctggacacatgaactccataatatcagtacctttatttgagtcagtttttggtcttttaatgtgacttgtcgctgatgtctcatcgtcgtatcctgatatttatattgctctgatcttcttggggattccatctagacttttgcatgcgtctggctttatatttctccaaacggtgtgatagccagttgtccatgacgacagaacataaatttgggttcttgcatatcaaacgctttatttttccccgatctgcatcgaatgccaaatcaccatcatgttgggtagatgttgaatcggatgttttccttcttttcgtctcctttcacgaggagattggtatgtggtgctaattgcaattctcccagttatttagctcctcctgcaagctgctgcagcggttttggccttgctgctctttctggcgtcaa

SEQ ID NO: 19092 - DNA, 1251 bp, Oryza sativa
taatcagcatgatagtttaatagcacaaaattaataatatgttaccgtcaaggaagggccatttatagaaagttctatactagttaggctgacaaaagcttccttgggataatttttcttgtcacccgcaacagcatcacattgttctgtttctgttttgtcgagtgtaagatacaacagattaggtgcatgcagatgcaagtcttcgaaattcccttgaacctctaaatgctgcagtgccggagcttgaatacggagacaactgataccctcaaaatatttcaaatgcagtgttttcagccatgggcatgaggagatcagatttgctatgtcagcgtctgttgagtatatatatttcagattcaagacagatagccgcttgaaaccttcaaacgtctgaggcaacgcaaccatacatcttttcataacaagtgcttctattccagttaggctcacaaaagcttgcatcatatagtttttactcctgtctgcaacttttgttttgttgagtgtaacatacacattggacaggttaggtgcatgcagatgaaagtcttcaaaggaccctttaacctctaaaacctgtactgcctgagcttgaattcggagacgattgatacccttaaaatatttcaaacgcaatgtattcagccgagggcatgaggagatcagattatttatgtcactgtctgttgaggagaaatatttcagattcagaacagttagctgcttaaaaccttcaaactgccgaggcaagctgatgatgcatctttctatccgtagatattccaaatcactgatagagaagaggcacgatggaatcttataataattcccacaggaaaactcgattgtgatggaacttggttttttccttgacagcatgtgcatccacctatcatatgcattaaggtaactcctcaaacatcaaattgaaaacgaaactagaggtccatttgtggagcaacagtgacagatctaccagtgtagtaaatttggaccgtaatgtgcctgagatgcgatacgtatcgaacagaataagttgccacattcctccaagcacttgataggatgctggctctaatagcatctacgacattcaacttcgagaggatggcgacttttagctctggaggtaggctgctgagtctatctaaactctcagctgattgtgattccacctttgcctttttagcacaatgcatcgctccagaaatcagattgaagtgacctagcaatttccgaagagct

SEQ ID NO: 19093 - DNA, 713 bp, Oryza sativa
cagggtacatacccccgtccgggggaggaggcggacctacatgctgtgcagcggaaggacgacgagtccctccgctcatacatacaacgcttctacaggtccacaacactattccgtgcatcccggcccacgcggtcgtttatgcatttcggaacggcgtgtggcacaaccgcatgctagagaagatcgcctccaaggagcctaagaccaccgccgagctcttcgagctagcggacaaggtggctcggaaggaggaggcgtgggcttggaattcccccagcactggtgcggcggctgcggctgcccccgagactgcccctcgctccaagcggcgggacatgaggggcaagcggaaaccggcccgctctgatgacgagggccacgtccttgcggctgatgggtcttcgcgggccccgcgcaacgaaaaggccaccggtggcaagccgagctccaccgccccctccggtgagggtcgatcggcggacaagtggtgctcagtgcacaatacttatcggcacagtctcgccgactgccgctcggtcatgaacttggccgagcggtttcggaaagccgatgaggagaagcggcagagtcgacgggagggcaaagcccccgcgacccccaccaatgatcggcgagaggagtccaagaagaaggcccccgccgacgatggtgatgacagcgaggatctggaattccagatacctaaggga

SEQ ID NO: 19094 - DNA, 2128 bp, Oryza sativa
aatcagctgaaagcttacctcacctcccccccatcctagtagccccagggccagaggaaccgttgctgctctacttggctgcgaccccccacgcggtgagtgccgcccttgtagttgaacgcgatgagggtgacccgcattgcgaacccggctatgggaagggaccaggggcccccttgactggtgatggcctatcggagcttagaactaacaacttggatccgactaagataatgtaccaatccctggatcagtaaatattgatacatacaatataactggttcttcattgcatatgttaaagttttacaatactaagggttttacaataataggtactcacctagctaattaatacacagcggaagtttctatacattctgactaggaaggtataacctttaaggattctctaagttatcggggtcatcgtagtaatagtcataagggtccttctcttgacccaaatctgaaaaaggggttataagagtaaggatgagtattcacaatactcagcaagttatcatggaaatatgttatgcattgacatatattagggttctttacaaaaagcagtactagacaatctggaagagttatagcaagaatttataaaacatatagactttagatttctaaccagggtaccatatgagtcccggtactcaactccatgagtacggctattcgaatagtttcaaaaatattctactgcagcagatgtacgctttacccgcagtccacgacttgctgataatcatcggctttagtcatggcccattattaagtcattaaaaattatggcacctgttccatgaacttatatcctcatatgctctgaacgtattgttaacagcaacaagaggagttctggcgttcccgagatatttaaggggaactgatcgtatgacaccacatcatctcgatcagggtttagaaatataccatatagtttatactcgagtatcacaaaccatttacctgtacatggtaatggttaaagttgcccttcgcggctatagttgcctcctgtgcgaggacttaaaaataagaaccactatacagaggtgccatattgctaattaacataataactaggtttgtccccattctagaaattgcggtcatacccgttcattcgacataagtaccttggtaaacttatatcgatcgagacagtactagccacccgggagtcaaccaaatcttacgtactgtcccaatctaagtataaggtattttaaccagattgtaagcaaagtaagcaatactaaattatatgggtttctatgattatactatgcatggaaaatagtatattgaatataaggctataaattaataatttataaaatataggcttaaatgatcaaaaggtatatggtaacttgccttgctcgatgtcttgagattgattgatattatctattgagtcagaagaatcctcaagacctagggttagacatatatagaattgaaattctaaaggtgttcagataaatccccgagatatgacaaatagagcggataaaatagaatgccaacatagcaaaaaggggctcaaaagatagagaatgattttagaagaatattggtccgagtttcactggaattggatctatattttaaaagatatgggcttctaaagtttgagaatcaaataaatgtgaaatggcactgtgtgcgggtcccacctgtcagtctctctctcttctcttcttctacctccggccgatccccaaaagcggctggcggcgctagggttgacgattacagcggtgatggagggggaaagtggttcggccgaggaggggagggagctagggttctccggcgacggcgagcgacggcagagggattaatttgatatgtgaatggcctatcggctagggcggcggtggcatgtttagaccgtgatggtgatcaagatgatatgagttagacatggctagaggaggggttctagagcatttacgaggtacctagatgaattccggcagcttgccaacctttggcaaggcgtggattaattcggctggcgacgtgttggcgccaatccgggcgcgacgcgcggcggcggcgagggtgaaaacggccgactcgggggtgaatggtttgaattgtgaga

SEQ ID NO: 19095 - DNA, 1038 bp, Oryza sativa
ggatgacttcgtcgtagaatggacaccggtggatgaccctcttccgtccgatttccctccctccccggagacggtggagacccgagcgccgacattcgcgccgggcactgggttatgcacttcgacggctccctcaaccttcgtggtgtgggggctggagtcacgctaacttcgccaaccagggatgtcctcaagtacgtcgttcggctcgatttccgagccacgagcaatatggcagagtacgaaggactcctcgcggggttgagggcggcggccggaatgggcatccgccgcctcctagtcctaggtgattcctagttggtcgtgaatcaggactctaaggagtaccagtgcaccgacccgcaaatggatgcatacgtccgtgaagtacgacgtatggaacgccacttcgacggactcgagctccagcacgtgccccgacgcgacgatgcaatcgctgatgagttgtcgcatatcatgtcggcgcgagccccactccctccggggaccttcaggaaaggctcgtgcagccgtcggcacatttggaccccccgagggaccccggcgccacgacctccgccccgagccccgacagcctgcgggcctcggggcccgaggggatcgaccccaacccccctcgtcacgtcgcctggatgactgacatccgggcatatctcgacaataatactcttcctgaggatcgtgcagaagctgagaagcttgcgcgtatctctaagcggtacgtgctcgtagaagggaccctcaaccgacgggccgccaacgggatactcttgaagtgtatttctcgggaacagggcgtcgagctcattgctgacgctcatgaggatgagtgtggggacattccgcctcacgcacattagtcggtaaagccttccgacaaggtttttactggccgaccgcgttgcaagacgcccaggaatgggtccgacgattcaaggcgtgccagttccacgctaagcaaacccaccagttggcccaagccttacaggtcatcccgctctcttgggctttcgcagt

SEQ ID NO: 19096 - DNA, 557 bp, Oryza sativa
catgcgttgcatatatacgatgatgatgaactactgcatgctgggatcgatcgaatcgatgatactacgtgtgataatatatagattgatgcttataaatcatggttatactgcataatctgcagaggatcgagctgattaatcatgatactactgctgctaattgagaagaactaatggggcctagaactaattaactgtgatcatcatcaaggtgagatttcttcttctcgttgttcttcttgatcctgaattcctgatgcctctgcgcgatcaaagaagcgtgtagatgcttctcctcgatctcttgctgccatcatggtcatggccatgttcatcccctccggtggcggcggccgtcggcgttgatgccgccgccgccgccggcgtggaggaagtcgaggatgacggggctccggcacttgggcagcgcgggtcggcctcggcgagcatgacgtagaggaagcagcgcgggcacgcggcgagcaccatcgacgtcgcctccgggctgtccgaccactgcagctgcccgccgccgccgccgtgctgctgccgca

SEQ ID NO: 19097 - DNA, 2416 bp, Oryza sativa
atgagtatattgcgtttagggccaccttttattatcaaagtttcattttggaccaccctttaacacattttttcactttgggctaggttactttacctttctttcactttggaccaccccataaactttttaggaatatataaatgacttttccaattttaaacacatcagcaacccgtaacccagtaatcttttccaacttacacatgcaattctttacaatattatagagtagatgtaactaaagaaaataattttgggtggtccaaagtgcaccaaaggtaatcttacctagtccaaagtaaaaatatgagctagaagatagcgtaaagtgaaactttggtaacaaaagatggaccaaagtgcaattaactcatattttattaacgaccaaaaaataatttatgagtaaaatttttatatgtgtcgtttgcgacttaaaattcaaagtttttacaggtgttgtttctttgtaagccaaacgatgagcctccataattgcacatcgatgcagccttgttgcgatatacatgaacaccctcttaatttattgcagacagccctcaaccataactacgtacacggatcatcacggtcgaaaatatggcctgctcgtctgcgaagatctatagtccttgcagtgaaaaatcggttttagtattgtttgtccagcgcgataatcaagcaagcctagctaaatgctgattgacaaatcctgagaacaaatctcctagtaatgtataaattatgtagcctgttgctcttctcgtaactcaaatctctagtaatgtataaaaacaaatctgtaacctgttgctcttctctcttctaatttatcttcttaggccatcagcaatgggtgccttcgacccgtcccctcgcaaacggccatcaacttttgcatctgagccgtgccccaggcgagacgcgcgttttctcccagagggacacgcccctcggcgacttttggcagagcaaccaggcaaggagccatgttgtgcgcgtcgttgcttgtggacaccgctccccacacccatattccctttccacccttgccagagctggaggcggcgctggcgaagtggacggcgacgagcagaggcggggaagagagggggaaagagcggatctagcgccggcgaggtggatggcgatgagtgacgggagggagaaagtgggagagagagagagaggcgagcggcggggcggcgacggcacggccgtgccccgcttgctgtggccgtcggccccctcacgccgccgtccggggtcgccgccgccgcatccggggtcactgccgccgcctccggggtcgccgccaccaccttccatgggaaagagcggcgggagagagaaagggagagagaggcggcgacgacgggcgacggcgagatccgcccacgacgcgccggatctaccgcctccgaggtcgccgccgccacctccgggtagccgccgcatctcccgggggacgaacccctcggcgacctcatccatctccgtcttggcctcctccgcgcggcgccgagagagaggcaagtggcggtggtggcggctggggagggcgaggagggaggtggcgccggcgctcgcgggagagagagggaggggggaggacggcgatgtcgccgagcggagggagtgatgccggcgaagaaaaaagaagaggagaggaaagagcggaagaaaaagtggagagagagaggggggagaagagaggggtagtataggaaaacatctaatgtgggtttttttgttaggacacccattgtgggcttgagtaccttcatctagttgcttcagattttgaggaactcatctaagggtgtctattattgcgagctaagttcctctacgagtgtcctcagttagtgaggacactctaggagtggctcacattgtggatgcccttaaattatgtttacagctgacttatagttgtacccgctttgagaagtcaaacctcctagtaatgcataagagctagccaactaccggcttcaattcatctataaccaatctaatagctcattgcctataagtatatactacatcactaatatatggtcctacatcttatacacacaaaacgtattaaagtttgtactgcagctggctataaatttatagcccgtttttcttttcttcttcatatgtgcttacagctgacttatagcctgctattgtactcgctctaaatgcaagacatcgaatccatacaggtcatacacacgcatgcacacgcgcgcacggttgacttttttctaggttccgtgcagtgtgtttgcgtcgcgtcgtccatgcacatgtggcctaattacttcggcatttaagagacacgcacacaagaacgaaagttactgcagccgtagaccattagatgagatctgattgattagattaatattgcgatgaa

SEQ ID NO: 19098 - DNA, 1958 bp, Oryza sativa
cgatcgggcggtagccggccgggaggcaggcaggcaggccagcgcccgcggcgccgcgattcgtgcgctgcgttgtggccttgtgggtgagcgaactgtttccttcgaggtgagagcagtacatccgcccaaatatgaaaaacaaatttggattggaacgaaacgtcgtctagtacaacgaatctccatacgtacaaacgaacactcatccttataaatacacagttacactttacctctgtaagtatattcgaaagattggatcggcgtatcttgagattgacgaaatcaccacagacgtcttgctgtcgataggtacatctcctatcactaaaaaaaatagccgtaaatgagagcacacatatcgtgtctagcacataaaatctgggtggactgattcgaccacaaggaacctaaccatgttaaaatttgataagacaacaaactaatggcttgttcactttgctaccattttcaacattaccaagttttggcattgccaaattttggtaaggttggcattgccaaattttggtaaggttatcaaaattttggcaaggttgtcaaattttgacaagatttcatatgtacttactgaaatttggcaataaattaaatatagccactttttggtaactttgccaaaaaaaaaaaggtatggttgaaaatagtagcaaagtgaaccagccgtaaacatgctattgtcgatacaaacttactaaattttggtaattctggaactttccactcttagggtatgtttggggggagtttctagcagctacagcttcttctagaatcttcagttgctagaagctcccccaaacaatccagctttttatccaaattctaagaatgtaaaatttagaaaataaactagaagctagaagctgagtttcccagcttctccagattctcaccggctagcttcttctcaaaatcttaagctactccaaaaagacccttaaatgttttaccaaacttttgtaagaacacaaactaaacattctcattcacatcttaccttattaaagattgataatgtcaaataaatagcattatcaaaatataattgttttttaataaagtgggtgtggagattatggataccccatacctacacggcatgtataggccgactgggcgtggggtgccatgtatagatagaatatctttagagagattcgggttaaattctaaacttgtatgtcaaggaaatacccgagatcctagtcggttacgattgtattttatgctgtcactacttattccgttaaggatatggactgtattttgtaatacggatcccatctcccatataaggaggggtccgggtgccttgaggggcacgattttcttcagatcatacgatcaataatcactcggcggatcaatccccggataggagtagggtattacttcttgattaagaaggcctgaacctgtataaaattccatgtctctaaacccatccacttttccagcttgatagccacccccttttagtattgccgaaatcttgtttcgacagttggcacgccaggtaggggtagcgtcaagttcttcgccgactagtgagatgggtttcgtttccggcatcaacgacttcgtcttccctcctgggcaggcgtcccggttcggcagcctcgacttcatcaccaacgacttcggcaagatttctctcctcgactcggattcgaaccagtcgggaagaggccagatctccgccccgttcggtatcccgaactcggccgaggtctaccccaagatcatctccaccgagttggcttcaaaccactcggacaagatccaatctacttcaacacgacccgatcaagatgatggggcctattcgccaatcctgatgaaactccccgatgatttggctgctgtcttcaccacaagggcatcttctcctcgcaagcctgggcggaatccggcttcagccccggcccagc

SEQ ID NO: 19099 - DNA, 3097 bp, Oryza sativa
gaattatttgcctgtggccctagcggattctgcccggtcctgacttcacgggttacttcgtggcacaatcggatcatgggcggaacttcgcgaccacttcattgccaactttcagggtacctttgaacgccctggtacacaatttgatctctacaacgtcattcagaagtctggagaatccctttgagattacatccgacgcttttccgagcaacgcaacaagatctccgacatcaccgacgacgtcatcatcgccgccttcaccaagggcattcgccacgatgacctagtcgacaagtttgggcgcaagcctcccaggacggtcaagcagatgttcgaaaaagccaatgagtatgccaaagccgaagatgccattaccgcgtccaagcattcgggcaccacttggaagccgaagaaagatatgccaactacaggggggagtggaagtaccaatcacaaggatcgcaagcgtaagcctaaggaacttgtggcaactactacaccatcctcccgacaacgttcgcgctcaacacttttgacaaaatcatgaactcccaatgtctgcatcatcctaattccaatcacgcggccaaagattgcttcgtctacaaacagtttgcagaacaatacgccaagaacacatgcaaaacttctgacggagatcaaagcacgtcaaagaaaaaggatgatgaagatgatgccccgactggttttcaagaccaccgcaaggaactcaaccacatcttaggcggacccctggcattatgaatccaagagaaagcaaaagttgaccgaacgggagatcaacgttgttcagcccgacacgccccaatatcttcggtggtcagagacaacgattaagtttgaccgctcggatcatcctgaccgagtggtccacccggggcggtacccctggtactagacccagtggttcgcaacgtcaagcttcgcagatccctcatcgatggtggcagtgcactcaacatcctttttgccaagactctggatgacatgcagatccctcggacagaattaaagccgagtaacgcgccctttcacggagtcatcccggggctatctgctacaccacttggccagatcactcttccggttactttcggcactcgggagaacttccgtacaaagaacatttgttttgaggtcgctgattttgagacagcatatcatgccatactcagatgcccgacgttagccaagttcatggcagtcccgcacaatacctacataatgatgaagatgcctagtcctcgaggagtcatatccctgcggagtgacatcaagcaagccgtcacatgcgacaaggaaagctgcgagatggcccagacccgcgagatcactctcgcccgagaagaaatccgactggctgcgtccacatcaagcgaaggagaagtgcctgcaaccaagatgtcaaagagcggagaaagcgacgccaagaccaagaagatccccctagatccctctgatcctactaagactgctgtaatagacgctgagttagattgtaaataggaaagcgcgctcatcacctttcttcaaaataataaaaatatttttgcgtggaaaccatctgatatgcctggtattcctagagaggtgattgagcactctttacatgttaaagaagacgctaaaccaatcaagcaacggctccgtcgtttcgcacaggataggaaggatgcgatcaaggaggaattgaccaagctgttaacagcaagcttcatcaaggaagtccttcatgccgactggctggccaacccagtcctggttcagaagaagacgggacaatggcgcatgtgcgtcgattataccgacctcaacaagtcttgtcctaaagatccctttgggttgcctcgcattgaacaggtagttgactcaacggccggctgcaagctactcagttttttggattgctactcaggatatcatcagatccgactaaaggaatccgactgcttgaagacttcattcgtcacgcccttcggggcctactgctacatcaccataccttttggattgaagaacgcaggagcaacttatcaacgcatgatccagagatgtttttcaactcagatcggccgcaaagttgaagcttacgtggatgacgtagtcatcaagaccaagcagaaggatgatttgattatggatctagaagagacctttgcgagcatccgtgctttcaggatgaaattaaaccctgaaaagtgcatcttcggagtaccataagggaagttgcttagatttatggtgtcctatagaggcatacaagctaacccggagaaaatcaacgccatcctcaacatgaaaccgccgagctcccagaaagatgttcaaaagttaactggttgcatggcggtgctcagccggttcgtctcacgactcggcgagcgggggatgccttttttcaagctgttaaagaaaactgacaatttccagtgcggacccgaagcacaaaaagcctttgaagacttcaaaacacttctcactactccaccagttttagcttcaccacatccgcaagagccgctgttgttatacgtgtcggcaacttcccaggttgtaagcacagtcctggtggctgagcgtgaagaagaaggccatgttcaaaaagtccaacgaccaatctacttcgttagcgaggttttggctgactccaagacaagataccctcaggttcaaaagctactatatggcgttttaattaccgtcaggaaattatctcactacttccaaggtcactcggtcacggtggtcacatcgttcccactaggggatatacttcataatcgcgaagcaaatgggcggatcgcaaagtgggccttagagttgatgtctttggatatatccttcaagccacaaacttcgatcaagtcccaagctttagccgactttgtcgccgagtggaccgagtgccaagaagacacgcctgcagagaagatggagtattggactatgcattttgacgggtcaaagaggatttcaggcactggagcgggagttgttctaatctccctgactggagagaggctgagttatgtattgtggatacatttttctacgtctcacaacgtggcagaat

SEQ ID NO: 19100 - DNA, 2771 bp, Oryza sativa
gtggcagaatacgaggcgcttcttcacggactaaggattgcaatctctttgggaattcggcgtttgatagttcgtggagattctcagttgattgttagtcaagttatgaaagagtggtcctaccttgattgtcacgactggaaataacccaacgggcgttccttacgtgcgtgtattattccttgtcccaggaggcaaggtacaccaaaagttgatacaatacagagtttaacaagcggaagcgtaaatagttaatttattacatgggcggcgaaggcccagcacacatgaagacaaacgaaaaacaacggaagactagggcgatgaccacaggcgcttgacggcaggcacgagctagacaccaaagccttcatcttccaggaactcctcttctgggtttgggaaaaattgagcaagactgagtacagccaccgtaatcaacaagacgcacccacaagtgcagaataaatgcaagggggtacaagggagttatattatagggggttagggtttgcagtaaacagcattaaaagacacttagttgctcaaagttacttttaaaaacacgatcctagagctatacaatattattaaataaggtcgtgaacccatacgaacctgccttacccaagccctacgatgattcagaccgaactggcaacccgaccctgggtcccagcttgtcccaagccaacccaggccaaccattccacattttagttgttaagcaggtttttaagaatttaaaacactaacttgggtacattgctaggcttgcctataaccgagggcgcggctattcgaataggttatactctaatcagaggtgtacatccttacccacaagacacatcttcctcacgtgtaaccacgtgccacataccaccacggtatacggacaaaagacgtgacatagttcccaacccatcatagccatagacaagagtaccgacccagccccacctacggccggaacctccgggacaggtaggcaggactgagcccctagcagcaggacaccagccctgtgccatgacatctcgactaccgggccacagctcgtgtagccttcatttgtcctagagatgtccatcgacccccgacttcgtccatctccatccgtgtacttttgtttataaccagactgagccacaaactaagccttacccactagacatgtggaagcacggtagtgctttgcaacagaggcccgaagaccggtccttatgtgggcgaggtgctactatcaaaaccatgcaccccgagcccaacctaaaaccattttgatggttttgaatagagggggaggtgtgaatccaattccacaataatctaaccattccacaatgtccaagtgatatgaatattcccaaagtctagagttataaaaccacctaatgttgcctaattaaacagcgaagcatctacctaaattcatactagtggtaccatgaatagagtacccactagttggggttttgtttattctagggtgaacaaggtaataataacaataacaataataataaggtcataacaaaggtaaataggcatggctaaataaaacagtgataacgcgagaatttaaataaagcgataatgcattaatttaaatcaaaataattttataaactgggattcaatatgttcaaggatgatgtgacttgccttgctcgctttcccaaacgtcggcttcaacctccacgtatagcggatcttccggagctgcagcgtctacacgaccaatggaaaggaaaaagtcttttactctaataaactccatataacaagcaggaacaaagcacaaaaatgggttcttgacttcttgaggaaaaattagagacttgaacggtccaattccgagttcaaatggccaagttatggccatttgaagtttatatgctctttaagtgaatatttgcgaatttcttcatttaaattttaatttaaaatggatttattgcgtcagccgaggggagggggcgcgtggaccgggtccacgggagtggggcccacgcggcagcctcacggtccacggtggaccgggcacacccgggctcacaccggccggcgccgtgggccccacgcgtcagccgcacccgagggcgcgggtggctgacggctgggccccacgtggcggccacgacggtgcagccggcgggaggcggcgcccgcgcccctatggttgccggcggcggccataggcacggcggagcggcggccgagagaggggaagggaagggggaaaagaggcggcggtccacggctcaccccgagtcgacggcgacgacaaaggaggcggccggagcggaggaaggcggcggcgcggctcgggtggatggggacgacggcgctctggcggtcggcgagctcggcgaggtggtggacggggtcggcggcgatgcggagaagccgaagaaggcgacgccgaggcgggagacggtcccggcgagcggagagggccggccggaggtcgtcggcgacggaggagagagagggcgacggcgcgagctcgattccggcgggaagacggtgcggcaagtggcggaaacgggtgagggaggcgcggggagggtttaaatagggttgggagggagagagggcggccggcgggggaggaaaccggcgcgggaggtccggccgccatcaatggcgccggcgagatttgcgggagcaaatccgtccgtttgaatgcgagaaagagagggagaaatgggggtaaagggggaggggatcacggggaataattccccccacttaattgctcgcgg

SEQ ID NO: 19101 - DNA, 1696 bp, Oryza sativa
gattcggcccatccgaggggagagagattttagggtttttctttttataaaaaccttttcaactttgtttatttcttaataattattatttgtgctctgaaaattccactaaaatttatttacacattttaggcttttagaaattatacaaaaatcctccaagccttatttgacttttaactttgcacattttattttttggaggctttcacaaggattttaattattctaggcataattttaaaggatatattttagggtcgttttaggacgtgacattgatgataacatgaccgcttaccggcaggaggtgcgcaagttggaagataaattcgatggacttgagctcacccatgttcttcgacacaataatgaggcagccgacatattggctaatttttgttcaaaacgggaagtagccccttctgacatgtttgttgaacatctctacgagccaaccgtaccaaggaaagaaacaatcgaggccgcggacactcaagacgtaagcgtgattgaagccaactggagagagcccctcataagatttttgacaaatcaagaacttcctcaagataaagatgaagccgagcggatctccaggcaatgcagactttatgtcattcatgagactgagctgtacaagagaagtccatcgggaatcctgcaacgctgtgtttctttggaggaaggaagacaattgctaaaggatatacattcaggtatctgtggcaatcacgctgccgcacgaaccattgttggaaaggattaccggcaaggttttttctggcctacagccgtgtccgacgctgacaaaattgtgcgaacatgtgagggttgtcaatttttcgcccgacaaactcatctaccagctcaggagttgcaaaccatcccgttgtcttggccgtttgcggtttggggcctcgacatggtcggcccgtttaaaaaggcagtcggtggttatacttatctctttgtggctattgacaaattttccaagtggattgaagccaaactggtcatcacaatcacggcaaacaaggctagagatttcttcatcaacattatgcaccagtttggggtatccaacaggatcattactgataacggcactcaattcacgggcggagtatttaaagatttctgtgaggacttcggcaacaaaatttgttatgcctccgtagcgcaccccatgagtaatggacaagtcgaacgtgccaatggcatggtacttcaaggaataaaagcgcgagtttttgaccgactgcatccctatgccggcaagtgggtagaatagctgccatccgtactttggtctttgcgcaccactcccagtcgggctacgggccagtcgccgtttttcctagtctatggagcggaagcgatgttgccaagtgaggtagaatttgaatctctacgatttcgtaacttcagcgaggagcgctacggagaagaccgagtagatgatctcaaccgactggaagaagcccgtgaagcagccttaattcagtcggctcggtacttacaagggatgcgccgttatcacaatcgcaatgttcgatctcgatcttttttagtcggcgacttggttctgagaaaaattcaaactacacgggatcggcacaaattgtctcccttgtgggaagggccgttcataatttctgaagtcactcggccaggttcttaccgactcaagcgt

SEQ ID NO: 19102 - DNA, 1292 bp, Oryza sativa
gttatcacaatcgcaatgttcgatctcgatcttttttagtcggcgacttggttctgagaaaaattcaaactacacgggatcggcacaaattgtctcccttgtgggaagggccgttcataatttctgaagtcactcggccaggttcttaccgactcaagcgtgaagacggtactcatatcgacaactcttggaatattgaacatcttcatcgtttttatgcttaggcattacttctgtattttcctctttgactgttaacatcaagttgtcccttgagttatcagtcgggggctactataataataatggagtgtgatttttatcaattcaatttgcttacttgatttatcattgccttgtttgattttttggctcagtcaatgaagactgaaagtttttaaaaacttttgcgggttctaggctcaataaggtttgacaaaaacttttaagaaatcaggagctgagtttaaatcatcaagcatagcataaattcatcagtattgcacaaattgtgcctccatcatcatcattaatatcatcaaaatacaacatcaattagactcagttctttcatcatcagaattaccagacccagttggcttaaggtcgttgtcctagaatctctcaaccacatcagcggctatcttgtcagtggccttttgcgcatcactaataaggtcaagggcggcctcgtcacttgtcccgtcagcaaagccgtcaacagcatcaatatcaatcttcgggtacaagtacatggtcatcgccagcgctaggcctgctcccatactcccagcttctttgatgttcttaaaatatgtatctagagcagctctcagcttgtcgaagatctcgatagcatcaagtgaactcggatcgttgttattgaaaaacattgcctggacgagtggcgtagcggcattggtgacttcatctctggctccttcaagcttcttaattttattaactaagacgtcgaatttggcctgggatttgatcttgcggtctacacgagtaagtttacatcaatgactaggtgtgaagatgagagtggtttttgaagtgttagttaccagtaccttcgacatctttcagagccgagtccctttgttttgccaattcggccttgtctttctccagagcttggatgcgcttttccagctcggatatcttggcagcttgcactgtattgcttcttgttggttgatatcacaaggatagcagtataaataagtcagacaaagacggtatttaccttttgacgaactgctcagctcaaagttggaatcttggag

SEQ ID NO: 19103 - DNA, 1017 bp, Oryza sativa
gtcggacagaacaacacatcctaactgtcgctatcatcccacagaccaccctcgttctgcaattgcttcacggacacgtgtagctacttcaatagcatcgtttaggggagggtagctccagctatttgaaatctacaaggaaaagaagaatgatatagccacccagaattgtggatatacaagtacatccttgtgaacctcaagaaaatctaaaaaaaaagggtacttgaaaaaccactagttatcaggtgtagttacttgagcataagttgtcttgttgatttacatcttttcattagcatatctactaatattttctgaattgtgagttaatctacactgtccatgtgccataaacttccacttaccatctacaccaactattccacaaaaacaaaaatatgtcagcagtggtcaggaactcaggatagctcagttggtaaagcagaaagttcatgtgccacattgacatagttttactgtatttttatgcgagccttgtcattaaagattgtcagagtgacaacaatagtatttcccacacaacgataattgatggcaacaacaacaataattgacataattctactatatgcacaaatgaattcacaatgcattagattttattcaagtaaatgcagcaaatgcagaaaagaaaagaatttaataactaggatcaaaatcaatgaagcatgaggattaagaaaaatcaaggtgccaaaataattaaagtaaaaccttcaagggataaggttcagagtttataaagatattaaaatagtgaatgattagtactacagcttagctttcagaaaacggacaaatggtacatgcttaagttatgcactattctattaggcaagtagccaagtaggcagtataaatcaaaacaaattatcattgacaggattgatagacttacatcttccaatccagtgaaaggacggacaactcctcgctcccgtagagtcttgtgaaaagcaaaaaacttccatttacaatactcagtcccaatga

SEQ ID NO: 19104 - DNA, 1512 bp, Oryza sativa
acccataaaaaaggtaggagcttgctggaaattacgtgaattttaatatcagcttaccctgtgctacaagcctcacttaacatacttatagaatcagctgttacaacaaaagcatcagcccatgcaagatgccccatgtgcgggttaggttctgcaaaaataaaatcaacttgttacaacttacaaatgtaacaacatgcataataaatatattacatcatgaataacttagtgttatatttcatctaccttccccatcccaaatatagatcttaggatgaccagcgaactctttcgatataatatcagagacctgtcagcagataattaaacttaaatgccaagttctttaacgatattataacagaaaaaccagaataccaatcgtcctacctttcgcggtgttctcctggaaaatgaaactctcacactcccacagctgtctagaacattatacgtagaagctatgagctgcctggcaaggtcgacaccatacttacaattccctaatcattgacaaataacaaaagtcaatattggatctgggcatgaaaatcaataatgggacacatacaaaactgtaacaaaataagcttaagataaaaaggattaaaagccaacagaaattctgttagctctctgtaagttagacatgcaaaagcatatccaagagtcccaaggcagttgactagtcgataatacttctgaaaggtgtacagagaaggatataaaagatcatagcatcgaaatgctttgctcattataagattcgctatatgtttatagtcctcacatactatatacgaaattctgaccctgagttgatttgtatcataggctctcatgggttttaggaggaaagctgaaggctaatacagatatctaaacaacaacatcaaatgtggggttctcaatccacagtccacaggtagcatggagtaatggcacatcactagttctgcacccccaaagatctagggggaggggcaaagaatgcaacttcaggacataaaaaaggtcggccttttactcttgatgattctagcttctatggtatctttatgatgcatcacattagttaaaacaatttcataatgttccagggacaatggcgttgcaaggaacttttccttgctacgataaataagagatgatatccccttagagatcatcatattgagtaaagaaatcaattgagatatcctaaaaatgatgaatctcctgttactgaaagaaataacaggtgtatcttctatgcaactgactagccacatctaacagtaacacatcgacatatcatttcttattttttgtgtgtgcactcaggtgcgcataggtttctccatgagaaatcatcagagtgcaaccatttgaattgtggctagatttattcttgcaaactcaaagcaggactacgtatccaaatacagaaacaatggaatgtgcaacgtgagaaagatagggagatctacttgtgggtcctccaatgttgacgattagcaatggcttagg

SEQ ID NO: 19105 - DNA, 2154 bp, Oryza sativa
cccctcgaccaccggcgcaagcctcgtgttgcggaagaactgcctcagcacttgggcgatgagcttgtggagcgagacggggaggaagtgcagccactcgttgatccctccctgcggcctcgtcacacgctgcaagccaaaaaaaaaaacagagcaattcgttcaaaaaacggagagagagaaaaaatcaacagtagagcaggaacaactgcactggggtgagagagagagagaggggggaaactgacgtagagggtcaggtggtcggcgaggccgagggcgcggacgaggccgaggcactggttctcggcgccgggggagccgttgccgatgacgacggcgcggcggacgacgacggtggcggcggcggcgccggtgaagatctcgggcgtctccatgccgccgacgccggggggctccggcagccggatcggcctcatcggcctagggttcgccggccgcaggccgatcccccacgaaccaagccaccggatgctccggcgaggatctccttctcctccacttcgatgaggaggattcgctcgtggtcggggtaggattggaaggttcgataattcgatgtgttgcgagatgtttggggggtttggtgtcgattcggcggccacagcggttgcgtgtttctgtagggttctcgagtttcaggcagttgctgtcacccactctctcgaattctccagttttactgtactactacttcccagggtcaaaaatatttacagtaccgtttaacacaaaatttcgtcaaaacttttaaaattcaactaacaactaattctatgaaattctagcaactaattctatgttaaaacaaaagttaagtttaagatattaccatcgtactcttataaacaaacctatgtatattatttgttttggttttaaactatgcttttgagaaattataatggtcggaattttaaaggttttatcaaaccataaagtacaagatattcttttttaccggagagaacaataccaattttcatagaaatatttgaggcgtacggtagtgaattctcattgtgcatgatttaacattagtcataggcataggcatttttagataaatgggtatttcagggcattgtatcacctacccctgagcatggcccgtggacagtgctcgggtcacattcgccccaccccccacccccctaaaaaaaaccaccaccacgcggtcctcaggggcggtactatggacacttctgtcacctgccctagtatcccgggttagagcctctccaaaagactctctatttagctctccaagttaaaatttagccaatacatgaaaaaaaacaagcttcaacagactctccatccagatagctaaattgctccttcggctagccaaatgtagccagcctcctccactggccaaagatgggtccgaccaccactcccagcaccatacttcctctctctcccatccacccaccactccaccagcaagctgcaagcaggggtgaaccgagggcgtcgttgatgtctggtccacagtctgccacggcagtcatcgtcattgccgccgcgccacggtcacgcatgagccgttgccgccgcagggagccgtcaccgccgccactgcctcccacttggcacgcgcgggaagacgtcgccgccgccgccacctgggagccgtcgccgccacgaggcggtcgaggatggatcgatgggccgatgcgggagaagagaaggaggaagagaaagagaaagaggaagaagaagaagaagaagaagaagaagaagaagaagaagaagaagaagaagaagaagaagaagaagaagaagaagaagaagggaatggaggctgacaagtgggtccctttatgattttggagatgtaaatagagagtctgtttgagcgaacacctagtttgactacccaaattagttgaagagttggccatataggtatttggaaagtctaatttggagatacgattggagatgctcttagaagcaacaaatcaacacagtcaaaccttgcatttaattgggcgtctgggtctagctgaggcttgttgagtctgggggtggtggaatggtagtgatgagctcccttcgctctgggtcctagacggtcacacaactggcctagaccagagtcggatctgcgatggtctcttattt

SEQ ID NO: 19106 - DNA, 569 bp, Oryza sativa
aggatcccccacctagccctaatttcagctcaagctgcataaaaaacatacttttaagagccatgatatattaattaggaaggaagtatgaatacagagacaaagctgcacttactactggggctatcaagcctccaaaaaagattatcccagttatgaatgagaatgatgtcaaatagagttgttcattggcttcgggtactacatcaggaaaaagaaaggaattaatagagattactgggaaaacagtatggtaaatttcttaaggaaacttattgagggccggtaatccccgtattaggcaaaaagggaatactagacgggatttcaggcatttcacttttttcactgcttgcacctctgctttcaaaagttctgattcgctgctgcacccgcaatcgtctaacctgagaaaatacccatattgtggtgaactgcaatctgctgtttcaacaagctaaaaatggactattaaactgaagagatgaagttcatatatatactagacacctcttccatcaaaaggaaaattttgttacggcgggtaccgagctcgaattcgccgtata

SEQ ID NO: 19107 - DNA, 4937 bp, Oryza sativa
  unsure (1)..(4937): unsure at all n locations
attcctgcagccctccaattaaactcaatgtttttcttgtgataaattcaaagcatgctatgtgcattgaaagagaaaggaaaagttcaaaatcatgttaatggaccgacaaaatgatgcgatctgaatttaaatttttttcagacaggtgaatttaaacattgcactgtacccatgtcacaattgattggcactgagatggtgacatcttctcaacaggcttcctccccataaggagctctagaagcactactccgaacgcgtatacatcgctcttttcagtcaacttccctgaaatcgacatggccgctaaatgtcacataatgaaagtagcatttcagtgtcaataatatagttttgtcaacaaataggagtatgatttgggacgaggaagacatagtaccatccaacaagtactcaggagctacataacccaaggtcccggagagcttcacactccctttgttgacactcccactagacacagcaagaccaaaatctgcaatctgcaaatttcagcaaagtacaacaactgaagcttcaccaaattttaactttgatcccagcactaggacctgctgtcaatatgaacaagatagtttggcctttctgaaaattaaaggagtgtaccttagcattgaagtctgaatccaaaagtatgttagacgatttcagatccctatggatcactggtggactgcagtgctcatgaaggtactctaatcccctgacanaattttaannttttaccagtgcatanttanntaaccagctaatcattcaccaaatcatttttttnctcttaaaaaagagcatcattcagtgtgaaggaaagtggagggataagattataagaacctggccgtgtcaagggcgatcttcatccggatgtgccagctcagagttgatccatgtgaagaccctgaagacaaccactacacatatcaaaagctcccaatctggaaggaagatctcatctcatggaagagctaagctgcagctagctgtgactgtgagtgagtgacaactgacaaggcagagcccaatcatacaggacaataaatactataccatgaagctgtgtttccagtgatcccttctccatcagctcataaacaatgtagtgattcccctcatggatacagaagcccaagagggacacaatgttggggtgcctgatcctgccaagcaaatccagctcattctgccaacaaccacaaccccaaagcaattcagctcaacaacactgaacaccatacttccccttatcaatgggaactgaacttttacggtacaatttactgatagtatatactgtcagtatataggttgcaagtttactgatgggctaatggcattgcgttgtttatactgacagtatatactactactagtaaattgtaccgtaaaagttctcaccaacaattgaccatgaccagcaacagagtcacctcgaattccttctcgcagtcgggcccgccgccgtcgagccgcttcaccgccgcggtaactccggcgtcgaacgccgccttgtagacgcggccaaacccgccgacaccgagcatgttgctctcgctgaacttctctgtcgctgcctccagcgacgggtactcgaacatcccaaccagcctcttcctgctcatcttcaccgagttgaacctgctcaagatcggcaccagcttgatccccttcgctgcgtctgaaccatgtggattaagccagaattgtaattacagatagctcaagaacccaaaattgggtgagcgattgaatgagcggggttaagatcgacctgagctcctggtgaccttgccgccggtgctccggcgagatcgccgccatagtgtccaagcgtagagcgtggaaaggaagatcgtgacggtggcgatgcaggcgaggacggcggcgatgaccagctcgcggtggaaatggtggtgcactacgatcactgcaagccagcacaggtagcttgagacccactaagtaggagtaaattaattggacatgaacagatgcgccatctttttttttttttggtttaatctttgaaacggccttgaatcctggaaagatttgatgacagtaaactctaacgaaagaacaggtacgattgcattaaaacacgcagcgagatttccgcaataacgttgatgccacgtttttccccctcaaatttgaacaaaacgtaacatcccaaaatgcagattttgagaactcaaaacaaagaagattttctttttgttcagctagaaataaagcagagttgttggttcgaatgcaggcaacacaatgtcgatccccccaaaaaaatatatttctttttgccatcaagaagaacagtgcatgcttaaccaaatctgcagagaggacaaactctgtaaagagaaacagttccaaactcgaaaccgacaaaacagtaagaacacacacacacaccaaaattctgaatttcagctttcagcaccagcaacgtacgtaccaacaggcggaggcgccggaactgccgaagacaaggcggccgtcccattggcggcggcggcggcggcggcggaaatgccggtggccacagtagacgtcgccggagaagaagaagaagaagaagaagaagaagaagaagaagaagaagaagaagaagaagaagaagaagaaggcgtatccctcccattggccaacgagcacgaagatagcaccaagaacaagacggacgaacacaggagcggcaatggagttagcgccatctccatactctctccctttctgctgccctctccaggagaccaggaactcgaaatttcgtactgcctttgtggcgatggaagggagacggcatgaaagtgagaagaatctcaaggagggaaaaagaaaaggaaaggagtagtgccactactagctagtatcactgccctatgctgaacctgccgccactatttgtctatggcaatggggttctctcttgtgtgtgtataggttgctgccattttattcggtgtgctgtacgtgtgcacggacggcagagcaaactggtcgcgtggggccagtttgacagtgagaccagccatgtgcaattacgagaaggtggcggggtcagtcatcagtgtgtgtgagagagaggctgcaaattgtgaatattgcatctgtggagaggacaaaaagaagaaaagaatcgccttgttttgttgtgttcttgtgcttggtttgttcagatccattgcctggatgttttcataatttggtcattttcgaaaacttattttacaaatagatccctaaaaaacttatcccagaaataatcatttttgagcgtcagagtcgctggcactgctatccaacgggacggcgtcggcctctctggcaccaccccttgccaccgtggcggtccgcgctgacgtggcagtggagcgcgccatgttggtgtcggctcccctcccacccacggcgccacccactagtgtagaggaaagagaggtccaagttttttaaaattttttgatatttttttcacacttaggagcacataggaacaaaccatagaaaaaattagttcaaacagacgaaatatgttacttgtagaatttttcaaagttgtatcgaaaagcttcttacctcgaaaacaaaatcttccaagtggaattttgagattctgatttcgctgaacccgacgaagcagagagaataggatgaactttttatatagatgtccgtagatatataatttgcctgattccgagttaatatgaaaaagttatatatgttttaaggaaggacactcgaatataacaagtaaaaatgaactcaacaaaccctaactttttttataggatgtaaaaaaaaggctcaagagtttataggattacggaaatcgaatctactaattttttccgactatagaaaaaacaaaaacaacaaagaacagaaagtctctcaccgataaatcttagtgcatttaaggagaggggagagagagagagagcaagagcaacactccgactcgcgctgggagggtgctgggggagggagcatcatttggcgtgctccccctgctacgtcagtatctggccgccgtattgtgccacggtggcaaggggcggcgccagccactcttgcgttcaaaaggaaccatttctgggataatttttttaagggtttatttataaaatatgattttcacaagtttccaacgcttaactcattttcaccggatatgttatctttgggatataatgagaaatggatatttaaccatgaattatttctataaagctatgaaataccaagaaattaactttgtgtaaaaaaattgggggcttcaagcccagttgaaaataaaaatcgctatgtgtttaatgtatcatgtacacctaagcttttcgtatacacataggacacaccaactaataagtttcaccgaagaatctagaaaaaaaatatacatgtgttttttaatatcattacactcatgggtaaagtcttaacatcaaattcatcatattttagctataacaaaaaaaaattgacagttttaaggttataaatcgatcagaattttatcttttttgtgctccatatatatagaatggatttgaagataagattttacatataaatgtgatgctactaaaagtacatatatatttttttctaaaatttaatttggtaaagtttgttatttgttgtacatgatgtgtacatgagaaaacttgtgtgtatatgatatgttcctgtttaaaagggaatggagcgaaaaagatagaaaacacaaataaaactattcaaatctcttaattgattgtccagtggccaaactggtccgggaatgtgatttattgtaaaaagaaaaaaaaaacagtgaggaatgcacatgtttaggaattaggactggctagggcgagtttagaaggaggatttggaaacccatcctctccggcatgtaaaatgga

SEQ ID NO: 19108 - DNA, 5083 bp, Oryza sativa
ttgtttgcaaagtgacgtggttttatattagggtttgttcagttgatccttacatggaaggggttgaagggattaggagagattaattttgttcttaacaatgcattgtctggttaatcttcaggagggagggattgaaaggaattaattccacttctcaatatgtgtgaaattatctctccaaattcattcaggctgcgtttgggaggagagtttggtaacccctcctccccggcatgcaaaacgaagtatgtgttagtgcatattaattaagtattattttttttaaaaaaatggattaatatgatttttaaaacaactttcgtatataatttatttttgcaaaaaaatcacaccatttagcagtttgaaaaacgtgcgcgcgtaaaacgagagatatgggttgggaaaactggggaagaacacggcctcaacccactatggagaggattaaccaaacaagaccttaatgtgaaataaaatcctcttcaattgccctttaatcccttttaaagaggtattaaccgaacaggaccttagcgggaatgctagaaatggaatccatgcccatcaccttcccaatgtggtactcccattgggcgatgcacctcttcacctcgtcttacacctgcctccttcccttcctccaccaagcggctaacatgggccacttcgaagttggcgctacgctccacgcctcgctggcctccgtcagtcctccttggactcttgtcgctatggtagccgcatgctcaaggctgcagatctagtgcctactggctcattgtcgacgaatttgggtgatccaaaacagaaggaggagagttggtagcggctggcaaaaggaaggatgaggaatatgcatggtagcagcgatggtgatggtgccctttccacgcctagatccagtgtccttcctcaagctcattgttcctccagtgtgtgcatcgagctgtgctgcagttctttgccatggtggatggtgatagcggcatgtgcatcgatgtcatcgcaactacaacggttttctccgcatgtgcgcggattgaggacctcacactaggtagggagacacatcgacgcgtcgtggaaaggggtggaggggctcagccatagcgataacgggaggcaaggtggagcgaacggcgattgtgatgacagagatggggattcgtcggtatctacggggcaccagccctagtaccacctgtatcacttgatacctacctggtattacctgatagctagcaggtaatagatgtgatacttacctaatatcatcccgtccgaacaaaatgacgtaatataatcgccctcagtattaaaaccggcatatctctttgtaattgattatttctttcatttcaaaatttagcaatttctagtatttaaaatttagcctagaatatagcagtttatccacttacattcctttcttaacaaatcacactattttcctttaatatcttacctatctcatcttctcaacccatcacagctatcatttgtttaattttaccaattttcttaatacataaacatgttcaattctagaaaaaatcttttattttgaaccaaaaaacttattttttgtgcaaatgttctttaactagctactagctggaatctgctgcgtgtatacgtgccaatttggccgcggtttctggctcgaacgaacgttcagtacgggcatgtattgggctgagctactgcatgctggagcctggaaaagaataaaaaaataggataatgctgcgtaatttgacatgcttcccgttattcatggaaaataattaatgttacaaccaactggcaatatcagcctggaggtagcgcggcgcagtcgacgtgctcacgaagtcaacgggaaggaggcgccgctgtacgtggcagtatccgagagcacacgcgtgagtcgcatcgacgacgtacgtagcaacggactcggcgcggatcgagctcgtcgcatgggctgctgcttgcgactttgccgacctcattaccttgcgagccggccgggccccagtactgggcctgtggaccagcccaagctgggccggctctagcatctccatgattttaggagattattaggggcaaggaataagttcatccgaggtcccttaaattgtcaacgaatccgattttcgtccttcaaccagaaaaccagatacaatgtgtccctcaactatcaaaaccagtgcaggtgaggtccctcggcggttttgatggcggttttggctgacgtggtgcctacgtggctaatttgtctgggtctttatctgatgtggcaatgacgtggcattgacgtgacgcttacgtggcaattcgatacagaaaaataataaattttgtgggacccgcatgccagtttcacacatgaattaaatataaaatagtggggcccgcgtgggcccacatgtcagctaaaaaaataaagatggtggggcccacatgtccctctcggctctccctcgtccccgcggaggagcggcggcaggagcggaggggcggagcggcagcggcggcaagccacaggcggcggaggtggtcggaggaggaggtcgccgccacatgtgagcagacacagaacgaggagagaatgagagaacagtgggactgggggagtcgggtcgacgagaaatgccgatggagggcaccggtgctggcgcaacaagacggacggcgagaggcggcgtagggagctcgtccccttgcatcctggtgagggcgccgggccggcggaggtggagacgggttcagtacccatcggcggcatggtgtggggaggtcggcggcgtcgtggcgggcggcggagtcgaggaggtggtgggcggcgagcgcaggtcgacgggcggccggtggagggtgccgaggccagtgccccgttagccaggtggcagcgctgtggcggagaagtcgaggacaccgtggctggcggcagagccgcgaggcagtggcgtaggtgggccggcggcttgctccaggtgccgtcggaggcggcgcggcagtcggggctccgtgagcaggaccgtcggcgcaaagacgacgaacaggagctcgtcccccggccgccgcgcaccgccccttctcacccgacggagaggacagaggagaggggagagagatgaacacagggagctagcggatcatatctgtcacgccatgaagtttcccctttttcttgctttaaaaatttgttaaataaatcgtccaaagaaattatcttaattaacctagagctaattctctatttaataaatgaatttaataatcgaattcggcgtggtggaatttttcttgagttccccatgctccaatacattaacgagatttttagtggaattttcagagccttggaaataactttaaccaattaaaaatgagcaaatgcaatatttaatcccaggaaaaatcctatcccctttttccctttttcccatttcttttcctcattttcccacttcttgggccgtcggcccagtccactcccccttctcccgcctgcgctcggcctccctcttgctgggccggcccgcccctcccttctctctctggacgccgacaggtgggccccacctgtcggtcgtctcctacctccagccgttggagctggagctccaaccgccgccgccgaaaccgtcccgcgccgccgccttctccgttccacgtcgtgccccactccgcgtccacgtgcacccgcgcccacgtcgtcacccacgccccgctttcctgccccacgcgcgctcgcaaggggcggattcaattttgaatctcctctctctctctactctcccacgtctctggccaaataggggccatccccggccacgtccgtccctcccatgcctataaaatccttcccccgagccccctctctcgtttcccttgcttgccgccccctcccgtgcttcctaccgcgctcgcgccgctcgccgcacgcaccgccgcttgccgccgcctccggccgcacgccgccatcgctagatctgtcgcctcgccgcacaatcaccgccgctagcttcgccgccgcgagagctacctcgaccgccgctcgctttccgtgcgccgccgccgtaccgctctcctcacacgccgccgcctactaccgccgccataccgctctctccacgcgccgccgcctactggccgcgcgccaccgccgctaaagctgccgccgcgtcgtgaaaccgccgctgtcgcgctcgccagtgtcgcccgcacctcggccgccacttggttgccatccgccgccgccggaacccgattccctcgcatcgccggtgaggaccacctctctctcctccttcctttcctctctcccgtgcacaccgctgccctccgcacgtgcgtcgtcgccttcggccgacgccgccacctttcgcgccatccgccgccgccgcttgtcgtcgccggcagacgtgcgccgtcgccgcctcgccatggccggccgacttgagccgtgccgagccagcaaccaccccccctttagccactgccagtggggcccgcgtgccgtcaccccctccctctccccttgtgccgctgacatgcggggcccgcctgtcggcgctgcccccctcccttgatgacgtcggctcgggtgatattgcgcaataaataattaaggactttttctttattaataaaaacacatattatcttctaaaattcataactaattcatccgagctctgtttaagtccattcaagtctcagtaaattcataaaaatccctaaaatccattaaaatggtttgttttctgtttcagtagtcttatagcatgttttgcttgtgtgctttgtttgtcgcgtagatttcggtcgtttcgtcgatccgcggtttctcgaagacgttgctgtggtctcattagtgcgagagcaaggcaagtcatgcattacaattgatcatattgtacccaatttacaaatatcctgcatttctattaaatattgcattcttttacaatgtcatgtgggatgggtcctattactcagccatttattgtttaccttatgccattgataacttgggtatcaaaatgattagatgttggtttaggaaatgcttagccatgcctag

SEQ ID NO: 19109 - DNA, 2375 bp, Oryza sativa
actggcttttgaggggtgggggtgaaacattagcgtggtgtggatggttaggggagggttatgcggagggtcttgtcacgatttccccctttgcagtatcatggtgatacttcggggcatggcgacatgtgtggaatcgtgtcttgtgggtacagttgtacacctctggccatagtaaaactattcgaatagccgtgcccgcggttatgggcgatcaactagattcaccgtgattagtctcacccctagtttagcttaatgaactggtgtagttcaggtgttggttgggcctgttgcaacgtggtgtagcgttggacagtgattggttaatattgattaattactacaattgttttaatgttttcaactactatttttaaatggctgctttatgcaaatgaacccctagcctcctttggttatatcctgcatcatatctcctcttccggtatgacttgctgagtacagtgggtagtactcagtcttgctctcttttcccccacaccagagctgaagatcttcctagttggagctgtcttgttgaagttggtttcgtcgttgccgtcaagggttgcctgtggagtggagtcgccccgctgcagaattcaagcgtccaagtctagctcgttttaccttttccgctgcatttgtaatcttttatatttttggtaagacgtggatctgtatgtcaacaattatcgtttgtgtaccctggctggtcctggacagggatttaatgtacattcagcttagaaattctggttagtaaatttctgggcgtgacaagttggtatcagagccgaccttgaccgtaggacaagccaactggaaacctaagagccctctcaaccccttttcatctgcatatgccttttgcacctggatttgttttgggaaaatttggggttttgcctctttggtttgtgggaaaaatcttggtcgttcattcagatcggatctttaaaattagctcagtctagggttttagtaagattttatttggagtttattcgacagtcactcgggaatctattgggtggtatgcactaagtcgtgtctaggttcgatggggcaattttacgcgtatcattatgactatgcatctattttatgcattaatttagtgtttagttagttacattagtatcctctgtttgggttcatcaaaagtgttatatgcataaaaatcagccatgctcagttatttgtttgagtaatttgttgctttgtttatttggatttgagcatgcgttgattccttatctctagcccgctgctacagatctatagcccgctgctcttctctctctttatttatctctttaaaatatgtttatagctggtttatagcctgctattgtacctgctcttaagctttattgtaattctaagggggggtgtttagatataggggtgtaaagttctatcgtctcacatcgggtattatatagagtgtcatatggagtgttcgggcactaataaaaaaactaattatagaatctgtcagtaaacagcgagaggaatttattaagcctaattaattcattattagcaaatgtttactgtagcaccacattgttaaattatggagtaattagacttgaaaattgttttagcttgtatttaatattttatgtaggtattcaaacatttgatgtgacaaaggtataaattttttttgttaggaactaaaaagggccatagcatggagaccgctttgcttccattccaccaatttcacttatggcaagtggtaactactcccatgatggaacggcctgcatttaccgggaatagcgtgcaatagcctttctgggtccgtaggcctggcctggaaggggcaagggcatagggatcgaggcgtagcgtagagtccactagggatgaaaacggagcggatacggacgtttaatgctcatactatattcgttttcatattttttaccggatacgaaaacgaatacggatagcttgaatacggaaacaaatacggattatctcgaatacgaataagaatcgaatatgatcggacacgaatacggaaacaaatttttctcggaacacgaaaaccaactcaacttctaatagaaataaatatcaatatatataattagctcattttatataaaatgaggtataatttataaatattttttaaaatttaaataatattaatagtatggactagtgttaagagataaactattattaaaatctataaaggtatattgaaggttatagaattagaaagaaatagggtatgtctcatgggtcctgcggatatccgaatagcactgttcaccggatatctgaattattatccgtattcgacggaaaccctgatatcatattcgtattcatatccgggagaaaat

SEQ ID NO: 19110 - DNA, 11867 bp, Oryza sativa
  unsure (1)..(11867): unsure at all n locations
ctaatattttgagaggggctaattcactttagccccaaattagcccatctgtttggattcttaggggctaattcagggctaaaaggtgagggctaataattagcgtatagaaccaaacagggcccagctctttctccacaatacaagctatgggacccacagtaatattatattttctttctttttttgagaaagtaatattctattttcagtcctgcttatttgcgtttcagtcatccaattagtacaaacaccatcataaaaaagaagaatcatatcttactataaaataaagttacaacccactaaatcctaaaacttaatatgcaaaataccacatcatcattcactaataattattacatcttaaacatcatgtgagcatgctatattatctataattttatgatttattaaattttagagctttaaaatacaaacatgttaaattatcatcccatataattcacataatattttaatatatatctccatcattttttataatattctatatacctatatagtttatcctcatttgcttaatattatttctcttctcgcattaagtcatatcacattaattgtttttagccctcagatgattaatatatggtccaaattatctccatcattttcttgtcttattaaaccatatcacctcaattttattttatgccttagatgattaatttatggttcaaattattttcctccttttcttctcttataatgccacatcaccttacttttatatttaaatcatcattttatatactatttaaattaccgtaaaccatatcaacttatgtaagattatatcgtctagcaattttacacattatttctacttattgttatcattctaaactcccgcagcaatgcacggagttttaccttgttgtatagaaaccagaaacattttcctcaacctatttccccaccattgctcacctcaagcattcgagctccgattctcgcccgcctagcgcgtcaccataggtgccagctggtacctccaacctatccttccccaccactgagatgctgctttgccactgctgtggcctctctcctcttcccaccttggcaacgagcaccgccacctccacaggcctctcccctcccctttctccagtcatcacggtccccaacacaacttaaaaatgattttacggatgcatcccctattttatcgtaggcaagctaaaacaacatccgcatgtcaaaagatttgggtggtttttggttaagatgacccgcatacaaaaatatgctattttcgtaggcggtcctcttaagagtcccaactgcaaaaatatattttcagatgtggaggttcctctccgccctacctccccctcacctccactcttttatttcgttcgtcccactcccaattccctcacccactgctccgttccccctcacttaccctctctttcccaatcagccggccggcctcctcgcctctccgagcggcagtggcgggattcgagcttggagcagcaacggcctcggacagccacaggagcagtagtgttggcttcgtgcagcggtggtgaccacgtcaccatgagcggtaaccacgatcacagtggcagcgtgcggtggatccactgttggcaggctcaggaaggatggatatgctgccagcgggctcgggaaggacaaatctgctgctagcagactcgggaaggacgaatccgctgcctggctcgggagcggctgatccgtcctcgcatgtggcggaaaggaggccgaaggacagcatgtgaccacggcaccaggagcagcgaccatgatcacgatggctgcgcgtgtgggctcgggagtgacagatctgtcgccggcgggctcaaaaagggtggggccngggccccttggctcgaaaatggcggatccacgctcacgttccatataaacaacggtcgcgtggtgacatttgacgccgataaacctctgcaacatttgcctcattgccacctagctatggctttggttttttttttaataagaccttcaacttggccacttgcaaaaattcgatctttgcaagcgcgccttattaagatgtctatatgcaaattatggtatcgcatgcggttttggcagtgcacatgcccctgaaaataccgattttcgcagactccttgcgcccgacaagtggagcactcaattgtgaagatcctttatgtagtaatgcaacctcgtcgttggaggctgtaggtggagcatgagagcatgatatgttccttttgccttgattgataccaggcttgttccttaagtatcatgctgacatcaatatggtacataggtaatagaatatctggtatctacggtatcatatcttatacatgtatcatgctaacgtcaacacataaagtgttctattggctgaacggtataccgttctctactcacactcgaacaataaacccaattgtaagtacaaatccggcacctatggtaatctacgtgtttccatatatatatatatatatatgtgtgtgtgtgtgtgtgtgtgtgtgtgtgtgtgtgtgacatgataattcatgttttccattttcggaaataaattaatttagccatatataccgcggatgcaccaaccgagcacgcattcccgcacatttaattcccggtttaattcatacacatgtctactatgtactggcacctgcctatatatatactgggatggcagcaaagggcacacacgtacgcacacctgtcttgcgttgcattccgttgctttctcttacgagcactgcgcaagaagcgagagcccaagagcagctagctagcaatgggtgtcaagctgttggctgacggctgcgccggcgcctcgtcgtcgcctgcgctgtcgcgggtggcgacctccgcggcgcacggcgagggctccccctacttcgccgggtggaaggcctacgacgaagacccctacgacgccgccgcgaacccggacggcgtcatccagatgggcctcgccgagaaccaggtctccatcgacctcctcgagggctacctccgggagcacccggaggccgccgcctggggcgtcgccggcgacggcggcggcgacagcttcagggacaatgcgctgttccaggactaccatggcctcgccaacttcaggaaggtacgtgacaacctgacaattgacaaactgctctgttttctaagcagcttgcttgtccacaactagcttgcatgcatggctcccgagtttgacttttacatctggatgattgcatttgtttctcactcgtcaactatcaatctgatggtcgttgactcgttgtgaataatttttgaaatatttgaccaaattcttatttattgtgtacatcctgtaaaaatgctctgtatttggcatgccgagttggacttctacaatttgattgcattttgtttcagcctcctcaactataatcagccaaatagttataaatatttttttgaagaaaaaatgacaacatttatacaataagtcttctaccaccttgtaaaattgtaagtccaaattttatctacaaagagaaataaaataaaatagactaatttggttatgaatgatactaacattgcatttagtcattttttgatgcgtagtgcagataaaatttagtaatgcatatttgcgaaatgatacataatattgtactatatgttacagattttttttttctaaaacaatacaacatgcataagatgggtgaaaatacacaaaaaaaaaaaacaaatctccatgcatgcaggcgatggcaagattcatggagaagataatgggtggcaaggcgacgttcgaccccgaccgcatcgtcctcactgccggagcgacggcggccaacgagctcctcaccttcatcctcgccgaccccagagacgccctgctgatccctaccccttactatccagggtagtcgttcaacctattacttttcgttccataatataataaattatactactccatctaaaaaaacgaattcctacatgtatctaagttcgtaggtaggatttgtctttttttttggacggagagggtagctatgaatctgaataaggttatatctatgatcatagctagaaaattatatttggaacaaaggtagcagcaatgcatacgactagccagtttgtactccatctgtgccataatataaggaatttcgggtgaatgtgacacatcctaatacaataaatctaaacagatagtctgtccagattcattctatatttgtactagaatatatcatgggacgaagggagttatgttgtgccaataatcctgtgcaccagctcagtgctcagcttcagacccatcagagtggctgacatgacatccatggcggctgtgcgcgcgggtgcctgtgcatgcaggttcgacagggacctgaggtggaggacgggcgtcaacgtcgtgccggtgcactgcgacagcgcgaacgggttccaggtcacggccgccgcgctccaggcggcgcacgacgaggccgccgcggcgggcatgcgcgtccgcggcgtcctgatcacgaacccgtccaacccgctcggcaccacggcgaggcgcgaggcgctcgagggcatcctcggcttcgtggcgcgcaacgacatccacctcgtctccgacgagatctactccggctccgtcttcgccgcgccggacctcgtcagcgtggcggagctcgtcgagtcgtcgtcctcgcgcgcacggcaccgcggcgaggacgacgacggcgacgtcggcgtcgccgaccgcgtgcacgtcgtgtacagcctgtccaaggacctgggcctcccggggttccgcgtcggcgtggtgtactcgcgcaacgacgccgtggtcgccgcggcgcggcgcatgtcgagcttcaccctcgtgtcgtcgcagacgcagaggacgctggccgccgtgctgtccgacgaggcgttcgtcgacgcctacgtcgccgccaaccgggcgcgcctccgggagcggcacgaccacgtcgtggcggggctggcccgcgccggcgtgccgtgcctgcgcggcaacgccgggctgttcgtgtggatggacatgcggcggctcctgctcggcgacggcggcgacgccgcgaccttcgccggcgagctgaggctgtgggacaggctgctgcgcgaggtgaagctcaacgtctcgccgggctcgtcgtgccattgctcggagcccggctggttcagggtgtgcttcgcgaacatgagcctggccaccctggatgttgcgctggagaggataagccgcttcatggacgcgtggtgcaaagcaacaattgggaaatttaaccatttgcaacccaacagatgtgaggtgaattattttgcacttgagaggtaccaagggcatgtgcaacagtaatcgattgctgccttagcctgctaattaggtaacttaatttgttgatgtggagtgaagagtgaggagagaaacattaactcgatcttggcctaagatataaggattgatgggcattttgaggccagggaaattgtacgagattgggagaagagagggaggggaataaaaatttaatttagtggattaagtttttttttactgtgaactgtttgctgctaccttggaggctgtgtgtgtaggctcaactgttctttttttccagaatgcagatgttttttttttcgaaatgattgaatccactaaaatactagtttaactattttcttattattttacccctatttgtgaggaccggtttagttcaatcaattttgccactctgatgttaatatagttttcacaaaaggagatgaacatctccctcttccacgaactgagtctctagatactcgtatttacaattaattatttatatttatacaggtaacagcggctatgtatctgtaagcgactgagtgcaagtactctgttttaagaacatcttgatctcccacgcaagctaaagtagcacgcatatgcatgtggcatggtaatatagtttttggccatgccatgtgtgagctagtacgatcaaaaagttcagttttgaaaaaaagttttggggatttgtttttaaaattatttaacaaaatggtttatgtaacaaatataactagcatggtggcccgcgtagattgcgtggctagtatcattatattttctctcatataatagcatatatgttttctcattatattattaaaatatattacaatgacaacatgattttaaattttgcaataactttacgaaactattaatgtgtaatattcatattgtattttatatacgtgttagttattaattatttttaatataaaattttagttatttgtaaaatatatatatttctatatggactctagacttgtcttttaatatttcttttttttaattctgaatttttattatttctaattgtatttctatgtggactctaaactcatctttcaatattctttaatttttaatttcaaattttagttacttctaaattgtattcctatattggctttaaactcttcttaccatgtttttcttaattttgaattttagttatttgtaaattgtatttttatacgaactctaaacactacttttcattttattatgtttattctgaattttagttagttttaaattcctatatggactctttactctacttctaatattccttattttttaattccaaatttcttttttttcttaattgtatttctatatggactctatactctacttctaatattcattattttaattccgaatttatattatttcctaattgtatttttatatggactctatactctatttctactctacttctaatattccttatttttaattgcaaattacagttatttcctaattttatttctatatcctcttctaatattctttttttattccgaatttcaactatttataaattgtatttctatatgaactctagtctactcttctaatattccttattttttaattctgaatttcagctatttctaaattgtatttgtatataaactcatctttcaatattctttaatttttaatttcaaatttcaattacttctaaattttattcatatattgactttaaactcttcttcccatgtttttcttaatttcgaattttagttatttgaaaattgtatttttatacggactctaaactctacttttaattttattatgtttattccgaattttagttagttttaaattcctatatgaactttattctccacttctaacattccttatttttttaattccgaatttctattttttttttcttaattgtatttctgtatggactctatactctacttctaatattccttatttttaattccgaatttctattattttctaattgtattcctgtatggattctatactctacttctaatattccttatttttaattccgaatttctattatttcctaattgtatttctatatggactctatactctacttctaatattccttattttttaattccgaatttcagttatttataaattatatttctatatggactctagtttcctctcctaatattccttattttttaattccgaattttacctatttctaaattgtatttctatatggactctgtttttctttttctccgattaatatgagaatttctagaccgtgagagcgaacgtggaggcttatttttctattcctttaataagttaatacatagatagatagatagattaccttgcatgccatacggttggggattatatgtagattatcgattttgctatatctcactcgaaagattttttcttatctctcactcgattttctcactcaaatttacagtgcattttcttgtaagttacagtgtaatttatgaaacaaacactgtaacttttgtaagttacactgtaatttttgaatcttcacatgtaaattttaaattttgtattggatttggtctttttcttgaggatatggtaatttaatgttcattatggtgtttcttaattgctttttgctttttattatatctatcggattttaatataaagattaaaaatctgtgtgatacgattataaaaatttttcgaaagatgtataggtactcccgtagattatatatagaaattcagaatccgttctctgtcactccgtttgtgccttgtgcggttgtgccgctgaatctgcagctgtcctgacccctacccctagacagtagagtctccattttcctaagcactgcactgcacgtgttattttttatcaccatgcatgtttgtatttgttattttaatttaaattgaaaataattatggtacattcacaattatatttgttattatttttgttaaaatttatagaagttgaattttaacttacatatttatgaaatgatatattttatattaatttatcttattaactttttttttaaaaaaatataactacttagatgacatacacgaaacgagaagatatattctcagagagattaaacactttccgctttggatgcacgatacggcaaccgatttatagttttataccatgataatttccgtctatatacagtagtaataaataactagtctccctacgaatttcaacgtacatctcggcgtatcgttacagttcgtggtggaaggacacgtcgacgtcagcctccgccgtcgtcgtctcagccgtgtcgttgtccctcttgttgcagccccagcggcagctccacgcgcaccgggagttgaacgactgcagccgcctggagtgcgccgccacgatcccggcggtggccgccgcccggggcagcacgacggcgtagccgtcgtccatgtaatccgtgccctccgggaacacctgccacagcagcgcccccgcgccgccgccgccgcgccgcgtcgaccgcagcatcgcgccatacaccgcctcgatgaacgcgtccctcgacgtcgcgttgaacgccgcccgggcgcccctcgtggacaccccgaactccgcgaacagcaccggcatgccgccgagcgcgccctcggcgtccgcgatgtgcgcctccacccacgacgtcgcgaacctcagctgcgcctccttcgtcgcgcccgccggcagcctgtcaagaatgtcgttagagctgcgacatctctgcgtctccggccgccgcggcggctggctgttagcctgttgccgcttaccaagtgtccgggtagacgtggacggaggcgaagtcgacgccgaggacgcggtggttgcggacgaagtcggcgccggcgagggcgacgtcggcgttggggttcacccggaggcgcgccggcggcgaggacgggccgtagaacccctcggcgccgacgccgagcaggtgcgccgggtcgacggacttgacgtggaacgccatctccgcgatccacgcctggagcgtgtcgccggtggggtcggaggcgcagcgcggctcgttcatgagctcccacgccatgatggtcgggtcgtccctgtacgccacgcccgtgtacgcgttcaccctcgtcagcaccgccgtgacgtggctcttgaagtagcccctcacggtctcgtcggagaagaaggcgtcggcgccggcgccggcggcggcggcctgcgcccaccgcacgtactgcgccttgccgccgtagtcgtcccagttgttgatcagcggaagaatcagcctgatcttgtgcttccgcgcctcgctcaccacgaaatccagggcctgcatgcgcgtacgcaggtggggaattattattatttttgaacggaaatacctggagaattaattaatcaattgaatatgaaatgcaagcaatcgatcgatcacttcgatagatcctttcaaaacgaaaatgacacgtatgtattatgtatatgtttttacgcgatcgatgctaattattgggtgaattgcgtctcagtttagaggagagatgcctgtcgtccaacccaactatgatggaatcgaatggaaattgatgcttgtggagatgtttgaagccagcaggtgtcttatctgcaagcacaatgattgtttattctgcatggtaaaatagcacaatgcatgctacatggcattcttaacggtttctgaatttgtggacaccaaagagttgtcccaggatactcatagtgtggtcagttcaacgataggattgtaaagctcaatccagtgtggtcaggagtacttttgtattgatcaccattagttagtaaatgtacaaatcatgtaatctagctatctatcatgtgaatatatatctcaatcaaggatttaaataaacgcatcattaggtataggcacagctaattgatcaatcgacgttgacttccacgtgttaaataatatttggtttacggtaaatgaaatacaggtattcaaatgtgtgatctaaacaatatacagttcaatcaaaaagaaaacgaaatatttgcgagcttgggtggcagctggctagctacgtcatcgtcgagctcgctcaccttgaagacctcctcgtcgtagactccgggtgacttctggagcgcccgccacccgccgtcgttgaacgcccacgtccggcaaaccgtgagcccgaccgccgccgcctgccggaacacctcggtgaccttccccctcgtcgacgggtcgacggcgaggaccatcagccagtacgtgttgaacccgttcacgtagaacggccggccgccgccgacgacgaactgcgcgcccctcgtcctcaccatcccccactcgccgccgccgtcgaccacctcgctgctgctcggaccatcgccgtcgtcgccgtcaacgacgatgtcggtgaggcgattacagcgccactcccagtatgatgactcgtgtagaacggcgatcgctgcggccatggcgagagctccgaggaggaagaagaagatgcagtggagcagggatgccttcctcctcgcttcttcctccctgtacgacgtctccatggccgccgccgccgccggtggtgaagctccacatggctgcaatttataccggagggaggcatgggagctgagcttgatgagatccatgtacgtacagtcagtgagcaagacagggtcgtcttggcttggaagcaacagagagagagagagagagagagagatcatggatgcagatagatggtggtggctattactatcatggacattgctgagactgatacacttgttttaggttaaggttttaagcaaaaggaatcgttaagatgtcgatttgggagggaagagattgagatgatggatcatggattagatttggcggtgctggggaagcggcaacgcaaagcgtacgtggctgcacgggagaaaatcgacgcgttcttgttgggaatgtgggcctttgtgcttctgtcttttgtgcgttagttgggccacgcccttttcgtaaacaggccttgctgggctggattttgatgtgcagttcgggttttgcttgcacgtaaccccctcataatggctcactctcttcccctcaaaatgattcactgaactggtgtaaaaaaaatgatacactgaacttattctgaaaaaataaattattttagtcatctgaactatttcattaaaacacttaaccctgtaaactatttcttttacttattttgtacagggccagtcctaaggcagtgcggtcaggacaactgccatgagctcctaaggccctgcaggctggtagtagtagtataggtcagtgcagcttccattcagttttagatctcgatgttattgattccaacttatacagatactctctccatctatttttgatagacatatttctaaatctgaaaatttatttttgataggcatatttcaatctaaccacctatcatcttaatgactttctcggatttaatgcgtaactctcca

SEQ ID NO: 19111 - DNA, 715 bp, Oryza sativa
ttcataccctccccgcctcgatcgcagccctgcgatgacgggcctcgtagtacgcctccaaggctgggtaagtcggcggttgtccctcctcggccatcctacatgaaaaagtaataaattcaccgttagttaccaatgtgacatatattaaaagaaaatgaatgcgagaacatgagtaggaaaacaaaatatttacctccctaacacttaaattttttttggacttcttcttttttggacgcttaggacacttagttttcttgtgaccctcctggtgacacaacgagcatctattttgcaccggcgcagcatcaagttgaacgcatgaaggtggtttccttccagaaccacccagacccgagtccatttcgttcttgaatcgtttcgatctcctcttccctcttgttttaatcttcaaatttgggtcagcaacaaattcttcaccattgtacgatggccactgtgtggggtcgaggtatggctcaaagcgacttgcccatgtgttcacaacggctcttgaagagaactgatacggcattcggttgggagattccttatcaattgcatgaatcagataaacgtgtataagatgtgagcaaggcatatggtagagcaatggcctttggcaagaacatgagttcccctcaccttcaactttgaaggctcttgcgccgaatctaacaccaccacgtgttataccacgggctgcaggaat

SEQ ID NO: 19112 - DNA, 722 bp, Oryza sativa
attcctgcagccctattgaacaaagaatagagagaaaacttagtagttggaaaggaaaacatatgtctgttggagatagattggttttgattaattccgtcctttctagtttagctatgttcatgatatctttctttgagattccgaaaggggttcttcaaaagattgattattatagatctcgtttcttctggcaaggggatgatcataaaaagaaatacagattaactagatgagatataatttgtcaacccaaagatcagggtggtttgggtgttcataatttagagattcaaaatatatgcctgttaagtaagtggttatataagttaattaatgagaatggtgtgtggcaagatttattgaagagaaagtatcttcataataagtctataacccaagtggataggaaacaaggtgattctcatttttggtcagggctcatgaaaataaaaaacacatttttaagtatgggctcttggattgtgaatgatggtcaacatataagattttgggaggataaatgggtagaaaacatggccttcagagataagtatccttatttatatgctattgtcagaaggaagagtgctactattgccagtgttatggcctcggttccgctaaatgtttcttttaagagagctttagttggacagaacctaactctttggtatgatttatgtgcttctattgctcacatccagttggatgattcttct

SEQ ID NO: 19113 - DNA, 3842 bp, Oryza sativa
acatacaaaacaaaactagtccacatcgaacatcacataatccacataatgcataagtccatcacatagtccaattcataggaaacatacaaaacaaaactaatccacatcaaacatcacatagtccataagtccatcacataatccacaactccatcacataatccataagttcacaagtccatcacataatccacaagtccatcgcatagtccataagttcacaagtccacatgtgcattaaacaagttaacacatatcagaaaaagttaaacttcctagaaatcacttcttgcgttgacgccaaagagcttgcgagcctggagtgtacctatatttgaaaaaccaatgttcacaacatttacaaatcgaagcgagggaaatcaaataacatatgagaatggtaagcccagtgtaactctttttccttgaccgagtggatcgtaagttgtaggtggtgggctgcgacgcctgagacacatcgggcagctgcaacatgcctatctcgtctgcgtctggtgtgatgtagtcgtcgtacaaaaataaaccaaacaacttttaaaattgttacggtataccccattcaccattcaccatacaggactgactttaccgggggcatcgtcaaaatatgtctacgtacagaccattcggggtcgctttgacttttctttttattagaaacgtttgaccatttgtattatttcaaaaattagtgcaaatataaaaaagattcatacttaaattgataataaagcaactcaaaaaagagtaaataataattccataattttttgaataagacgaatgataaaaccttacaaacaaaaactcaaagcgacaagtattttaggatggaggtagtactctcttcatccagaatataaatatctagataacttgccatgccgcatcctccttaaactcgatctcttctggataaatttccttaaatagattaatttctttaaccgaatcctccatgaatccgactgctggcgacttgataactcccatcggttgattccagaactctaaagctgatattgattttaggctgatgacatctttggggcttaccaaatttcactatcaacattggtggacagcatggtggcgacggcgaagcgggacggtgcggctgctgggtgacgacgattgagtgggggctcctcactctcacctccctcccgttgcccctgcctccattcatgacgagatgcggcgtcggaagcaggcagcgtgggtgatcctagctagctggggcggcacgatggagagggcggtgggtagcagcgaggtgtcgacagcggagtcctttcggacggcggcggcctgagtgtcgatgtcctgtccgtggcaggatgaagatggttcgggcggtggtcccgtaggcagtggcggcggcccgggacagtggtggtctgagcaccggcgcaaggatcttgtcgaggagcaggtggaggtcgaccttggcgacagcggcggcccaggacagcagcgaccttagctctggcgcaaggctcttagcgaggaacaggcggaggtcaacccaggcggcagcggcggtgggcctaggggcagcgggacaccgggacccgggacggcaatggcttgagcaccggcacgacgctcccagcgaggagcaaggctgaggttgactctagcggcggcaatggccctatgggcaacggtggcgccctgagaacgggcacaggactctcaatgaggagcaggtggaggtcggccccagcggcggcgggctgggagtacaaaaggcggacaaacatcctctgacgacaacgatggccctatgggcggcagaggccaaggaattttggcgaagtggaagtcgatcccgtcggctcgcggctagttctgactaaacaccgaacgatgatggatgaaagtcagatgaagatggcaccaacgaaggttgacaacgacggcacactaggggccgcggcgactagacgacttccactcgctagtatgtcgggaagaagagaaggaggggtgtgccgaggtcatttgtttttcttttcttttttgattgagtgttctcctccttgttgaggtgtgagtctaagtgttcttatatccttttggctctgtatatcctatccttcatgtatatagaggccggactaatgaaaatctattatctaaaaaaaatcttccactcacaccaaagccaaatataatccacacaaacaaaacgagctcctgccaaacttggtaaaggtgataggcaccgaaagccacctcacttccaatggacggcagaatcccagctatagctagctagcttaggttcttcgttccgggatcagttgacagtgtcccccatcacatctgcttcccctctgcatcgtctgtcaatacgatccgcggttcggctggtttccactttctccaggcagactggcgtttttccaagctgtcatttgctagtggttgctattagtgatttgattggaacctgtagtaccggctagtggatgtcgttcacatctgatgttccaagaagcaagagcagcgaattaaccaggtttgttcatacagcaacgagcagcaggaagcaattgcacattgtttgaacattcactgaaccgggaggtgagatagccgttccttgactcatgtcatcactcatcacatctgatcagggtcaatgaggaggaatatccaatattacctttgtttattaccaacctcttgaaattaagatacttgaacaatgctgaaaaattctggaaatacttcaagagtagggcactggtattatatacataccaataccatcctgaaaatgttagaggacggtcagggcaccaaggttcagtgttgtgcaatatgatctatgatgctgatctacttgtagtttaatacaggatgggatcaaacagctgaaagtacagaacttctcgtagttgtaaaagggagtatgtagtcaaaactcagaaagggataagtgggtgatatcttccatgctcttttattacaagattacaactgcattaggaggtaagaatctcaacccccttcaatttagaggtacctatacaattactgcgattttgaaagaaacatagatctgctaaagaactaaaacatacatatatttagcccaaaatgatgcatagcaaggctagtagagcaagtaagataactatacaattagctattcctgacaagaattctgttgaggcacaccacaaatctagggagcaatattagagcttgcaatttgattttcatcttccatctggtgtcatgagctgggagaagatgttgcttggggtcagcccatcagactccacgctcgcaatgctacggtcagtgatgctcaaagaagttgtcgttgtagtggtagtagtcacgtcggtcgacggctcatctgaatgcagcctggccacaaccagcggcgacgtgctcgctgacgtcccctcggtcaggctgctactgtcctccgtgctctcctgcagctggagcgcaaactcgaggttccagagcacatcacccatggacggcctgtcgacgctgcgatcggccacacatttctccgcggtctcggcgaacttcaagaagcactggggagcgatcttccctttgaggagtgggtcaatgatctcgccaagaacacctttcttctggcaacgcagagcccagtctgcaaggctcacttgctccttcggaagtgatgggctcagggcgttgcgggcgcacaggacctcgaacagcacaactccgaaggagtagacatcagatttctcggtaagctgctgccgtcggaagtactcaggatcaaggtatccgaagctgcccttcaccactgtgct

SEQ ID NO: 19114 - DNA, 2202 bp, Oryza sativa
tgcacccgtgtgcaggtaatacagcccacgggcggcgccgatgcagatctccagcctctgcttccacgacaatggtgggttcttggtgttgtacaagtgttctcgaagtgtcccatgagccatgtagtcatataccaaaatcatctcattcctatcctcgcagtacccgattagagacacaaggtgacggtgtcggagcttggacagcatctcaatctcattctggaactcatggacaccctgctcagacagcgggttcccacgcttgattgcaactctagtgccactgtctatctctccaaggtaaacgttgccaaatccacctttgccgaggaggaaggatttgtcgaaattgttggtggcagcctggatttctgcaaacgaaaagtgccggcaaagattggctggcagcatcgagtggctccctgtgttggttgtctttcctgaggtggctgactgtgacttggtgaaatcagtgagaggagtccagcgtccttcatcagatttgccagtatcctttgctaccttcttctttcgtctacagatgatgcacaatccaacacaagcaatcaacaacacggcaaggccacccactgctccacctatggctgctggggcaacactctttgatttacctctactagatcccccattgggattcacaccaggctttggtggaagtggagggttgagcccagcaaggttatttcttccaaggtcctgtagcttgaagacctcaaggccatttagtattgcatcaaaatactctggtttgcttgaaagatcagggtgaagcgcgacccacaggtccgtctggccagaaccaaccgttgtgacaacatagttggtatatgttgttctgccaattcctccactccaaacaatgacgtccatttgattctgcgccgtctggttgttgatgtaaatgaaaaatgatctctgattcaccttggttattggatactggatctcacagaaatggaacctcaagaggtaggtgaaccccgcatcaaccggtaagatccatgtaagattgtagttcaggttgatctgtgcagttggccccattgaccttgctgttgcgtagactgcaactggtgcagtgtaatttggctcagtatttggatatttgatggtgacattaccatctttggagaaggtcaccccataggcagcaccatatatgtaaggagaatcattatcccaagaacgatagaatccagaatcaccttgcggagagatgggctgtcccccaacattgagccggtacatcgtttggagacccatcacaggatctatgccatattgcacattgtccccgccattggcagatgtaggtgtcggtgttgtgaagatgtcaggcgtgggcacaatctcaatcccattcacaaatgcataagacccgtttcgtgtggacggggcaaaggtgagttttaggctgcttgaagtgacattaaccgagaattctcgaaagaagtaggcagagcttgttgccagagcagtttgtgatgcgttgaagttgtctaaaaggatcagattgttggttgtgacaccaaagtaggcatttgcagaatcaaggttcccattataattagttggatagaagtgtaggcgcacgaacatgcggcctgggctgacagggaaggaataggtgtaatttgaagtgaagaatcgagcagtcatgtaaggcacgggtgatgggagcgaagggtcttggtatgaagccctggctacattgcctttcaccgatggcgcaaacttggagctagcatccccatcccagctccgattgtagctatcaggttgcacaccagaggctccacaattcagaaagattggagcagaggccgtggaattgttatcagccgccatggcaatcgataggagggctgacagtgtgagccattggatggtagctagtaggcttgggtgcatcattgaagtggtggttggtgtatcaggatcaaaagtttgaggattcgttcacatcaatttgctataagagttgggaacacttgcataatgccttttctctgggtgggatttgaggcaaggaaaatgtagagtttggaggattgtactcttgtttactgaagaaagcacatccagatagctgtaatcctgtagattcacctgcaatcagagcaaacgaagggttcggaaattctgcaaattgtagattggaaagatgaataacaagaa

SEQ ID NO: 19115 - DNA, 642 bp, Oryza sativa
ctttctcataaagagtaacagaacgaccgtgtagtgcgactgaagctcgcaataccataagtcgtttttgctcacgaatatcagaccagtcaacaagtacaatgggcatcgtattgcccgaacagataaagctagcatgccaacggtatacagcgagtcgctctttgtggaggtgacgattacctaacaatcggtcgattcgtttgatgttatgttttgttctcgctttggttggcaggttacggccaagttcggtaagagtgagagttttacagtcaagtaatgcgtggcaagccaacgttaagctgttgagtcgttttaagtgtaattcggggcagaattggtaaagagagtcgtgtaaaatatcgagttcgcacatcttgttgtctgattattgatttttcgcgaaaccatttgatcatatgacaagatgtgtatccaccttaacttaatgatttttaccaaaatcattaggggattcatcaggacagaacatactctgttctctagcagaattcttttgtcccacgtgccctccactcattcgatatatgattatgcatgaatcaatgcaaatataagataaaccggcgtagtcgttaaatttccatatccagcacgagcgaaggggtcccctttgtc

SEQ ID NO: 19116 - DNA, 633 bp, Oryza sativa
aaatttatacacctaaagtttatacatctccagtttacacatctaaagtttagagaccaaaagtttataagtcaaaagtttatatatccgattcaaatttgaatttgaattcaaatattttttatatatatagtatttttatacatctaaagtttatacacctaaagtttatagacctaaagtttatagatctaaagtttataagtcaaaagtttatatacccgtttcaaatttgaatttgaattatatctgattcaaatttgaatttgaatttaaatattttctatatatagtatttctatacatctaaagtttatacacctaaagtttatagatccaaagtttataagccaaaagtttacatacccgattcaaatttgaatttgaattcaaattttttttatatatagtatttctatacataaatttttctaacttttgttttttaaaaaaatttgtgtggtgtactgtagtagaaagagaagaagaagaggaggaaggggagaagagggaggagtatagggggagagacggggccaaccgatcgctgggcgatcgccctggcgatcgccattagcctccccctctcgcttgagcttttagcattgaaagacatggcccaggaatgcgcca

SEQ ID NO: 19117 - DNA, 513 bp, Oryza sativa
ttgccagacgaggatccccatcacggtggctccagggaatagggttcattccagcaaggttacttttgttgacatcctgtagcttgaagacctcaagaccattcagaattgcatcaacaaattctgggttggtttcaacatcagggtgaagtgcaactctcaggtctgtctgaccataaccaattgggccaactatgtagttggtgtagattggcacaccaattcctccactcaaaacaatgacatccatcttctgtgctgtctggttgttgatgtatacaaagaacgtcctctggttcgccttggttattgggtgctggatctcacagaaatggagccgtaaaagatagtggaatcctgcatcaatcggtagaatccatgtaagattgtacctcaagttgatatatccctttagccccatggaccttgctgtctcatatagaccaactggggctatgtaacttggcatggtacgagggtaactgatggttacagtgtcatccttgaaaaagt

SEQ ID NO: 19118 - DNA, 7919 bp, Oryza sativa
tttttttttgagattttatgatgtatttgatgtgtgatgtgaatctgtgaatttgtgatatatttgatccgtgatgtgaatctatgaatatatgatgttatcattgatctatgatgttatatgtgaatctgtgatttggggatgaagggagcaactcaattatgggaaatcaatatgcaagcagtaaaaacaaggaaaaaaagaaaataaaactttagtcccggttggtatatccatctttagtcttgaattgggcgtcccagtttacaatccaggactatagggggttacaaaccgggactaaagaccacttcaccaatagtgggaataggtccatctgtctatgttaccgtcctcaactatcatatttgtatgaaaaataatcctcaacatataaactatgtattattcatctcttaacataaaatattttttcactttatcccaaacctaatacgaactgagatgctttccaaaatcccttatattttaggacggagggagtagtacagtaaaataaaagatgggcatcacctgctaatcaaatactactcactttttcttccttccccttctctatcttttacatgaaccattatcatgatgcacaaggctcccacaattaatatattacataaataaacatatttatgtgtacatagcaaagaaaacataagcaacaaacttgaaagccaagcaattaaaagcactttctctttcagttcaatgagaaagaatctcaaacgggtgctcccccgactcccgtgtcgctctctggggacgacctgggggaggacaactgccagaccccattgctacctcccgagccgctcacctcgacgccgctgttgttgatggtgtcggtggcacccacacccaccccctttgaccttcttcatctctttgttccctttccttctttttttttcttcacaaatccagtttcaggttggctagttggccagatccgatggctaggacttaatggggaggtttgctcagtggatttagggcagacgtgatgcggatatcactcttttggatacacacaacaatcctccaatggtcattcgaggacagataacaagagctcgcgcgcgacaattgaatttagaagtgagctcgttcctatgttcttctttgtacgaatttgagaaaagattgctacctaggggcagatttaacgtataaccgatgggggcccaggaccccagtcaaatttacactcctaggtatattcatagtagtatgacctatgggcccccactccaattggaaaaaaggaccccactcctcctagttttcgttccctcaatcgcaagtgcgcgtgagtcgaggagtcaaacatccgctcctcttctttgattctctaaattccattattaagtggcaaatatgcaaattagggattaaggaagggaacgggaagctaatccacctcatctctcgccaagtcatcgcgtttcccacatgccatagttcatcttctcggcaatcgctgcttccttccttcctcgttcgctcgtcgtcgtcagcgcctcagcggtgctgcagctgctggcctactgctcactctgtcctctctgcctccatccctggtaagtactcctttccctccctgaccccttcctcctctcatattatagtagattgatctctaggtctccctcatgtgctctatctaatcaaccatcatgattttataggaaagataatggacaagtttttgatctaaacaaccgttgagaggtgtttctctgctatgaagattgtctaagaatgatttgcacaataagatgggtgacaagtttctgagccatagtctcatttgctttgtagagaaggatatgttagacacaataactaatgatgtgattgtcgatcgtttccatatggtgatacaccatcgtgaaaaggataaaaaggatgccatgttgttctaaaccatatttcttatttatatatcctactttcagtaatatttttatcggtttgtgttaactaataatttgtattgtttttacatgcaataacattatttggattttggaaggcatatctatacattactatttaagataatgtaatatctcagagtttttataagttgcaatgaggtgagttttacttggctttctaactgttctatgagttatagatgcgcccctagtcattttttgtcctgcgtccgcccctgttgctacctaatgattatattgtgattaggattaatggaggggacaaggagacacttggagaaggacttagagtcatggaggatcatcgaggacgtccaagtcaaggtggaggcccaaaccaagtcgacctctggtgcaactcggagtccaggaccagtctgcactaaaacgggcgcccaggtcgcatacgttcccggattggagcgttctttatatggatggaaatctaagaagataacctttccaatggttttggttccatgttcaaattctttccgagtcaatggtaatcgaccgaacaagttgatgttcagaatctgttccggtgctgcgtcaccatatttgggcctttgggccatgtatcgtgttggaggccattagggctgcgttaaggcttggttgcacgaccctaaactctatatatcagtacccgccgtcatctttagggtttgtgttttgcttagattattctgtcaagaacagtttcgctgctagatcggtttgtaagaccctaacttgtgagcttaatcattcatctgcaattttggttgtatcttctttgttcttggttgtgttcttcgattcgcaaacagggattagccttctcgacgaggtcatccacgtttcggcatgggtgataaccagaggagacgtggtgctgctattgcggggctcaagagcgtgctcgttcaagaagccagatcaatttgtgttgcgactcagcccaaatcattgattatcagaacctttcggaagatcgggaaccctagtgcacatcaagatggacggtggccgtccatcggcgccatcggctttatctcctctgctgacagctttgaatctaccccaatcgttctccgtacgatgtaggtacaagtagcggcatggctagcctagacgatgctctgtgttgggctaggtggtgtcacttgcgtccaagccacttccacataaggcttatcctcttctgaggttgattttcttccagatccaactgtggggagccatgtgctacagtggtggctacggtagctatgtggtgtttggtgttcgaggcacaaacattgggtgtgcaggtgattttcaggtgtgcaggtggcattctatggcttccctcatgaacttcgtggttggatgtaaccctagggtaaaagtgttgctcggttttccagtgctagcgacaacaatgccctcaagtgttgttcaacatcatggaggcattgctacgtagctttctccaccacctcaagaggtctctctaggtgaaaaccttatattcattttagataaggtgttgttgccgttctatcgacgtgtccttcttaggagtttcccttgttggattgctgattgtaggaccaatgtgtctagtctatgtggctaattcgcttaaaatgtaagggtttttactagtttcctgcaaataaccatgcttttgtaaggtttttttttggtgggaggggggtggtttccctcataagctagatcaagtcttttcttctataatgaaattgcaggagctccaacgcttttcggaggtttacctaaaacactttgtgtagaggtgaagatcatactttaaggcatctcaaattagcaactaaggttggcttactttcatttgcttcaatatataccaagatgagtataattattttcctataaaatgggaagaggtatagaagatcttgcatccaaaagcatattgccaaagctgagcgaggtgtttcattgtatttgcgtcaaactccaacactgcatattaaaaggactatgtaagaataggtgccacaaagtctccttaagcagtaggttgcaaacaacacacgtgagatcattatgttgtggtaaacaatgttttctatccaacatgcatatcccttttgttgagtcgatcaatcaaaaggagccatcccactttaattttcataattaacacaattgcttttccatatccaattcaagtagactgtaggccaaatagacataaagttgatggcataaagtttctaagagttataagaagaattgccccaagtatatacccattgaccatattgctaagtcaaagatatgtctaaatcaagcttttgcaaggttataaactcatgatatgctaactctgaaagaggtaggcggattaaaaatctctgcatgcatttttccaacaactttataaatagtccttcagattatgtgcaaatgaacaaattagaattctatagatcttactatctcattcctcttcctagtagagacatgtctttccatctgaaatgaagcatttggctatccccctcaagatgtcaacaaatcgcaatatatttttctacagaaagaaccttgcaccttagttgcataagaaatagaactactatataatacttatcctagattaatctaacctattggcagcgctatcgaatttactagagattctagtcttaaacagttaaccttctagtttgcctgttctatttaggctataagttgccgatcagaactctcggtacctagtttttggttcccatgagggggcaaactcagggtcatgtctcacaagaagtaggtgcaacaaatagagtaaatgagtaagaacatgcagtgaagcaaatacacaagcaaagcaaacaaggattttgcatcgaagtttggatctgaacaatccagctctgctaagacagtccaaggagacagacctagattgatcccaagcctcaccgagctaacaactaggaagaagttttagcctctaagcaaccaccaaaacgtagcatgtttccatgcaaccaccaaggtccaaagcttagacaacaagcacctatctccagtgaagcttgctctacaaggcaacctcctagacgatgcctagactgctagatagagaaccaccaaaaataacaaacacaatgatgaagcatgatgcccatccctaagtgtacttgctaagaaccctagacttgaagctcaagagatctaaatccctctcattgacaaattttttgctgaagtagtaaggtggagaagggtacaaaccccagggagcctatgggagtaggctgaaagatgtgacagccaacacctcaaaagaggggatactccctcatcctcgcaactagccattactcacaaaatttcgatcaggatggccaaaacttccggtcacacttagtctagctacgaaaaggggaagtggaacttagggtctaaaagacttgaacttcaggtccaaggtctatgtttcaacgaagagtgatgactagaactttcggtccattgaccataacttctgatccattgactagaagttccggttagcctctatggccaaacagaaactcttgacctaaagtttcggtggaaactactgaaacttcaggtctaacttgaacacttatcccattttgcccattggtcgtgtggtgctttatgtctctctacaagatcaaggttattctagagaacttagacgcaacaccagatgaacttttaatttccccctttttggtggtgatgataacaaaactcagagcttacaaaagatttataattaatggttttgaatgaatagggatacaagagaatccccctaaatatgtgcaaataaaaataattaagttaattaagtttcacatgcacatatttgtttgacgcatgggaacccgtatctcttctcattcgtgggatgcaacgtgtgatagatacacgacaaaaggaagtctaaatacatatggcatggcattttcacaaaaaaggataaaataatcaccaccatccaaaacatgcatacacaaggattgcatatataaacaattaaaagctaaactagcagtcattacaccgtagacaaattgaaaatagtaatcacatgtccaacagaaaatgtattgtctaaggtgacaagaggaatcaaaacttccagtggatagagttcaaagaaaatgagttacccctttagaagaccatattgctccctccttggcatcaagacaccaaaaaggcaagaaacacaagacaacaaagaataaaatcgatcactcggaagtggtagaagcaacatccccttctttctcttcttctacttcttcaatggctccttgaagtggagagctctcttcctccataaggatgctaccaaatgcttcatggaaagcacaaacccaggaaatcccaacaccctaggcaactccttgagaagcctcccccttaccaaaaggatgctcaaagtgaggagcttgaggctcatcaccagactcatcgaagaggcatccacatgcaacaatgcaggcaaagtttatgtctcttccccatcctttggaggcacatcttgttttcaatgattttgatggcgttagcggtgtacactaagaacaaggctttcagagccttgttgataggagagtcatgcttgagtggggatgaagcaccagaagtagaagcatgcgtagctttagaggtgcaagtgttgatcttggaagcattagaaggaggaactcggagggggggggtccgaaaggcttgctttatctcctcctcaaagacggtcttggttaccatcttgattatataagatatggtgcgtaagcacacgtccatctaggatcaatgtctataaagtagatctcatcccaaataaacttcatcacattgagatatgcttccttgggtctcgagtaggagaggggatcaacctccctggactagagagtagtaccatcacccaccttgagattgagactgaagtggaagaggttgttgaacacatactagtggggaggcaaaccatcagacgtaccaaggcaacctagtggtgcatttgctccataaatgaaagacaactcatgtttcaacttgtgtggcatggtttgaaggccctaatattggatatccatcatgtcatgttgaagagcgcaagcaaacttgacaagagtagtactttgtgccttgcatcctccatgccatcctctcttgattgcccacaaacctgacaagagtacaggagtacttggtgccacgcatcctctatgtcatcctctcttgattgcccggatatgggtctattggcaccacctgtcaataagcgtgttggcctggaacaaagtttatgcactttatagtttaattccattatataaaaaaatatctagaaatatatattatacatagaacttattggaaaaggaaagtaggctaaggccaagacgtgaagggaaaataagtcctttttactctctcaaactatttcaccggagcacatcacccctaaacattttttttactcattttacacgccaaactatttaaaacagttcaccttactgcttaacgatatttctcttttatttgttctctatataagtagtattttccactaaaatttggtaggaatgatagatgcattataacttacctctaaacattttttagaattttcaaatgcaaatgagccaagccccaaaatgaaaagatgggtcagttcgtgcaggcgtcacgctcttgtttccgccacaaccattttgtatggagaacattccttgcatgcaattgagttttcactcaatctcttttatgcctttaaattttgtgttaggcgttacatgcctcgagttttaattttaatcccctatataaccattttgttagttgaccattattttttttaaatgactatgttactctttttcatacctatctggcagctagcttacaaagataagtcca

SEQ ID NO: 19119 - DNA, 4112 bp, Oryza sativa
tatatggcacagtgtgaccgggggcccaccagccattgggctgggcgcccccgatcagggcgcgggtcaaggcccccttgagccgttgggctcaaggggagggagatccatctaacagtcttggcctcatatcatgttgaccgcatcggatggaattgccatggaaggagggaaagtgaggctaagaaaatggtgctcagatgaacctagaaccatgcataaaactcaaaataaaaacaacaacctccctggcaataaaatcaccagggaaaccaacatgtacaaaccctatgatggtaaaactaagtgttgtttatatatatatatgctagattttacaattgttggatggtgcttggtgtgggttagtcagttggccaatgctacaaaagcgtgtgtttggggtcagggtcaacaaagctggtggtgtgctggcagtgccccttggctagataatattagtatactataatatataagagttcataatatatttttatttctagggttgaaccattgaagtaataatatgaaatttgatatatcatttcctttggtctctttttaactaagacattttatactttacgtgtaaaaccttataactcagcagtcaaaatcgattgacaactaatagaaagtgatgtacctgcagtgaaatgtattttaaaatgtggtctaacaaaacattataaaagaaacataaaaaaggtcaatctctgatagaatcaaaattggttggttctactcgcatgtagattgaaaatttcacttaaaaaaaatacggaaaggtcccactctttccaatcaagcaagggttatcagacaaaacatcactacaaaatcatgatgaccatattcctacaactcgttgccaaacactaccttccagtttgttttgtactatctgttcacccattactcaactttaaaaagctaggattggccctctcttcagtcctcacatcaactcaccaaaccactacactgttcacgaggcctcttctcctttggattttttcacttcttcatgattctccgagcaaaaatgctacaccgacaaattaacttaacctcagctagcaacaatgattccacaactgaaaccaacactatataaagtagccggagccctttcatttataggaagactcatctggatgagcagtaagttcgtcaactatatatatatatagaaaacatttcatacaattgaagtaattttctccttctacatacagagtgagaattagaataaaaatacactaaatataactttagcttgcttatattggtgatggaagctaattataatccgacttaacacctctacacgtcaaaagatgtatccaataaccaacttttcatgctattaatgaacaaaattagcttgtaacgtatatacttgtgttgtttgttcaagtagtaccgaaatgctatcttctgccaaacctttctaatagaatgcacaaacaattaatagtaccactttgtctttagaaggaattccatgttgatcatttaacaaaaataggaacatctctcctaaaaacacttacaatagtatagatgaattatagtcaatttagattgccgcgcttacaattagttctcaggaaacactatgctagataacgggaggccatcatcactttagtcttattttcgtcaccatcatcatcatcatcatcagaccttgtagagaccttgtagagacagtacatgttgtactctgccttgtctctaatctacgttaatcagcagaaatcaaacttgacactgcctaaagacaatggcacaatagttgttgcgaaaacccctaagattttccagaacttgtaaatatgcatgtgaaatttgtgtgtggatgtagcagctagctagctccacctatcttccacttccacatctcccccataggattatttgctggatccaccagaatccggcacagaaatacatgcaatgaggagtgaaacgttacaacacctcccttataaataccctaaccccacacaagaaacccctcctccatattacaatcaagagaggaaaaaaaaacagagagagaaagatcaagagcatataatctatatatacacacaggcacgtcgcgagtaaatttcacaaaactacatagactacgtggatccgatactccgatcccgacccggccatgagaaggcaaggaggcaactgcgaggtcaactcctccatcgccctcctccaggagaggttcaggaacctgcagaaggtgagggagatgagggaggggagggagcagctgctgcagacgccgccgtcgccgacggcgacggcgacggcgatagccggtgcaactaccactggtgctgctgcgtcatcgtccggcggcgagcagccgaggtggttctcgcacccggagctggtccggccgtcgtcgaggccggcggcagcacagcgagccaccgccgacgacgatgctgccgccgttcgtcagccgccggcggtgagcgttggcagggcggcagccatggttttgcagagctcggggtgtaggagcgatgtggaggtggacacctcgcttcacttgtgaagaagtgaaaattaagtagatagctagtagtagctagatgcttatttagctcggccgaattaatcattttttcccccctttgatccttctagttcttgtttttctcttgatcgatcacatcttgtatgcgctcgtggatgctgtcgaatttgaattaatttggttctagttcatgttgattagatgtttagatgagggagtgtctaaggtgttgtaaaattaaatttctcaaaaagatctactatacatactaagtactaattaactacctcagatcaatcactattttgggataaaagattctttttgggtttttttggggagagggccagaaaattcggggaaactaaaattgaatttgggatatatttttgctgaatttgaacaattctttgcttcaaaatttgttttttttttccagatgtacatactaccggaactcatatactctctctgtacttaaatatttgacgtcattgacttttttaaacatgttgaccgttcgtcttattaaaaaaatttaattcattattaaatcttttcctatcatttgatatattgctaaatatgtttttatgtatacacatagttttacatatttcacaaaagtttttgaataagacaaacagtcaaacatattttaaaaaagtcaacagcgtcaaatatttagggacggagggagtatattaatacacccgaagttgtggattgaaatcgtggaccctagctacatcataaatgttattacctctgtttttaagtttttgtcactgaacatgcattattcaattgttaattttgacccctctatttgcatttgcagaaggttcatgtatatttaaaatatgccatatacaatgacattgtatattatcctacagtagagaaccccggatttttatcctatgtgtgcccacgcaaacctcaacatgcaaattgaatccactactatagaaaagggaataggtgccggttgagaaccagtgtgtcagatttcctagctgacacccagtaggcggcacctttgagaggactcaaaggtgcctgttcctaaaccggcaccgttgaggtttcagaaatgcaaaagaaaagctaactcaatgcatcggctcgaatcgatccgatgcattgagcagctcccatcaccggtatccaagaacacatgaacagaccgaacaaacaagaacatcaagaacaccatgaacacatgaacatcaagaactaaagtcttgtcctctatgccggccatcacctcaccctcctcaccggccttctccaccatcaccgccgtcgccagatgaaaaggaggagaggaggggtgagcctctttctctaccaccactgtcgtgggacgccactgacaccacagtcgcccgaggatccgccacaggaagctagatctgtcgtggtcgccgctggatccgtcatgggaagccaccgacgccgccagatctaccgatgcccatccttgctcaccacccatccgtggtctccgtcgcgccactccattggatccacccagccgccggcgccgctc

SEQ ID NO: 19120 - DNA, 6304 bp, Oryza sativa
agccccgtgctacctcttccgccgtgtgtgctcggtgagcattttccccttcctctccttgcctcctcctccacttcccgcattgccgctgcgcccagtggtcgctggctatgaccaccaggccgtgtgccgccacagttggtaggatcggccggtgagccgcctcgctcctagttgtttgattggtccgggccaatctagggtgtccatgctcgtggaccaccctgtgctcctggtccacggtgcacccggcaacctccgtggactcggtccacagtaggccggccccaaggccggccccttgacctactgacgcatggggcctgcctgtcggcatagtaaaataaataataattgtgcaataaaacgagtttaatttcagaaatttatttgaatggctcaaaacttctcaaattcaaaactaattcatacgaactccacttgcaaaattcacctaaagttgagctctacacgtttgtttacttttcatgtactgtttactaggtttttattagggtttttccttgttttgcgtgctagcatgtagaatctgctgttctggaggatcgcagccgcaaggaaaagagttcagaagattgttcgaagatgctaggcaagtcacacattctcacttgagcatgttgaccctactttatgattttttactgcttgcaaataaaatgcatgtttttgataattatatgggaacaaggattacctatctgcttgcgtgtgctatgtttacttgatatccatcttttatcaaacttgggtgacaatttgactagcttgtcacttatgttggtattgctggaactatgatatgcttagccatgcttaattactactagctcacctaatgggacgatcacattatgtatatttagtatcttgacaagctgcgagctcgagacacctggccatatttattggtcgcaattatccaactaaaacatggcctaatggttggttgtgagtgcatggttttgattgtcacacccatgacaattaagtaccggttcgcgggaaacccttgaagacttactctgcttaattaccacaagcaagcgtgggtaactgctggacttgtagtatagcttttccctttttgatgttctcaggcaagggtggatgtgatggtgtttggatggaccgtgtggcggtctatgcggcttcaggattcatcatggcacaagagggggttgcccacctcagttttaagagagggggcaaaacctgcagcgtggtgcgcttggtcaggggagttatgcaaagggtcttgtcacaatcactcgcatggtgatgtgtccggccggggatggaaacatgatggtgggttgtgtcttgtgagtatatatagttgtatacctctggccagagtaaaactatttgaatagttgtgcctatggttatgggcaatcaaccagcatctatatcgtagagctgtaggccgaagtctctttggcagaccaggggtaagcaggtgtccgaagcaatcgataggggtttaccttaacttaattaaaataattaacccataggaatcatctctattctcaacctaccatttagttgttgtccttggaagaatcttgtacttagattatacaaacacgttccctgtggatacgataccctggaatactcttaggtgaaggctacaatagtatctgtgcagttctagattattctgtgttcgtaataaataccaacagctacttgaaattcatctaacgagaacaagaagaaaatgaatatgttttctagattatattctgcttatatgttattttgggaaatagtgttggctggagcatcgtcactactattcgacactaaggtgtcttaattgatcttatccatggaaacagaagaatggctatgagtttgccaaatccttctataggttatcaagtgggttgggtttttccttatccacctggacacgcatatataattcacgacccaggaatagcacggctcatttggctatgggctgtgctatcactgcccgtctagccatgctatgcttgggctgctacccatcccggtgtgccaacacaataagtacatgtagcgagccagcacgacatggcctagaaatgataggaaatggcctggtccatgtggcacggtggtgaacaatgactggcaaacaaccgtcagtcgagcaactgccatccaagttgaagccaggagaaaaggagaacggaagaaccgctgaagctagggcctaggggcagagaaagcaatggtggacgctcattgacataggccaaaagggcagcgtggtgacgcggtcgacccctttcgtgagcacaaccactaagcgtgtcagttgttgggggctcatcagctccgaacagagcaagtaggaagtgaagggccacgacagtgcttgacggggaggaagaggaatgagctatctgtcagcagagaaccttgctggagcttcgccggagtttgtgcggcaagatagaacagactcaattcacattattttttatggtatatgtcaattttgggctaacggacctccacccaacccacataccccaatcgtgctaggccgacacgacacggcccgatatctcactgggccgtgcggcccgtgcctggctcctagcgtcagcctcgccattttggcgtatagttggcctctgtcgtgcgtgcgtgagttatccgtcagttcgccggccgccgccgcctccgacgatccccatccatcccgcgagcgagcagggcgccgtcgttcgtcctgctgcatccgcccgcatccatctggtgagcacatcctccgccaccgccgcctgcgccgatccccatccatctgctgcttcctccgaaacgcatctctctttcccatctctctctacccacgcacttcactttttctcgaatttgcgttaaccctagctagctttctgttctagaaatttgccttaaccttaatactaataacagtttgtttgttcccaaaaagttttgggggttcaactgaacccccatgtcccaatgttagatccgccactggtggtaaaatgtagtacactgtattttatttttcaactttgttttgtaaaatcctttgtagaattagtccaatggtgttgatatcttggcccaccatagctttctgcatatagttattctacctttggattcttgtaaagggggaaaataagcacggactgatttgtttacaggatgatagatgatgcgtaattttgatgtagctttctgatttccgctaatctcatgttcctatctgtactgcagtaggatcaatggagacgaagttatcgttttatcaggacagcccgccaattcccatcatttctgctgttaaggttgccatttagttgcttcatttacttggtgtgttatttttgtgattctttggtgtggccatttttttatccttttgttagtttgcgttggtggaaattgttcgctggtcctatcagaagatataatattatccagaagtatgtgtgtggtttcattgacttgatcagtattagcattgaccactaaatgtgaattttgattttattttgaaattgagtcagtaaggttacagatggccagctagtatatatcagggcctttttttggtagaaatcctaactttaatgagtcagacaaaaggcataatattcaaaccgaaacatatagatattggaatttttttttttagatattgtagtggttggcgataacatatattcacagccaattcactaacattgcaagcattagcctttctcggtaagttagctaaacggcatgttatttaaaatcaaattagttgttcaaaataacgcatattcatagccaattctctggttgcagatattgttgttggttgaagattgtcattaggaacggtgttgtgttgtgggaggaggtcctttggatgagacaaggaggagccaggaggtcctctgaaatttccttccctcgcagaaaaggtgcacaaataaaacaaacaaaaaggaagtctgtatccccacgaccccacccatggcattcccctccacctcgtcggtggcgtatcccagaagtctgtccccactgcgccgctgccccggattcctcgccctccttgttgccgtcctccttttcctctccttccaggtacacaccacatctctgtactcatcatttcctcattgtaatggcgaactgtcaacggtttcagaaaacaacctactacagtgtactagtgtaggattcctgccttctcattctaactaccaattcaatgctacagctcatgattcatgttccctccatcagattggcagtgtccggatggctcttctccgatcaccagacgtaagagttaagaacagccacagcgttctccgtcccattgcacttatttaagattctaactttgatgttactatcttgggttcttgaattgtcagtgggcacaagggtcccgggagctgtcctggatgccacaatgtacagtttatctgatatcttctaatgacatatatgaggtcaggaatagttggatcctgtttcttgccaaattactaagtgtgcattttgtttacctgacagggcatggataatgccgataagactattgcttacacgaatcaggatggtcggatcaggctgttcaaagttaccacaagagaattcttgtcgtcctctatctggaagaatcctttgttgccgaaagataccgagccggtagctgaaatagtatgttgtgaataaaaacatgtttttatcttgccaagtcattgcaatttttcggtttacagttctcactgctctttcttctgctgctgtaatagcaagagattgcggaggagcagctactagccactgggtcagaagtctccaatctttcaagcacagaaactttggaaactagaactgatccaattaaattaaagagagaggttgatttcctatttgccttatatcgtaactattatcaatgacgaactttggaaactagaactgatccaattaaattaaagagagaggttgatttcctaattgtcttgtatcataactattaatgatgacagatattttacctgtatattatgttcctttcttgttcctattcgattaactcttcaccatctcagcatatctgatataccattatgattcctgcaggtgttccgacgtaaaagaaaggagcataggattcaggagttgcttcaggtggacaaggaggctgagctccatatgcgaaatgtagcgacaaacagatcgaggaacttcagtaacaaagtaagagccagctacaacatatggaggctgcagtttcaccatactaatacggattcaaccctgagacttatgaaagatcagataataatggccaaggtgtatgccacaattgcacattcccagaagcaacctgacatgtacgcgttgctcatgaagtgcataaaactatgccaggaagctattggggatgcacacatggattatgaacttgattcgaggtactctattttacacccttgaagatttaccagttcagtgtctgtttgctgtgacctggttcagttatttattgctgtgactctaaaggttcaattatttatcacccacatttcttatgcagtgctttagagcgagcaaaagcaatggggcatgccttgtcttcagctagagatgttctgtacaactccgatgaagtatctagaagattgcttgttatgctgcagtctacagaactaaatattgatagtgttaagaagcagaactcattcctggtgcagcatgctgcaaagacggtccccatgcccttgcactgtctgcatatgcagctgacaaccgattattactttcgtgatggtatgatcaaggaatatttccatgatgccgctttgaaggaagaagaagataaagcaaagcgtgaggataggtcactataccactacgctatattttcagataacgtccttgcagcctcagtagttgtcagatcaactgtgacacatgccaaggaaccagagaagcacgtgttccacatcgtcactgatagacttaattttgcagctatgacgatgtggtttatacgtcatcctcctctacctgctactgtccatgtggaaaacattgacaacttcaagtggctcaattcatcatactgttcagtcctacgacaacttgagtcagctcggctcaaagagtactatttcaaagcacatgatccatcatcactctctgacggaaatgaaaatctgaagtacaggaaccccaaatatctgtctatgcttaaccatctaaggttctacatgccagaaatacaccc

SEQ ID NO: 19121 - DNA, 1175 bp, Oryza sativa
cccgccggcatcccgtccgggcctggagctttcaggtcaccaatggcatctagggcttctttaacttcttctcttgtaaactctgcccggagcgactcattcatggcccccgatactttcctatccaccacatccaggaggttctgcgagttttgacccccatttgaggtaaatagttgtttgaagaattcgattatcatcgctcttttgtcttcctccctttccacccaggaaccatcctctcttcttagcttgtttatcctatttcatcttctcccctcagaacagctggcgtgaaagaatgacgtgtttcgatcccccttattgagccaattggtatgagctctttgcttccaatagatatcaacctgttgctcaagcttttccaacctataacgaagcacttcctctcggacaacttggtccctgcttattggttgacgacggcaggtttccagctcctttttcactttcttcaatcgtttttccagatccccaagaacatttgagctccagctcgataggccagccgccacccccgccaaggatgcatggaccagtagtccctgaagaccagccgacacatcccatgcttctttcaccacttccttgaatttctcctcttctagccaggctgcctcgaaccgaaaatcattatggccatttcttcctcttacgcccttgttcttcccttccagctcgataataaccggcctgtgatcagagtgacgcgggtcgccgtttatcactcttgcagctggaaacattgctctccattcgggattggcgaccgccctatcaagccattccctgatatacccttcctgcgagtgactgtggtttctccaggtaaaagcatcaccctcaaatcccaagtcatctaggccacagtctgtcagagcgtgccggaactcatccatcgcagattgagccttcatccttccacattgtttctcatgggagaacaaaatctcattaaaatcccccgccatcaaccaaggagttgttgggttgtctatcagccctctcattgtggtccaggttctatgctttgtttcagaatgtgcatctccatacaaacctgtgaaacgccacattgtcccccagcatctcttacttctgtgtcgatgtgatatttggagaagctccgaactaccacatcaacccccctcctc

SEQ ID NO: 19122 - DNA, 7518 bp, Oryza sativa
acataactcacgtcgttgatcacttcctgagtgctcacacacttactggcctccacagcagccccctttttggatgaaacaatgatttctttggtcgatctgacctctcagctggaaagcccttcttcaaagggctagttacttcatcctcaccctgcgtgcctttctcctttcctttcgagccatctgtaatctccttttgccaggaaggagcgtcactacctttacaactgctggcacccgatttcctttgcacttggaatcgactgccgctagttttatcactgcttccaccctcccatatttttcgttcaggaatgaaacggaggcttttattaaacaaaggggcctccccctctgcgagctttttctcacacaacttctccgtatgacccacgatgccacagatataacagaagtcaggaagaaattcatacaccagcgggcaccatagcggcctttcatctgcacccacaaacaaggtcacgcctctcatgagaggtttcctgatatctatccggatcttgatgcgaaggaattggcccacagctgatccatcctcctctaaatccatcgtcatgaattctccaacctccctgccgatcgccatacccgtctccttggtcatcagtcctagaggtaatttcatggcccttacccagatcgggacaaaggcgaagatcatatcctctatcagcttggtctcatcaagatctatcatcaccactagatctttgttaaacatccaagggccatcctcaagtgcacgcctcttccccgatgcctgatgaaacgtgaagagaaaatgattttctcccagatccttgcagctgactcccttgatcgggcaccaaatcttccccagggcatgtgccagtccatctgcattcaccaatttctctgccaacacctttccgattcaccctgaagctagctgttggtgccaccgcggatctagtgaattcaaatgacgtcttaatttggtgaattccactcatggatttgtttgccatcgcacggatctagtggccatctcatggatctagggaccatgttggtgtcaatgtttcatactgacaataataggtggtgtctagattcagaggtgtaaagttttggcctgttacgtcggatattatataggatgtcgcatggggtgtttgggcactaataaaaaaactaattacaaaatccgtcagtaaaccgcgagactaatttattaagcctaattaatactatgttattagcaaatgtttactgtggcaccacattatcaaatcatagagtaattaggcttaaaagattcgtctcgcaaattagtcgtaatctgtgtaattatatttcatgcaggtgtttaaacgttcgatgtgacagggtgtaaaatttctatgtggaactaaacagggctatagtaggggctatatacaagataggtttagctcctactccctccgtcccaaaataagtgcagttttgcactattcacgttcaacatttgaccgttcgttttatttgaaatttttttatgattagtatttttattgctattagatgataaaacatgaatagtactttatgtgtgactaaatatttttaaatttttcacaattttttcaaataagacggacggtcaaacgttgggcacggatatccacggctgcacttattttgggacggaggtagtacgttaagaaataatacattacccatgtattgatggattatatattctactgaatatattgatgatatgctgttggttgcgatcttgtgtggtcagttgttctaccttgcccattttatatgggttggagatagagttatcaggtaaggtaacctaaacctagctgaatattattttagtttgtaatctagataacatagtattcggtcagagctctatacactatcttggtttacagcctaatatgataaccaagttctactctatctcatattatatagatatgatcccctcctatttttagtcggataagcaaactgtgtgaccattgatatatgttacctatactcttcacaatcggcctcctccggtgagatgcatccatgatgacgataaatctagcgcgcaacgtctgttgatggcggcaacaaattccttatggctggaccataaacatatgggcaacctttaacttgaggttttatgtgtagttcctgtaacgtatatggattatagccaactataaggttcataataagattaagttatgagctttcttgttgcaccctaaatagaaagcccctagaagggcagttaatacttttgtaatcttcacattgtgaattgtctacattatatttggggtgtcattattaatccgtttgaccatgaatttttatttttgcattaatcttcagtgaccgcccgtcatgtcgccattgtctcagccaatggagaggggagggggagggggaggggaggataaggagaggagaggagggcccactcgcccccctgtgctaaaaaacggaacccgactccttgctcaactcaccgacatttataatataccaaatgtgtcaaggttacgggtaaggtataccctctacccttcgatatacgtcacatatcgatatggtatacttgcgcgtatacagacgttttcggcataagttgaggaaatccattatggagtccacagatgtaaggagtcctactcgaatagaactgggtcgtcattgtatcgtgtcgggtctgatgtctccgagtcctacttggagaccagttgacctgcggtataaaagggaccccccccgggatgacccgaggcatcgaatcttaccgccaacacatccaccatagcctacgaagccggagcctacaggagccaagtcgccgggtgatctagtcggatcaactcgactacgatctcgtcggtaccgttgagttccactattccctttgtaatctgtgttttcctccatataatcccatatcaactggattagggctattacctatcaaggggcctgaaccaatataatctttgttttctgcctgcttgatgtcgtattacgtagatcctcgtaccagcgtaccccaataccctctatatctggtctacgggtatcccccgtcgacagtggcgcgccaggtagaggggcttggtgcttaaggttctactactatgacatccagcttcgccgacaacaacgtcaacactaacctcaaccaaggagtttctgcttcaacaatgttggtgtggactcaagtcgacgaaatcgtcttcccggtttacaccacggtgccgatctcagccgatctgtcaatggccgaaaacgagaacgcagtggctacaacccagggcgattccatgtcgaaggatcctcccgccgaagaggagatcggagcgtcgacgacatccgagcccgagaaggatcctagtgcagccaagccttgtctctccgacaagaatcacgagccgacgaggatgaattccaaggtgacaaggtcctagtgtcctatccacaaaaccagaaaacacacattgcaactctgctgggtttttctcaacgtccacgctgaaattcgtgcctgcaaagagcgtggaattcagcgtacttctccaacacgtgatgtctattgtcctgcaaagaatcacgacctctcgagctgcaaggtctttctcagcgccatgaagacgccacctcctaaggtccagcagtcacgcgtccccctcagggatgaggacaaggaacaaggagcgacgctgatttcagatcgatttgttggggtaatcgacatcgatccccacgaaccatcagtcttgcacctgctcgaagactatggttcatcgacaatgagtacgtcgcacaaggtattggctatcgacgatgtcggcacgtcagcgcgcgccaatgcggaagcggagaatcaagtgactacaccggcccagcacatcagagccgtcaacgcaatacagagggaaaccccctacgatcccgttctgaatgacgatctcgcacgatggacagagcggttacgggaatcagtgaccaacctcagcaacgcgttcgaagaggccgctgttgcagcacacccggaatagccaccaactggcgatgctaatggtgaaaatcctgaacaccgggaatcgcctcattgagccacccctccaccgcgcggcacttgcgatctccacgatcacctgaatggccgccgagaggagcgacgtacacgagacaacgagaaccgttccgacatcgcgtctcttcacggcgtcacgataacgaagaacgaggaggccgttcgagcgaagaccgagaccgtgataaccgccacaaccgccacgatcacgacgatcgcgaatggcgggtgctgggcgatactggttgaggacgtcgccataatgacgacgacgatggagatcggcgccgagacaacaacgggagacgacgacaagattctcgagaacccggccgacgtcctcgtaatcgtacgccggaaccaagcgacccatcctcatcgtcgtcatcttcctcatcctcatcatcagatagacatccacgaaggacgtacgatcgccgacaacccaccggccctagcgctgggtgtagagctttcggtcgttcacttcgagatgtccgatggcctgaaagattccgaccaggagcaatagagaaatacgatgggagtaccgacccagaagaattccttcaggtttactccacagtattctacgctgctggagtggacaacaacgcattggcgaattacttgccaaccacattgaaaggctctgcgcgttcatggctgatacatctcgccccctactcgatttcttcatgggcagacctgtggcagcagttcgtcgccaacttccaaggaacgtataagtgccacgcgatcgatgacgacctacaggcgttgacacagaacccagatgaatccttgagggattatgttcggcgctttaatgagtgcaggaatacaatccccgagatcaccgactcttctgtaatccgcaccttcaagtctggtgtcagagattgctatactacccaggagttggcaacgaggtgcatcacgactactcggagattattcgaaattgtcaatcgatgcgctcatgcggacgacgcactgagacgcaagaacgacaaaccgaagactggaggagagaagaaaccagtcaaggatgcaccggagtcgagcaagaagaaaaatcgcaagagtgggaaaagcaaaactcaagcggatgttctcgcaacagaatacgcggaccctcccaagcgcccagacccacaatgcagcgacacgaagaaaacatggtgccctatacacaagtcagacaggcactctctagaagattgcctcgtcttcaaaaagtcgctcgcaaaacacatagcattacaaaaaggcaagcgagtatgtgtggtcgagaaggacgctgaggcggctattcaggaatcggactcagcatacccagactctgatctccatgtctcgcacatcttcggaggttccacggcatactcctcaaagcgagaatacaagaaggtggaacgtgaagtctgttcgatgtggcagggggctgcacccaagatgaagtagtccgagcagaagatagaattctcagaagaggaccaccccaagactgcagtcatcccagggcgatatccgatcgtggtcgaacctactattcggaatatcaaagttgcacgagttctgatcgacggcggcagctcaatcaaccttctcttcgccagcaccttggacgcgatggggatcccacgaagcgagttaacacccaccgatcaacccttccatggaatcacccctcagtcatcgtccaaaccattgggcaaaattacgttgcttgtgactttcggccaagcaaacaacttccgaatggaacagatcacctttgatgtcgctgaattcgatacagcatataatgccatcattgggagaactgcactcgcgaagttcatggccgcatctcactacgcgtatcaagtactcaagatgcgggaccgaagggaacaatcactattcaagggaatactaagctggcagtgcaatgcgacaagcggagcctcgacatggtcgagcacacgcccagcccacctgccacagctgagccacccaagaaagtgagcaaaacaaacaagacgctgaaaccagacggtgcaatcaagatagttccactctctagtgccaacaccgacaagaccgtcaagatcggggcatcactaggcgagaaataggaactcgcgctcatcaccttcctctggacaatgctgacgtgttcgcctggtaaccgtccgacatgccgggggtacccagggaggtgattgagcacaaactcatggtgcgacccgttgcaaaaaactgtggagatttgcaccaaatcgaaaacaagccatacgagaagaactcgataagcttctcaaatccggtttcatcagagaggtactccatccagagtggctagccaacccagtcatggtgtggaaggccaacgggaaatggagaatgtgcgtcgatttcaccgacctcaacaaggcgtgtcccaaggatcacttccctcttcctcgaatagaccaactggttgactcaacagccggttgtgagttgttgagctttctcgacgcttactccggctaccaccaaatcagcatggcgaaagaggacgaggagaagacagctttaatcacgccgttcggggtattctgctacgttaagatgccgttcggactaataaccgcaggaaacactttccagcgcacggtccaaggtgcacttagcgaccaactcggaaaacaatgttgaggcctatgtcgatgacattgttgtcaagaccaagacaagcgactcattgattgacgatctgcgggaaacgttcgacaacctccggcgatatcgcctcatgctcaatccagagaagtgcacgttcggagtatcatcgggcaagctgctcggtttcctcgtctctggcagaggaatagaagcgaatcccaataagatcaaggcaatcgagaatatgaagtcacctacaagactcaaggaagtacagaagtggcgacactaagtaggttcgtcgctaggatgggagagcaaggacaacctttcttcgctctgctgaaaaagcaagacaaatttgtatggacacaggaagccgaagaggcattcattgcactcaagcgctacctatcaaatccacctgtacttgttgccccgcaacctaatgaagaattatttctctatattgccgccacgccatattccgttagcactgtcattgttgttgagagagagaaagtacaacgaccagtctactacgtcagcgaagctctccacgatgcaaagacaagatatccacagatccaaaaactgctctacgcggtaatcatgacatcatgaaagctacgccactacttcgaagcccacagggtcacagttgtatcctctttccctctcggtgaagtagtgagaaacaaagacgttgtcggccgcatcgcgaaatgggtagtcgagctaagccaatttga

SEQ ID NO: 19123 - DNA, 1002 bp, Oryza sativa
caagtcccaggtacttgccgactttgtagccgattggactatgcctgataacaggtcagacaaccaagtcgacaacgaaacgtggacaatggcgttcgacggcgcactcaacaaccaaggagcaggggcaggattcatcttgacatcaccttcgggagatcaattcaagcatgcaattcacctcaacttcagggcgaccaataacacagccgagtacgaaggactgctcgccgggataaaagccgcagctgcactcggagttaggcgactaattgtgaaaggggattccgaactagtcgcgaaccaggtgcataaagattacaagtgctctagccccgagttatccaagtatctcgcagaagtcaggaagttggaaaaaatgttcaatgggatcgaggtccgacatgtataccgcaaaggcaacatcgaaccggatgatctagtacggcgtgcatccagacgagagccacttgaaccgggcacctttctggacgtcctgaccaggccatcagtgaaagaggcaagtggcgaagatagcccggtcgcccctaacatcagctagggggctacagaggcagagcgcgccgttgccgacatcgagacctcagagttgcccgaaccaatataatctttgttttctgcctgcttgatgtcgtattacgtagatcctcgtaccagcgtaccccaataccctctatatccggtctacagttgcttaaagttgtagtttttgtgttttcagtccgtgtggggatgggaaattaaagatctataggtgtcttgatttagcactttcggtactaagtaccgacatctatttatctttctgtagtagtgtcatactgctgactcgatattattgtttttggtgggtctagacaaactgaaacattttcatgtctttctcaagcatgaggtcactagacacagcagttttacattaatttcacataaaccagttcttcattttccacgaaacccagcaaatcacccattttcctg

SEQ ID NO: 19124 - DNA, 2939 bp, Oryza sativa
atatagagcatttaatggaattggactgtattataacatattgttaatgtggctgattcatgaatgatctgaaccttcaactcttgtgacctactaaccagattgtctacttgactctaaatacttcagaggattgcatgatattggcatatctatatgttaggttggatttattttctgctactttgatgtaatggggattggcatctatcttggcattgtccaattagtatgtagccaccgagctatcttaactagaacaacaataggtctcgtcagtcttactgccacatagtactgtaggacttgctagccatactattatacgtccaacttgattccaataactcaaagtcatgcttaagtcgagctttttcttgaagaaattacagagctgtccttttgccctgccaattgtcaaatgccaataactcaggtgtgttgattcctttgcagaacatgttaaattgagcttaaatgaggctaaagtagaaaaaaaaactatatttacatctcttaagaaataacttcctacggaatcttcttgtatcaaataatgctattaatttcacagttttgtattgcctaatcagagttaattatcctttttttttctgcaactgtttttgacatttcatttattaaagagaagcaccttctccatgtttctaatgccatttttggtttgtattgtgattatctattttcttgacttacaatgtcatgattcatagcatgttgatctttaaccattacaaattcctattgattgtaccttttcgttttcaatatatttagctatgcctatgtgacttgtgtattgtcattaatgggctgaatgtacagcagaataacgccttgagcttcaatcacgggatgatatttagtttgtctgcttcccttggaatagttgtaattttggtagttataactattttcaaaagagggaagcaagcaaatgaactgtgtcagcatgagaaactcctccagacaccgagtgttaagataagtcgaaaatggtcaaagagagccctgcttcttggtgtcttagttgggctttgtagttctgtctggatattttcaagcatgcatgctgatgttgttgctagaagaattgagaatcttgaaaatatgtgtgatgagagagctaggatgctacaagatcagttcaatgtaagcatgaaccatgtgcatgcattggctattttagtctcaacttttcaccatgggaagaatccttctgctattgatcaggtttgctttctttggatacatctttcttaattgcaagggtgattcaacaaacttttaatattattaaaatttttttgataatttaataatttaatcaggtttctaaaaatgcattgtaaaagaaattagctgtgaaagttgtattttgaaggccgtgtgatcaaaatggtatgtttttgtgactgactggaaggagtataaaatctgattagccattagcaatttgtttgtccaaagaaaaatgtttagaataggtgtctccattcaaaactgcttataccatgataagtcactgggaaaaaaacatcattatagctgaaacaggaggccaggaggggatgcacagtttttcaaagatttatgttatttaaaagaaaacatcttgttattttctatcctattaatactgtgcattttttcaagattatgagatcttgttatcattgacatttgacagaaaacatttgaggatttcacggctaggacaacatttgaaaggccattgatgagtggtgttgcctatgctttgaaggtgctgcacagcgaaagggagttgtttgagcaaaagcttggatggaagattaagaaaatggagaccgaagatcaatcccttgttcatgactacaatcctgaaaagcttcagccttcaccagttcaagatgagtatgcacctgttattttctcccaggaaactgtaaagcacattatatcagttgacatgatgtctgggaaggtgagctactatatctgcaagcccttgtgtatatatatttatttatttctgaataggataaacttatttaacttctgattagaccttcattttttttttcaaattgtgaaatgagtaattcagaatctaataacgtcttactttaaaaggatgggtgcatgaggtattattctttacatggcagttccatatcccaaattagaaatccgactcacagaggagtccctattctagtataactacaaactatatgtagtctcagacagacagcagtcccataacttcccctttatcattttgatttgctccatggcactagcctgccttggcccttcaacctagtcttgctacacagactctaaccactttgtcctgtatgagccatatacaacactgagcacaagcgaagcccatcccattggacatggaatctgctgttgctgtgttgcaatgttgctgctgaggcatattgccaatctttgtgtggactctgaggaggccttcatgctgaaccggatggtgacatggatgagcgaactcactatcgaatgtaagtgagacacaaacatagtggctgtccacagtggcagcgataggaaggaagaagctggcatggagagtgagggaggcagtagcgagtgccaaactctgcgagagatgagggtcatgaacaagaggcagcgaagtacaagcaaaggccgcgtaaaaggtttgattagttatgttggatccatctcagtccaaacaaaatctgtagaagtggtttgatctgagttggttcagcatgattagccgtcttgcagcagactgtgaacagctctggaccctggcagaccatgtatacaaacctaaagaacatgtttgagttttattactaactttattttagacaagggaagtgtaaactcctggcctttgcatcagctagggatgcacacaaccattacattat

SEQ ID NO: 19125 - DNA, 2014 bp, Oryza sativa
tgcagccctgacactatgatcttgatttcaggaagatcgtgataatatattgcgctcacgggcaacaggcaaaggggccctaacagcccctttcccacttcttaaatctaatcaccttggtgtggtgctaacgttcactgtgtataagtatgatcttcctccagatgcaactccagaggagcgtattgaagctacgctggggtaatatctgtttcctaataaatgtcaagttgaactacacacttatatttatttctttttaagtttgagagagttttctatcaaaagaactttgagagaattgaccatagatttgttgttaacacttgacagttatcttggtgcctcatttgatgttccgtctctggtggagagactcctggagcaacttgctagcaaacaaaagatagttgttaggctgtatgacatcacaaatcatacttatcctactaaaatgtatgattcggatgttattgcatctgatgatctgcatattagtaatattgatttcggggacccgacacgcaaacacgtaatgcattgcaggtacttctttcattgtgcttgggattatacttttgtacttgaaaataagctcactcaatccattttcatattttttatgtcagattcaagcatgcaccttcactgccatggtctgcaattatgatatcttcagcagtagctataattgttttgcttgttggctatattatctatgctactctgaattctcttgaagaggcagaagataattatacgacaatgagagatttaaaaggacgagctgaagctgcagatgttgctaagtcccaggtccttctatctctagcagtgttcttatcttttgctatgtttctttagtctcctccatgattgctttccttcttctccttatccgctaagtagatctttgtttaccttgcagtttctagcaactgtttcacatgagattagaactccaatgaatggtgtactaggtttgtcctttatactttgtttttaattattcttttctatcacattgataccttctgtattatcgtcagaagacaatgctaaatgagttatgagagtggatttctacctgaaccaggtatgctacagatgctcatggatacggaacttgatacaactcagcgggattttgtagttacagctcaagaaagtggaaagtcattgataaacttaataaatgaagtacttgatctcgctaagatagaatcaggcaaaattgagctggaggcggtgcgatttgatgtccgtgatattcttgacaatgtggtatctttgttttctgaaaaatcatgggctaagggcatagaggtgagtcgtaatctatacccattggactctaagcttttcattcaacgggatgttaggacctgaaatatgttgtttttgcgagggtagttggctgtacttgtatctgatcaagttccagatgttctgatcggggacccgtggcggtttcggcaaatcattacaaatcttgtagggaattctatgaaggtcagttttaaatctagattggctaccataattcctctgatcttcaatttattgttatactctggagaacattgttgttgtgggttccttattctgtcatttgcatacatctatatgctgtgatgctttcatataacagcagtagccagtaggagaaagtatgatccagtactcgctgttttgatatttatacaagtgaaagctcaaactggatttccttatgtagattacaaacatggcagttgctttggttagaacaaaaaagtagagttctgtctattatgcaataatctttcactgatataatcttttccaaatatggcttcctgtaaatacagtttactgaacaaggtcatatcttcattcgagtgcatttaattgaggaagtgaagagaaaaatggaagctctggatgacacttctcctgaaaacatagaagttacagcgaattccaaaaatacgatgccatataatactctaagtgggcttgaagtagcaaataa

SEQ ID NO: 19126 - DNA, 1384 bp, Oryza sativa
atttctttttcgggtattaacgacatcataaatgttggataaatatttgttaacttgagttttattgtgaagccatcataaatatgctgttatgctttcaatattcataaaactattattatgtattattttctgacactgttgcattttatgtgttcaagtgtaaaaagcagtctaaatatggtgcttgttgacaaagaagcttggggcgaggactcaggcttggcatttttccggtgtcttatagatcttcggctgaagggcacactcaagtcttggcaaaccatgccaaagttctttcttttggcaggttcaataactcctgctgactctgattgtttgaggttggcggggtattctaatagcataagaaaaccccttcgtcttagtactgttgctgcttgtcttagtaaagcactaggggttggacttacaggccgacgaagtagagataattctttggttcttcgaagtgtactaacaggaaaaaacattttagttgtggacgacaatgctgttaatcgcatagttgcagctggtgctttgaagaaatatggagctatagttacctgtgtggacagtggaaaggaggcaatttctaggctccagccacctcataaatttgatgcttgttttatggatgttcagatgcctgagatggatgggtaatcttccttcccatttgttaaaattcatctaatgatgccttctaaagacattattttgtgttacgtgcttcactgtgttataagatgaattagtaacatatccttattgcttaaatatctcttgtagtttcttcaaatggtttcatattgaaataggtcgcctttttttctttcacaattgcagtcttgagctagaattctttttttttattattgtgtccattgtaatgaacgacttcataagtctatatatggattgttatgaactttgaaataaccagaaaacttactacatgtagaacatcgtacattctttataacaagtgtcttctgcaattggatcaactgaactgcttcctttttttttttttgcaggtttgaagctactagattagttcgttctgtagaaagtaaaatcaatgatacgatccaggcaggtgaagtgtcttccgagatctatggaaataaggcccattggcatgtacctatattagccatgacagcggatgtaattcaagcaacttttgagggatgtatggaatgtggaatggatggatatgtggcaaagccatttgaagaacagcaactttactctgcagttgctcatttcctagaggctgatgcaacagatccattgacctaggagatttagtttgctagtggccacagtgattcagggttctctgatgcagcatctgctaaaaacccatttggag

SEQ ID NO: 19127 - DNA, 1875 bp, Oryza sativa
aggtaggtaggaaaaatgaatggtggatggttgtgattggttgggaagagaatgttagtggagaagttgttatattttgggacaaattctaatggctaaaagttattatattttgggacggagggagtaataacctgacttttagttctttttcttgctggttaatacacataattattttcaatattcatttgatcattaagatgcttcatctgaaattcctgcttctcaaatatatatgatagctctcagggaggtctaacatcaaatttagaacatcccacaagtttttggcatctgaaaatggatgatagaaatattttggctattggatattatacttgttttgctttcttttgaataattggatgctatgacccttcttgtagaatacttggccctggattccggaaccattaagttcagcctacgctagcaatcaaaattttgtttcatctgttaattgttatcttgtttcgtctgttaattgttattccctccgatcaaaattatctgtcgtttccaacagcaaaacagaactactagcaggacatttctactgtctgaaacgacgagtatttccgatcggagggagtgtcttgtttcatctcttaattgttatcttgtgtgtgttctacagacaattggatgaaatctatttcaacatcacgccttcagccatgtgcttaaggggaaactttgaccatttttacccagtggaaatcaatgagggacatacattgaactgacatagcctccttcatgctgttccagtgtagtggctgacaagatgacatcaatggcgttcttgttgtacagctaatatagattatgagaaggctaatgctcctgtttattctgtattcttgagtgtacatatgaaatggcaagaaaatagtgagagttggaggatttgtctggtggcttgaagaatgtaaataggaatgttcatatccatcttttctgaggtctggttatgtggggtgtaagttgtacatatgttctcttgtagaaatgtaattgattattagattacggcaatgttccaaaaaaagtatatatattatgcttccaaatccttgcttgttgagtgccctgtaattttcatttcaaatagaacaaaatgcaaattgtccggaagatccaaattgtacacttcttttattgaacatttgggagcatatgttggcaatggctgtggaatatgtttatatatctttgaaccttttcagagagaattttgaaaatctgtggtctagtgaagcaaaactcaagcttgtagttttgttatgaaattggtacatcaaaatcacatctagggttctctttgtaaatttaagggattttggacagataaagtgtcccatccatccaaagtcccactttaggagggagggagtatattgttctaccatgcaaacaagatgtcgatggcatggccaaaagctttattatttttagaaaaaaaagtccagaactctaaattacaccaaaacattggagaccctccctaaacagcacactctagaacgaagaataaataaataaattgcttaaagcctactccatcctaaaatacaacaacctacgactactatctatattcgtagtactatgatatattctctctagtcgttattatattttagaatggaggtaatataagaaaatttatttgtgcacttatcctcatcaagttttagaaaagaaagcgaagtgagagtagctcgagtggttacgttctttgtattagaaccaacccacccggattcaaatacattcaacacgggcagggccggccctgacagggggcgagcagtgcagccgcactgggccccccagatcgtaggggccccaccccaccccccgcgtagc

SEQ ID NO: 19128 - DNA, 2778 bp, Oryza sativa
ggatatgcccataaaagaagttgccgcccaattggaacttttggagatctggtagagagttaccgatattggatggtagctctccgcttagatgattggaagcaagggtaagttaaacaagagtagaaagattcaggatagcttgtggaaactgacctgccaattatttttgcacccagatgcaagtatactaaaccaggcaactttgcaaaatcatttggtatgctgccatcgatgttattatacagacaactaaaccttttcagcgttgtaattttggcaacagaaacagggatgggtccagtaagactgttaactgaaagttgcaagctttgaaagcgttgaggcaaatctgcagggatttgtcctaccagattgtttccattcagccatagcaccttgaggttggaacagtttgcaagattaggcatccttctttgcaatgtgttattgctcaagtatatgatttgcaggtgatgcatattaccaaaggattgagggatctctccggtgaatgaatttgcaggtacaaagagaaatttgaggaatgttaggtttccaagaggagacatctgcccaattaatcctctatttgtgaggtttagcgccggcagcggtgacgccacggcagcggcggccgcgcgcgtggtttgctcttccggcggagtcggcgtcgagctggcgccctccgccgcgcggtacacaaagagcgcgcacccgcgggagacgcgtcgaagctgaacggccgccctcgagctccccgaacccggcgaagaaggcgcgcagccgctccgcgctcgcgcccggtgcgacgttggtgacgtacaccgcctccccgccgccgacgccgccgccgcggcgccagaggacaggtctgcgccagcggtggcgaactgggcggagacggcgcggccggcgacgacgacgccgccgccgcggcccacctcgtggagcgtgcggcgggcgcgccccaccgacctcctcccctccggtcggcttgcctgcacagagaaagagaagcagagaagggagaggaggagaggggaaatagaaaggtgttgacgtggcatcctgatatgtggggtccacgctgactcagcagccacgtatgataaaaccggaattaaaaccgccgagggacctattgtgaccagttttatatagttaagggacccgcggtatctggttttgcggttcgaggaagcttttgtatcatgatgacaagttgagggaccttcggtgtactttttccaacccaatatgtcgtggtgggctggtgatggctgcgtctccatagccctgcaaagttctttggcccattggcaacctgttagtatttgtgtttggcccattttgttttactccaacttggtgtataataattcgatttcatatatgtaaaaaccttgtcacttgcaaaattatactatgatagatcatatttagactaaattacagttcgagctaattttacattggtcgaccacagttctctcttcttctttttttcactttgtaccagataattttgtctttgatctttgtttataatttggataactctagaccactttttttgagcacatcaacaaacacgagtacattgactctatatgccgatgaactccatcacccgtgggcaaatcatatctctctttggcggacgcatggttagacatgattagcaagagaattggtgtggtccaaagtgtgaaaagaaattaaatttaactggtccaaaacaaaagaagatcagtcaatagatggcacaaattaaactgcggcaattcagtccgattgaattgacttatttccatcacgttacactaggcaaagcatatacactagctgtgcccaacttatttattcatttaggttactacagcactggtgattgacatggagctatagctggatcgttcaaccaatcatggtgccgccgcgccaatgccgcagcccctccgctcggcggtgagcatgtgcggcgcctcgtcgatggccagccactgatccaccgcccaccggtgcgtcatcgacgggagtctcccctgcccgagctgcgtcaccatcacgtagctcacgtaccacccgggcttgttcccagagccgtcggaggtgagcaccatgttgcagggctccgacggcatgcagtcgccggcgcccctgaaccggtcgaggttccccttctcgaagtagtcgtggccggcggccatctggccccacgactccaggttggcgaccgtcagcgtcgggcccctggcggcgcgcacctgcagcgagacgcgggcgtcggtgccggcgttcctccggccgtcggtcttgacgacgatctcgaacgtgcatcgtgtggtggcggcggtggccgcggcggcgaggaagaggatgaggtagctggcgagggcgagggaaagcttgttcatggtaagcttcatgttatttgttattggatgtggtatatgtgatgaattggggagtgagtttggtgtggtattgcatgcctccacaatgtaccgttttataggaggcagaggaggggtaagggcaattgcactagccaatgttttgattaataataattctgtgacttgtgggatgcgctactgtgagctctgactgggtgtgtatattttacgagggatatgtggaaattaaaatggtctgtgccacgcgccttatcttctcgtaaaattagatcggtggccgccattctcaattgactaaacgcaccgacacacatgtgtacccatcccctctctcccctcggtcttcgttcgtggc

SEQ ID NO: 19129 - DNA, 18401 bp, Oryza sativa
agcaagacttatctcttatatgtgtttcccttttctaaatgcatgtaaatgtttataaaaattatatttggactgttcttatcctggggtgatgttgatatgttagaattacagtttaccttacacatgtcataagcttcttacctatttatgtataagtttaatctagtattaaattaagagaatgcttatagagatgattcagataaaatttaccctatatgagttaatttatttgttcacttccatgttcatgacttgtcttgagatggatggcctaattagttttatggggctagacattggcgttattgatatattttaaggtgtattatggttcctatgtattattttccaatagttagcactaggccctaatggtttaatggtttagttgattgtctagattttagttattattcatgagacctattatgaaatgcaaatcgaaaatccaaatgcatatgaaggactcaagtcaaaacatgtcctatgagagtatgcatgcttacaaataagtttacatttttgtcctaggttataaatgaaaaagttttgatttgccctcaaattttattcatgcaagagttagatcaatttcacctaagttttaaatgaaaatttttggttcacaaaattggagaactttcctttcatttgacgaaaatttcttcatcctaaaatttgggtatgttacaggtctcctcttgccacaaatcccttctccaagacctcaaatatgagcagcacagtgaagttagtgatatgccctagaggcaatcatagagatgattgtatcacatactatgtttacatatttatccgacattgtttcttgaaatagataactccttattggttaatgaatatgtgattctttcatgagactctttatgttgtttgttactatttctaaaggatccctgatcgaatatcatatatggaacaaatatgtttatatgatcagcacatgtattaattgatgatcatgtctcatggatcatggtatagagattccaaattaataatgtggacacatgttggtgaacatgttgttggatagacccaacatgagacactgcaagagccatatgtgttgtgtcatcagtgatctcatttagtgttggtgttgaatccttagacctgagattatcatggttctcaacatatgtagtagcttacttagggacttctaaacgctactccgtaaatgggtagctataaaactagttttcgggtatgctatgaaacatgtagtgagatatgaataatcaagatgggatttgcccctcctatggagagatatctctgggcccctcgatgttgtagattatggaagtgcatggccatgccaaaggtaattgaggagtcaatcacaagttatataatctatcaacaggttcgagtgaatgattgagctattagaggatggcacatatctagccttgagtttaatcgatatcatgaggcaaaggggttcatacaagtatacactagaggttcagccgatatgatctttatgtatgcccggtgggtcaatatgttctgctaggggccgctgttgacgcgtggaccgaaaaggagttttcgggttacagccgagtatatatgaacctatagggtcgcacgcttaatgggccggaataaggggattggatggagatccaatatgagcttacttcggatagggatccgaataggagtcctacgggccttggaggcccgagtgatggatcctatatattcatgaggggtgtgaccggcggaggcattgcatgacgtgagaaaccctagccgtcactttcctccccgagcaaaaccctagccgcgcgcgggtgctagcatatctgctcgtggcgttccgtccctgtacgtgtggataccggtagaggcgccgctggtttgcggtgctgatcggcgtgggattacggcgaggagaacgcatgaggaggagaaggtcgagttggtgcgatcgactacttcctctacatcgacgcgcgctacttcgcgagagttccttcgacttctcagcgtcttcttccgctgcacagcgcatcgagtggtaacgatctatgatctaatacttgcatggttcctggtttacgcgatagaaaattttgatttatgctatcgtagcctacgcgtatcccaacaggtggcatggccagtggttgccgacggctgtagttgagtggaggagggcccagacagggttgagtgtggctacaacgttgtggatggaggagtcaaggaggacttcaggtgggaggtgtcggtgctggaggaggtgctatcatctgcggtgcccataagagcacggcgggacctctagattgcggcggcactacaggtggtgcagcgacgatgtcagcgagtagtggtgctgggcgtggctatgcaagggcatagccatggacgccgcgacaacaataaggagggtgttgccgtcatcgatgcggacattgcctccaccttccctcaaccagtcctccccactccaatgctgcaataggcatctatcctctttggtgccatcactgccatcatccactctccaactggtggttctccggccctcccaagcactaccgctgcaaaacagcgaccccaggccaccacttcggcactccactcgtggtcctcgcaagaccgagttgtaggccaaaccaagaatcccagccattttcgtcgttgactggactggatggacaataacctcttcgaggcaaacttagtccttctgcatccacattgcattgaaggctcctcctcttttaccttttcacatccttctgcctcctggtgttgtttgtaagtcgtgaccacaatgcgtgatgcatgcatggaaggtgctcgatgaaatgcttcctcaatggaaggatgcatggtggtcacaactaggagatcagtgtttgtggagggcaatgccgtaggacagtgcaaatggcggcacaaggcccatggttagtgcctcctcccacttggcttgtaattcgtattgcaggcaatccattgagctggccatgtacatctcagctttgccggttgcaattggtattgatatctagatttttttagtgtttcataatcatctagctcgctagagttgttctggtaggcaagtttcctgaatcttgagaggaacaattttatacttatatatactgaacttcaggtaatatctccaccaggtccgcctatataagtatacctttttcttgcctaaaatgtagctttctttcttacatatttgtacctagctatgttcatcttcattctctaaccaatgcaattcagcatatgcaaacacactgcaggttaaaaagtagtatttggagagacaaaggcaattcagtttgcacaggcacaatgcaggtgaaatgcagtcacaatcatattacatggtgggatgtttgtgaatgtcctattgggcttcctctattgaatatcaacgataacttttttcccgattatactcatgttacatggtggaatgcacttccagggtcaggctgtattccaaaatatggctttgtgttgctgagttatatgcttcagcactctcatgttgctttcatctaatccatgtaagcattctaacttttttgctctggtttctttttctgcaaactagtttctgatggaaaatttcttatcgctagaaattgtcatgtaatctccaatgtgctctagaaatttcagattgagctatttgaattttgctatgttaatttgaagaatactattctaaagtggcagcggattatcataaccagctacctcaaactattcaattgcagcacttaatttaatcatctaatttattcaatgtgcattccaaatttcgcatttcttaatttaatcatgtattttggtttgagttgatatagttgatttggacaattataattgcaaagtaaaattgattttgtcgttgtaaatatgactgaattttctggacaacatttaatgtgattttgtcaaaaacacgatgaaccttccacttgtcagtatagtcctattttattttacttccgaaagtaagaaacgtatcttacaacatatttgactgatatctagattttttagtgtttcataacatctagctcgctagaattgttcttctaggcaagcttccaatattcttctaatgttcccaccatacatggagaagaactccaacgcacgcttctctagcagcttgcaatagctcttaaccatttcttcgtcaactcctttaagaagtaaaggccaagtccttgcccaaagcgtccccatgaaaatgacctgtaagaaagatataggattggagccattaaagaccacatagttcctatataaccaaattgcccaaagaaatgcagctatccccacaaacaatattatcttgagcctaggttcaacacaatttagccaattctcaaacatttgagacatgctacacggttgcctaatcccaaaggtaaaaaggagcacactccaaatatacctagtcattgaacaatcaaattaagaaaaggtactgtattgtttccttagagctacaaaaacaacttaggctaccgttccaccttctctttgctagattattcttagtgagaattaccctttccttgaggtaccacaagaaacttttgattttaagtggaatcttgagcttccaaatgaaattcttcctaggaactaccccttcatacatgagcgacttgtacatagattatactgtgaaaataccatctttattctttttccaaaagaaacgatctttctgatctgtcaatgcagtgtttacaacctttgacactagctcataccaggcttccaagtttcttcccactattgatcttctgaaagagacatttaacgagattccactcattaccttggccaccatctcatttttatttctaactagactgtaaaggttaggatactccttctcaaaggattgaactcctatccaacaatcttcccaaaatcttactcgtgagccatcttgtattaagaaggaaccaatcctttgaaaagactctttgtctaacatgagactagcccaaaaaatgcgagtcccctggtcttttttggacttgcaaaattgtttctttgtcaggtatttttttcctaagcaagctttgccaaattccttcttcattgatgtcgagggggcgatctctctgacaatggggagtggagatccctccccgagagtgaagatccggccatggggtttgcggtgagaggtacggatgactgcaatcataaagggttcacggggaccgaccatcctgcgtagagagagagagatagataggaatttatacaggttcaggacacccggaggtgtaatactgtcggagaataaactccatcggggaaccgtgaggcccccctttgtgagttcggccaggggcagcgggtgaaattcgagggcttggtgagcgaagctgtgtaatcttgaggggattcaaccccccaaagacgatgagacaaaaggggtttatacaggttcgggccactaagaagcgtaataccctactcctgtgcttgattgattgagtgtagaacataagtgcttggtgttgcaagactcaagcgccagttcgctcggagctcccccctccaccactaggcctggacctccttttatacctcaaggggttaccacatgggcccaacaacctaacctagctccggtagagaagtattataatctttgcattaaatgcatgtcttgtctcttgacttgggaagccaagcgcacgtcgtcttgatgatggggcctgtcaaatcttgtcgcctgacacggggggtgcccatgtcagtcaccatttaatgggtgaagacttctgggctcctattacaccggaaaacgggagccttgctttgaccagagcaggaggaccgactccggctgggataagaggatgagaacctctcaccatcattatttgatgggatatgtcgggctgcacgtcgcctgacacacgcgatggtgcgcctgacatcctgggtcccatcagtcattcgaccggtcatagaccggttgagtgcactgcacaccgcattaaatgcggcgtagcgcgaccgctcgggtcgccataaatgcgggtaggtgggcacctgtaggcggacacctaacccaccgtacgtggtgacctaaagagggggccggaggagcccgacccctagtcacaggaggggcagtcgtcacccgaccttgggcccgatcccccctcgggggagggccatgtggcacctggggtagcctcctccgtccaatctctgggaaggagtggccgccaccctatctcgggcccgactcccctcggggagggccacgtggcattggggggcagcttcctccgactagtctttgggaaggagtagccgccatcccacctcgggcctgactacccttgggggagggccacgtggcattagggggcagcctcctccgtccaatctctgggagggagtggccgccgccctaccttgggcttgactcccctcgggtagggccacgtggcattggggggcagcctcctccctctaaacgtgatacccccgggcccatattaccaacagtagcccctggcgttagccctgaccaaaacctttcccaggtggtctgggttgacgccaatctgctagtcagttgacatgtgggcccgatcttctgtcctatcaatctgggagttgggcggtgggagtttagtcacgttcatacgtcaccttaacttcccactttcctcccggtttccgaggcgctgtgggcttgggagtttagcccataccttaggccgtgaacttatttcctatatatattcagcaaacgttgttagactctctcgggcccgtgaccttacgccgtgtacctcgcttgcccctgcctcttgttaacctctattcgtgttctacttcatctattcaaacgattatttttgcgtgagcatggggactgaactttccatagtcagcaatctttacccgcgatcaagccaggatgggcgccgtagctagccagcggggccaaagctagctgctacggaagagccagcacaaggggccccgggctatgacggcgaccagagctcgacgcagggctaggattgggctaggaatcgtagcccccacacttctagcaaagagtcgtttgaatggacgaagtgaatacaaactttttgttaccaagggaggcaagccagcgcgcgacacgtgggtaccgcggaaccgcgaggaagagatgggcgagagataaacataagcaataataattctatgcaaactatcatctttgcgcgagtgcgaggactaaattttccatagccaataatcttcacccatgatcaagccaagctgggcgctgtagccagctgctacggaagagccagcacagggggtcccagacgtcgacggcgcccagagctcgacgcagggctaggatagagctaggaatcgtagcccccacacttttagcaaataatcgtttatatgaatgaagcaaacacaaaccttgcttgcatgtcgcgacctttcaaacctttagcttgaagagggcctcccaccattggtccctaaccactttgggaagcctgcgaccacttagcaaacgaggtcaggttcccacgagcctgtgtcctcacgctacacattctttttgctctttcctttcggtggcctccttccaatatctctcccttctacacggacgactactttcgcccgagtgtgagagccgaaaaactctagagccagcgatccccgtccacagttgagctaggccgggcaccgtagccaaccggcgggaccaaagctagctgctacggaagagccagcacagggggtcccaggcttcgacggcacccggcgctcaacttaaggctagaatagggctagaaaacttagcccccacacttagcgaggaaacgttcatgtagatgggagagaggttgggcttttaccaccgagggagcaaacaaacgcgcaaaacgcgagcgtcacagggccatgagaaaagaacagggggaaaataaatataagacttcaagctgtattaagctgatgaattgaaaaattaaaaatacttgaagcttgaaaggacgattagttgagccgggccgagcaccgtagccagccagcgggaccaaaactagccgctacggaagagccagcacaggggatctcgggcttcgatggcacccggagctcaactgcaagagtcctcccaggagtagaccgaggcaggtggtaggttcatgagcgatccccgtgcttggccctgaagggccatggggaagaaactcgccttgacccggtcgtcaccccacgccgcctctatgatcgtcgtgtggacctggagggactcggaggggttgacgctaccgtggtacctttcggtgaggctgggccgaaactttgggggttatccgactttccgaagattcgccataaagacctggccgccagccttatccggtgaagatgcggggggcctagccccctgcctggggtggcgcggcactcctgaggaagctgccccttcccccgcattggcagtgcgacgcttatcgcgccagcgctcgaaagaacctcaaaaatcatgaatgcaccccctacctggcgcgccagatgtcggagaataaactcctccatcggggaaccgtgaggcccccctttgtgagttcagccgagggcagcgggtgaaattcgagggcttggtgagcgaagctgtgtaatcttgaggggattcaaccccccaaagacgatgagacaaaaggggtttatataggttcgggccactaagaagcgtaataccctactcctatgcttgattgattgagtgtggaacataagtgcttggggttgcaaggctcaagcgtcagttcgctcggagctcccctcctccaccactaggcttggacctctttttatacctcaaggggttaccacataggcccaacaacctaacctagctccggtggagaagtattataatctttggattaaatgcatgtcttgtctcttgacttgggaagccaagcgcacgtcgtcttgatgatggggcctgtcaaatcttgccgcctgacacggggggtgcccatgtcagtcaccatttaatgggtgaagacttctgggctcctattacaccgggaaacgggagccttgctttgaccagagcgggaggaccgactctggctgggataagaggatgataacctctcaccatcattatttgatgggatatgtcgggctgcacgtcgcctgacacacgcaatggtgcgcctgacatcttgggtcccatcagtcattcgaccggtcatagaccggttgagtgcactgcacaccgcattaaatgcggcgtggcgcgaccgctcgggtcgccataaatgtgggtaggtgggcacctgtaggcagacacctaacccaccgtacgtggtgacctaaagagggggccggaggagcccgacccctagtcacaggagggggcagtcgccacccgacctcgggcccgatcccccctcgggggagggccacgtggcgcctggggccgcctcctccgtccaacctctcggagggagtggccgccgccctacctcgggcccgactcccctcggggagggccacgtggcattggggggcagcctcctccgactagtctttgggaaggagtggccgccaccccacctcgggcctaactccccttgggggagggccacgtggcattagggggcagcctcctccgtccaatctctaggagggagtggccgctgccctaccttgggcccgactcccctcggggagggccacgcggcattggggggtaggctcctccctctaaacatgataccccgggacccatattaccgacaaataccttactcctatgttagtgttcattgtcctccctagatctggtaagtacaaaggaggccatttcaggctacaaagcaagagtactgctctaaagagtccaaccccttcatcagtatctggtccccttccttttatagtccaaggagctcacattattaccaatctactcttaatcttgtcttatcagccgtcttatcgctactagctggttcccaaacacagtcttgaagaaaccctttgagtcttgtgattcgtattaccccaggctcttgggctccgtctgagatagttgggtcttcgctagtgtgctcaccacgtggtgcgtggtgggccggatgagacccaacctgcctgaaatagcgccacggatgcttctctacctgtttggctaaattaggtggcgcagggcatgtgcgacgcgtgtccaaggcgccaccggtcctaagtgactcaacgctggcatcttgtccacatctttttgactccagacgggttggggatcctacacaaatttatttcatttatggcagggcatgctgcctcacagctagctgtggagcatgcctaacttctcgagttctgacaccgcgtttaaagaaatagtttagttattcttggatgagcttctcgaagatgtcgttaatgaaggaatattttaagattatgtatcatgtacatctcgatgctcctctaagcagagtgtcacgcccagaaattcactagtaatttctgaactaatttgtgcataaaatcctcgtccaggaatcagccgaggtacacaaattgataatttaatatacatattcatcatactaataacgttacaaacttacaaaagaaaagagaaaacaacagcggaattacggtctagcgaagctcccgctctactcccacaggcagctcaactggggtataagccaaacgtcttctccttctggatccttttttattccactgacgtttgattaattattgcaaggtgagtacaaggaatactccacaagccacacgataagtatgcaagtgcacaaggataccaaagaatggcataatatagggctcatctgcaaaagcagcatttagcaaacatttgagaattgtaaaacagtagagtaattaatcatcaatattaatcaacactgaacagcatacccatgctgcacaggcccaaccaaacctgaacaaccatactaggctgtacagatctatctccaaaccaggaatgtaccattccaaaccaggagctaatcaaattattaccatcaattaccacattattattaatgagtagtgtgggactaatcacgaaagacattgttagagccgcccataaccgcgggcacggatattcgaatagttttactctggccaaaggtgtaccactgtacccacaagacacaactccacaatatgtcaccatatcatcatgtgcccatgctgaacatgtcaccatttgtgtagttgtgacaagacccctcacatagctcaactcaaagcagcgcacctttcctggatcgtagtcaccgcctaaaaaaaaaccagaggcatggactccctagcgacccccgtggccttatctccgccacttctcagtctggcacaccacaatgagccttgctatacaaagtgtccagccgttacctattctggcttgtggttggcacggttaatgtttcacaaccggaactcgtgaaccggtccttaattgtcaagagcacgaccatcaaaaccatgtgctcacaacccaccattatcaagttttagttggcacattaattaattaaccaatcatgattgaccatcgtgagctacctttaccatgtacatcattaagtaatagtgaaatattagttatcccaatagtgtggtaatgtttctaagcatggctaagcaattatatctaatatatctagttgaaccaatatataaatccaactagtcaaattataacccgatgtaatcaagaaatagggtaatcaatgcaaattggccataacaaaggaattggttcacaccacctggtgacatttgaaaataaatgcactgttgaaataaatagagaatttaaatataggatcaacatgctcaaaggaattgtgtttgggatctatgtgacttgccttgcaataaagggtcttcaattaatcttcttgaatacttccgatgcactcacgaaccttcgaaacgacggaaacgacaagctaaaatgcaaagcaaggaaaaagactaataaaaaccaaataaacagtacatatatagtaaacaaacatgtagatcataattttagatgaattatgagacttgaacggcttcattctgacttcatatgaattagttcgaattttacaagatttaatctaattaaagcctatttaaaaaggattaaataaatttaacacaatttatggataatttaaatatatagatctttattttatacaacttttgcaacttgaaccacattaaaccgagttacaatgaattagttaagaatttctaaagattaaaccgcattaaagcatttatatggattttaattgaattatgatgcaataaagaattattctgaaaagaaaaaggaatttattgcgtcatcaaagacggtccacggtaaaccgggttcacagaagcggtccacggaaccaacgaccaagatctaattgacctaaaattgaccgaatcggacggccgagatcgatccggtctaccacgggtctacggctgacatcagcaatgacattagcgatgatgtcatcgccgacggcagcttggcacaccatgctcaccggcaaacgacggcgcggcggtgcaaacggagggcatctacgcgtaaagcgcgacgcgacaactcaccggtggcttggacgacgacggcagcgaggtcgaggcggcggcggtcttcgggtcgtcgatggcggcggcgctccggcagtctttggcagaaacggaggacgggatgaggacggtggcgaccttgcgaacctggcgatggccttccggagcgacggcggtgactggagcagcggcggcgcttggctggactcgcggcagcgacggcggcgcacgggctgacgcggaggcggcgctacaagcgacggcgggctagggcgaaggtggcagcgaaaagaggaggtcccaggggtccttttataggggctaagaggcggcgatggaggcccatggccggcggcaaggagatggaaggtctagggttagggaatccgaatcaaaatcgaatccgagctatttccaaacaaaattagctaaagtttctataggggaaaagatagaggagatcaaggggatcctttcccgtctatcaatttgatcggagaaggaaaggggtggcccgatttggaaggggtatcggcggctgcgtgacatggttggttgaagacaaccctgacaggtggaagaggagggagggcacggtggtctgggccggcttgggccgggcgcgagcaggccgaaaggaagggagagagagagacttgggcagactttcggcccaaagccaaaagagagatttaaaaccttattcatgaaatgatattccgtttattaaaaatacttcctttactcaaataaatcctagaaaaatctaggaactatagaaacaagagaagtatttaataaaattttatctagcccacttttatattgagatttattcaattaaaattagatattctcttttaggcttttaagataatttctaataataacttttaaacaacactttataatttaatgatttttaaacaagcaaatcatttaacttaattataattagatcattaatgattaattggctgattaactaattactaaaatattgtttgtattgttaaacttaggaattgagctctgaaaaattcgagaaaattccagagagtataattaatcatggagaatttaataaaaattaaatccagccatggtttatatttaggaaattttatttcccacatttaacttcacttgtaaattaatgaacatttaatataaattctattaataatttattaaataatttataaatcttgaaacgggaaatcaggctgtgacacagatagatgtgagctctacaaggaccaaggtgagctcgggacccaggacaagttcgggaccgaggaagaccttggctcataatcttgttggtataacttcatatgtcttcaccctccaccccatctagaaagtgtgacttatgaagactgaggtgtgccctatgaagactgaggtgtgctcggggccctgaacaaggccgggcctgaggcaaacctcaccttacatctttatgttttgtacatctcgacactcctctttctcgagtagtgtgtgacttgtgcagactaaggtgagcgcagggcccgggataaggccggactcgaagcagaccttagctcgttctcttaagatataaatcttgtaggtttctacgcccctcttgatgaggagcgtagagcaaacaaggactaaggtgagcccgggacccaggacagggtcgggtccgatgcagaccttaggctatattcttaagacgtatttgggtatgcttgggaccaaagcccagtgccaagctactttcatgcttggagttttgagtcattgtacatatcatacgatgttttcctccttacccagggataattccatatatgaaagcttaggtgggctcgggaccctagctacgtcaccctagggttatctttttatttttaaagatattctgagcatgctatttatttgataatgatcgttttgctggataaatgggtacccctgttctcatttcaccgacaattgatcaactttaaaatccatttactaagcatacacttgttttgcatttctaggttttggatttccaacccatcacatcccttaggtctgcacaatgaactccatttagctaacctatacttctttttatgctcatcacattgccaaaaaatccggatctgtaaaaatccagcttctttaaaattcctctagggatttcaaagaaagaaagcataaatgttgccagactactcaacactgaattaatgagcaccagccttcctcctgacgacaaaaacctttcctttccaaccgctgagtttctcctggaatctatcttatagatccttccaatctttgtttgacaatcttttgaagtggataggaaggcctaggtatctgaatggaaaagttcccatcctacatccaaacaaagtggtgtaatccttttccacctccttatctttcccaaaacaaaacatctcacttttatggaaattaattttcaagccagatatcttttcaaaggcagttggtaccaatttcaggttcttagctttaaccaaatcatgttccataaacaagatggtataatttgcttattgtaagattgagagaccattgtctaccaaatgaggaattactccatttagaatctcaaggtcacgtgccctattgatgagaatggcaagcatatctgctactaaattaaataaaattggtgagaggggatcccctgtctgaaaccctttttcattaggaaaaagtggcctatctcatcgttaaccttcacagctacgctacctccagacacaatttgatcaatccacttgaaccaaatgtagaaacttttcattctcaacgcttgttgaaggaaattccaattttccttatcataagatttctcaaaatagagtttcagaataactccatctgactttttcttacacatctcatgcaatgtctcatggtgaattatggccccttccataatatttctacctttaaaaaaagcagtctgagaaggtcttatgactttctgtgctactagagcaattctatttgccatgacctttgtgaataccttgaagcttacattaagtaaggaaatgggcttgtattgtgtctattttgcctctttattctttggaagcaaggtaatgataccaaaattcagtctatgtagggtaactcgccactgtgaaaatctctaaagatagccattaagtcttctttaattacttccctttatgttctattaactcagctgggaaaccatcaagccccggagctttcttatgttccatttggaaaacaacatgtttcacctcttcttctgtaaattcctttgttaagaaattattttcctccattgacactttagggatatcatccttttgggattcaaacatggagaaacaatttacatccggagctccaaaaagatccttatagtaattggtagcgtatttcttgagttgtgcatctcccttaatcaccccttcttcttgttctaattgaaaaatctgtctctccgtgttctccattcgcgatgatatggtagtatttggtgctcctgtccccttgtactattctttttgtttttgttcattgatactatttagcttcttcttctcttaacaactgggctaaggcatttttacatgatttttttagatccagttcttgactagtcaagatcagctaatttgtccaactcatctgcctttgctataagttgagctttctctttttgtatatgcactacttaaattctccacccatcctctcaggaattgacgaagcctgcatatcttattttgtcatctttctatattcgttgccccttgaatatcctttgaccaaatttctaccaaaagattttgaaagtcatcccttaataaccatcccaattgaaattcaaacaaaggttgagcatttctatgtgtcccttttcctgtgtctagcaccaatggtgtgtgatccaaaagatcgctacagaaagcatgtactgtccggatttcttatttcccactcggtacttaccaaaactctatccaactttttgtaagttgggctcggcatagagttggcccaagtaaatttgcgtccggagagcaagatctccctgaaattaaggctgtgtatgacagcattaaataagggccatctatcattgtaagttagggatgaacctaggaacctctagcgatgttgtttcagattccgtttattgtttaaagaagggtgaattagacaagttggggaggttagaggaaaatgagcggtacaatgatgaaaattgggaatatttgggaatggagaatgtagtttgctagtatgatgaaaattatgcttgtcataacttgtatacattatgctgtatgtgttggaaatttggtcataattcggcatattttaatccaaaatattaagacaataaacatgacatttgcaatatgagtagatctagtgatagtgctagatgtatacaacttgagcatgcttaatatgaaataagcatcaacatttacagagtaacacaatgctgccattgcgaagaacatcaataaagaaacatctaatagaatcaggagaatgaaagtataccctaagaacgtcccaccgctggattttgaggcagtattgcctccgttgatgtcgttcacctccttgtctccaatctccatcgacatgttgacgaaggcgtcgatgcaataatagtagtcgcgaagaacaggagcagtcgcacttgaagcgctacccaaaaacttgatcgcccgcctacccgtgcaagttctcaagcggacggagtttcggaggcacctgctcgtcccatacacctgtgcgcgcaggtgaacagaaccagggaaggattctgcagctcaggaacagaggaggaggaactcgaagtgcaagagtcgtgaagaacttcctcagtccttctggtcgctgcggagtatatatatgcgagcgcgagagtaacgttcagagtcatcaaccccggtgtttaatttcgtaaccgacgcgctcgttaatacggaatcaattcacgacgtttaattccgtaaccgacggaatcaattcacgacgtttaattccgtaaccgacgcgttcattgatacgaaatcaattctccatgtttattaccgtccgttacaaaacgagagagcgcagcagtagcagctgtctgcctcgcctcacctcgcctcgccccgcctggttgtccgcgcaccatctcaaccggtcaacagagactctccactagctccgtatttaagttaagacctcttcacttagatttccgaggtggtattattacccatagcacttaatgtgggccaatggaatatattaggatttaattgggcctagcccattaatttaacaatccctaccaaatttcatggctcacaggaaatgctctcgattctgatcctgtttgttataccagtgtttcggtggagactgttaggatgaacttccacctaggaaaagagctacaccagatcacaactgaacaatggactatgccttgaattgtcagtcttgtgcgattcaggtttcactcaaacccttaactggtactaggctgccgtttgcatcccctctgtttggagcgtataagtcatactcctgaccttttcatgagtatctagagatcacccagatctcatagactgtgactagcagtcagactcatataggtgtgttccttctaagataaaaatgggggatccact

SEQ ID NO: 19130 - DNA, 2426 bp, Oryza sativa
taagcccattttagggtctcttctctcagttacacaatagtttgtttcgccatccaaattcacgggatctccgatcacaatggacaggtttccatcattgtgcaactctaagtgggtctcaagcccatctccctcgatgcatagtctatcacattacgtggtagccccttggtaaactgatctgccaaatttttagccatctagatatagtccaatgctatcactccggagtttttctgctttctgacagacttcagtcttcttttaacatgcctggatgacttcatattgtccttcgaactgttcactttaataatcactgtttgattatcacagttcatcaggattgcgggtactggtttttcaaccaccggcaagtccatcaggagctcacgaagccattcggcctcaactgtggcagtatctaaagctgtgagttctgcttccattgttgaccttgttaagatggtctatttgcaagacttccaggaaacagcaccacctccaagtgtgaacacatacccacttgtggcctttatctcatcagcatcagatatccagtttgaatcactatagccctccagcacttttgggtacccggcgtagtgaattccatagctcattgtcccttttagatagcgcattactctttcaagagcatgccaatgatcatctcccggatttgaaacaaactagctcaacttgctcacagcaaatgagatgtcaggcctcgttgcactagctaagtacatcaatgaaccaatgatctgggagtatctcaattgatcccttgctattcttcggtttttccttaatagcacactaggatcataaggagtaggagctgccttgcagtcactataaccaaagcgactcaagaccttgtccacatagtgagattgcacaagtgtaatcccaccctcatctcctctcagtagtttaatgttaagaataacatcagccactctcaaatccgtcatttcaaagcttttggacaaaaagtccttgacctcctcaatcacattgaggctggtcccaaagatcaatatgtcatcgacatataaacacaagatcactccctctcccccaccacaacgatagtacacacatttgtcagcttcgttcacaacaaagccagcagatgtaagtgtattgtcaaacttctcatgccattgcttaggcgcttgtttgagaccatacaaagacttcaacagcttgcacaccattccctcctgactttctagtacatacccatctggttgatccatatagatctcctcctccaactctccattgaggaaagctgtcttaacatccatctgatggatgagtagaccatgagaggctgccagagcgagtagtactcgaatcgtggtcaagcgagcaaccggtgaataagtgtcgaaaaaatcctcgccttctttttgggtataacccttggccacaagccttgccttgtacttttcaattgtaccatcaggcctaagttttttcttgaaaacccatttgcatcctacaggcttgcacccatatggacgctcgacgacttcccaagtaccattagacataattgagtccatctcactgcgtaccgcttccttccaatagtcagtgtcaggagatgaatatgcctcttcaatggttcttggagtatcatccacaagatatacaatgtagtcatctccaaaagactttgcagtcctttgtctcttactctttcgagttgctacaatgttatcctcctcaggattttcctcaagcgtttgatcaatgtgttatatcgacacaaagtgctcaggggataaaataggttcttgactagaagtgctaggtgcatttttcataggaaattcattctcaaaaaatgtggcatctctggactcagtaattgtaccaacacgcatgtcgggtactccagaatttactattaagaacctatatcccacactgtggatagcataactaaggaacacacaatctatggtccttggtccaagtttacactttttgactataggtacatttaccttggccaaacagccccatgtgcgcaggtgagagagatttaatttcttcctttcctattcctcgaatggtgttacttccttatgcttagtaggaattctattcaggacatgacacgcaatcaatattgcctcaccccaccattccttggaaagtcctacagtgtctaacatggcattcaccatctcagttagagtgcggttctttctttcggctaccccgtttgactggggtgaatagggaggcgtcctctcatgaataattccatactcttcgcagaaagaagtaaactcgttggaaaaatactctccacccctatcagatcttaaccgtttgattttcctttccagttggttttctacctcagccttatagatcttaaagtaatgtaatgcttcatc

SEQ ID NO: 19131 - DNA, 2201 bp, Oryza sativa
ccgaccaaacgaacaaaagaattattatagaaattatttttttacaattttcgatagtctagaaacatatatcttccagttgaaaacattcttcttttgtccgtgaagtcatggacaaccattaaaactgtttttctctggcagaatactaagtatatatcgccttgcttacacgcacaaggtgttttcctctctacaggcttgataagaagccgatccatgcatttcttttatgcatatatggacattttagtggcggcacaatcagccaaattagcataatatttccctcaaggatccagagcaacatggtgggcttgcataagatccaaaccatccaaaaaatagtaaatcaaacaatccagaaataaatgtctttttggcaagatagaaatgtccagctcttatttttttaaaactaatcgcacaagatagtgcgagttttatgtattgataaagtaggataaaaatacaagtctagtcctggaagactatagtcaagaaaaaaaacaaccacgtcacgcgtctacgacaacacctgccatgagagcgaaaacaagaacgaaagatctttgaagtgatgcatccaataagggaaggacaccgaaagcgccgctgccttttgctctagggagtcaggacatgattttcacttgaagaaagtaaccgggagaaacgagaagaaagtaactgggagaaacgagattatgcagcaacgctagaggaaaacggcacccataggcatcatcgttgctgccccgaaggcaaagctttcgcccataattatttcacccctcccaagaaagtttcctgtcacactcctgctgcaaccacctttcgaaaaccttcaacgcgtggccaccacgggcgacgcctctctgttggtcggccgtcaagaaggggcatgacctcccccccccccccgatgcgctccagctccatccatgcagttgggttggatggggagaggatgagagaggacaatggatctcctctctccccacactagcctgctcgacgtggccatctttgtcggcaaaggcgctatcgcaagaggacaatgtccagaatagggcccatcgaagaaccacagcactccccttagcagtgcaaccgccgaaaccgtcattgtctaattgcccacatcctcgccatcaaaccgtcccgtcatcgccttgccaccctccacgccacgccgatgccccctccatcaccgtgctctcgccatcgttacagataccaccatgcccgcagcaccgtcaaaccaccggtggcctccccgccgacgctgactctgccgcaccacacgatgctggatagctgagttacctcaccgtgcacctcgccggctgtaacaccccgattttcgttcgggattaaaaatcaattaataatgcatttctagaaattatattaaaagttaaatcaatttaatcaagtgaaattatagacgaaattaaaatttcctttaaaaaaaatctttggccgggaatattttgtaatattctttgtgccctaatgtactctccggaattttccatgaattttcagagctcgagaaatagttttaatagcacaaaaatcattgcatcaattaaaataaaaagaaaaaaaaatcctccttcctctctttgggccccttttcggcccaatccctcctttctctcccgcggcccgcgtgccccttatctctccctctcgggccggcctcctccctcggcccgcacggctctctctctctctcaagtctgctttacctccctcgcccgttttcccctctctctccccgacaggtgggacccgaggccccacctgtcatcttcttctcctacctccagctccatccccaaccgccgccatggccgccaaatcctcccacgtcgccgcctctcccgcgcgactccctctcccgcgcgtgcgtggacgcggtcgtcgcccacgtccgcgccgtttccccccactcttcccccgcaaaatccggccacgtcgccgcctcccgcatctctctctcctcccacgttgccggccggtttctacctctctcgggctcgatcccgcctcccctcccctataaaaacattccccacacctccctctccattttcccctctctcccgagccctcccgtgcacgaaaaccaccccgccaccgtcgcacctcccgccgccgctcgccgacgaccctccagccggtcaccacag

SEQ ID NO: 19132 - DNA, 3839 bp, Oryza sativa
actatggtgagaagggtgagactaatcacgaaagacattgttagacccgcccataaccgcgggcacggctattcgaatagttttactctgatcagaggtgtaccactgtacccacaagacacaaccccacatcatgtcaccatgtgcctcaataccaccacggtacctcggaaaggagttgtgacaataccccttgcataacacaatccactgcagcgcaccttcctggatcataatcacccccttataaacaaggcatggactccccagcgacccctgtgggcttatctccgtcacttctcagtctggtgccccgcaatgaaccatgctatacaaaggataaagccgttgcccacgctggcttgtggttggcacggttaatgtttcacaaccgaaactcgtgaaccggttcttaattgtcacgcgcacgaccatcaaaaccatgtgctcacaacccaccattatctggttttagttggcacattaattaattaatcaatcacgattgaccatcgtgaactatcattaagccatcattaaataatagtgagtcataagttatcccgatgatgtgctaatgtttctaagcagggctaagcaattatacctaatatctagctgaaccaatatataaagcccaactagtcaagttataataacccaaggtatcaaggaataaagtaatcaagaacaaaagggctataacaatgaataggttaattccacccaatgacattcgaaaataaatgcaatagttgaatagaaacaatagctttaaacgggatcaacattctcaaagggttgtttgggatctgtgtgacttgccttgctggccttggaactcttcaaactcttctccggcgaaaacggactctccggaaacgacgaaatctaagcagaaaagagcaaaatcaccaaaacagcacataaacaagcatgaacggtacatgtggatatttttaatatgtagatctcaattttagaaaaatttacagacttgaaccaactaaatccgagctaagatgaattagttatgaatttttgaagatttaatcggattaaaacacttatattgattttaattgaattatgacgcaataatgaattatttttgaaaaggaaaaagggatttattgcgtcagcgggctagggtttcggtggaccgggcgcacggcggcggttcacgcgaacggacggccgagatcgacttgatccaaaacggacggccgagatcgatcggtccacgaccggctcacgggagagggcgacgatgacgtcggcgatgacatcaccaccggtggcggcggctcggcggctcggacggctcggacggcgcaagctcaccggcgaacggcggcgctttggcacgaacggagggcaccaacgggtagcggacggcacggcgaactcaccggcgaccaaagcgacggcggaagaggaacggacggcgacggcgacgaggaggaagcggcggcaaacttcgggttgacggcggcgacggtgctccggcggtcttcggcggcggcgaaggagcggacgagaatggcggcgacttggcgatcacgacggtggccttcccgagcgatgacgacgaccgagacggcggcggcgcacggctggagcgacggcggcgacggcggcgctaggttgcccggcgctagaactcttccggcgacgagaggcgaaggcgagagtggcggcggatagaggagacaccggggaaccttttaaaggggctcggaggcgacggcgaaggcccacggcggctggcgacgagaaggaaggtttagggttcggaggaaagagacgaatccgattcgaactcgaatccaacaatttccaaaaagaattagccgatgattccaaaagagaaaaggtagaggagatcccggagattgtttccctctatcaattcggccggagaaggaaaggatcgaccgaatttggaaaggaacggcggcggcgcgaaactagggtttcgggcggcggcggctggaggtagacgacgaccctgacaggtgggccccacctgtcagcgggcggacgcgcgcgcgcgcggcggactgggccgacttgggccgaggagagagagagcggttttgggccgactttcggcccaaagccaaaagaagacttttaaaacctttttcaatttaaattatttcttaaatgtaattccatttattaaaaatacttccttagctcaaataaatcccagaaaaatctaggaattatagaattaagcaaagtatttaatgaaattttatctggccccattttatattggaatttattaattaaaattagatcttctcttctaggcttttaaaataaattctaataattccaattaaacaacaatttatatatttaggatttttagggtgtgacaccgtgccccagccgcgccgcctcgtggccgttcgatcggctttgggccgatccgggccgtcggttcccgtggaccggcggtgggccgcctcggtggtcccggtccacggtggaccgacgcccttgtgccgctgaccggtggggcccgcttgccggcgccgcccctcccctttgatgacgtcaacaaccctcttttcctttggaaaaataaataataattgcgcaataaatcgagtttaattctaagaattcatttaaatggctcaaaacttctaaaattcatatctaattcatacgaactccaaattgggccattcaacttgcaaaattcatctaaaattgagctctacatgtttgtttactttttatatactatttccttggtttttattagagtttttcctcgttttgcgtgccagcgtgtagaatccgtcgtttcggaagatcgcggtcgcaaggataagagttcggaagatcaaagtgaagaagcaaggcaagtcacacattccccttgagcatgttgatcccaatttacaaatgttttactgtttgcaaataaatatgcatgttttgctaattacatggggtcagggttttacctatctgctcgcttgtgccatgtttacttgatatctgtcctttgtcaaccatgggtaataaatcgcctagcttgtgttactttgatgacctagctagaactatatgcttagccatgcttaattaccactagctcagttgataggacaattacagtattagaccttttaatatcagaatgagctgcgtgctcgagacatctggccatgcttcatggtcgtaattatccaactaaaatgcgactgaatggtgggctgtgggtgcatggttttgctggtcgcacccatggcagttaaggaccggttcgcgggatgccctggaagaacttatcgtacttaccacaagccagcgtgggcaacggctgggcttgtagtgtagctttcctctagccaacgcatccaggcaagggtgggcgtgatggagtttggatgggccctgcgacggcctatgcggcttccggattcacctaggcacgagaagggactgcccgctgccttgcgaggagtgggggtgaaacctgaggtgtggtgtgcttggttagagggggttatgcgaagggtcctgtcacggcctctttccggtatgtcgtggtggcatgtcggcgcacggaaacgtgtcgggaggctgtgtcttgtgggtacagttgtacacctctgatcagagtaaaactattcgaatagccgtgcccgcggttatgggcggtcgaccagattcaccgtgattagtcccatcttaataaatcgacccaatgcactgtagttcaggtgggttggttgggcctgttcaacgtggtgtagcgttgatcagtggagatttaatattactttaattactcaaccgttttactgttt

SEQ ID NO: 19133 - DNA, 1704 bp, Oryza sativa
agcaaactggaaaataattgatcatctattcaggactgatgatatataataccaccagagaaggccacacattatccttgaactgatcagacagagaaaggcggtaggaaagaacattgataacaccatatcttgacgctgcagtagtggtgagacgccacaatattatttccatcaattcttttcatggcagacgagtagcatttgcgaccgatgctgtaccacgagcctgaacataatgacataaaatgaattactgttatacatgccattacatgcacagtttcattttcttcatataacaagtaaagtaagatgcttattatgacataataagatgaataacagttattcaagctgtagtccactaaaatatcatggtgactacaacgaaaatttgtttagattaacaaaaactagctaggctatataaataggtagaccctatataggaacaatgaaaaaaaataaaatattaaaattcctgctatcattaagatcgtaaccccttcattaataccgtgtcgggggtaggtattcctaacctctgcattaagagcttgatgaaaaatttcatttatatttattgacacatggttgaaaacattggacagaataaaaagctacttacagcttgtggattatctgcagtatagattgcacgaatattaagttctcgaacagcatcctcgctggtagagcttgggtccgttgtgaactttatactgccatgggccattgaaaattctccagttccaccaataacagaccactcaccactgcttgcagcaataatccccatcacctgaagtgtggatcccttaaacctgttttgataaaaaatataaagcttcatatatatcagagaagattatagaagtgacaatgcatacaattgaacaattaattaagtcaataaggtactcaacactatagcagggaaatttaaattatacatctagttatgctagcataaatttcaacctgtcatcctggaacacaatgttgtgggaagtgtaccacatgttagcattgctttggccagcctggacatgcatgccttgtacacgtgcaacgatattatcattgggattggttgtagctgttaaataccagtcatcaacgagtgttgtaccgaatccattaggatagctcgaggctatcacaaattcttcattgcggtttgggtgatttgctccagcaacaaactggtgcaggtacaagtgcatggtaacctcattttggtcagggcaaccacactccacaggacatatatcatagtaggtgctggcagccatgctcaggaatgttggaagcaagaagaggatgaaaagtgcagagctactgtaagtagccatgggaagtatagcaaattgttgatgagcagctagcaaggagagggagagagagcttgaatgccaactggagctagtttctctgctctgtgatggagattaggaatagacaatggtgtatttatagggtgctataattgttataatgtagacccgtgaatgtttatagggtgctatgactgttccccatcgtcctttacaccgaagggatcagaacgattggctcactgtgtacggggccataatgacttgatggaatgctgagaatgcccttttaattttgtgaaactactaaaatgccaggctgtgtttggaatcagcccctctccatcgtattccacgcgcacgt

SEQ ID NO: 19134 - DNA, 3613 bp, Oryza sativa
ccggccgcctctcttcccctctccgcgccgcccgctcctgcctcctctcccctctcccgcttcttccccgtgcgccgctgcgcccgcatctgcccgcctgctggggagaagcaatgagagccgacctcctccccctacttctttccggcgcgccgccatgcccactctgccctagccgccacacccgcatctgcctgcctgctccacgccgcccgcctgccgcgctcgcttgccgcctgccgccagcctccactcaccgaagaagataagagagaagagagaaaaaagaggagaagaaaataggagagggcaactgatatttgggtcccacgtcagcaaaaccacccatatatactgccataggactctgagtgtacgttttgtgtgggtttaggtgtgcaaatttctgattttgtatttaagggactcaaaaaaatctcgctattaagttgagggatctctggtgaacttattccttttgtttttgggttcccttggcccatcttgttcttttctgcaaagcccatggcccatctctttgcgcagcccagccagcacaggcctgcgctgcgtgtcattccagcagccatacacgcgcctatgcacagtttcgaaaaagaaactgaaaattagcatggtgattggcgcgccgccctgtgtgtattaccatgtgtattgcataagttattgatttctaccaagcaattgctttcagtttattaaaaatatcaacatggtaatggtacttaactgtatttgtctttatatttttcaacatcgtatgaaaatttcagtcaaaaaaaaaacatcgtatgaaaattgtcggtcttacttgtgtaatttcgcttattttatcttaattttcaattaaacctatagtagattacatctatttgaagatttttaataatgagattcttgctactactaatttggtgcttttaattttgctattttagacatataggatgttactatcattgtgttacttgcctcgattttgatttaacatgaagtaactgcatctccgaaaaaacttaccatgggctacaaattctaatatcgctcccttccttttatatttaccagtaatctatccgtgctaacactacagtgatttttgatagtgcaaatcaaaataaccaaatgaagaaacatacgtctaaaaatacaaatatacaagcaatcatatccatgtttttatgcaaatgctaaaggatctacgcatattagcattaaaataataattttatattcccaaatttatagtattttataaaattgtagaaatataaaattgtggtcaaactcacaccaccaagacaaaataattcaaaaattatataatttttaatttttgtcaatgggagtagtaaatttagatggagcaattaattgcatcttatgtatatgcacaacggtaaattacttgaatatttgcacaagaggtatggaccaatattataaccttataacatgaactgtctcatttcttctccaaaagggaatacatgacaattctttatccacaatttgcatataaatacatatggacaatctcaaatttattagtatcagaactttgcgtctaacgatctacaaatctgtccacatatctccatgtacgaggaccccgtataacccatcaacacattttcctggaggttatggacaattccaacagctcatcacccaagtgtatctccgttttttaatagatcaagccgttgattttttatcacacgtttgaccattctacttattaaaaaaatttacgtaattataatttattttgttgtgagttgttttatcactcaaagtactttaagcatgatttatatatatacatttacataatttttttaataagacgaatggtcaaacatatgttcaaaaatcaacggcatcatctattataaaaaacggagggagtattagaattatcgcagcaacagatttcatcgtagcacgataaatttcaatgcatctttgaaatctcatttaacacgctgaacttttaaaataaaaattaatcaatacttaaaagtacattactactgacgtgttcatacactccatttgtaaaataatttttttgcggggcatttgtaaaataaatttaaaagcatcgtaaaatacaaacatggatttcatcactgcacacaatatcttaatcaaaaaattgcaccagaagattagcaacgtaccatgaccaagcacaaaaaggcatatcatatattcattattggaccatttgctcaggtgaacaatttggtgccatacagacgaactcctggaatattgtaagatcaacatgtgttttgattcttcttctatgatgaataattggcatctgtgattattggttttgatatttggagattagtgtcgaagtggttttggagataattaattttcaggtgatgaacagggtttgctgttttgtcaggaccggtcagaaaaggcggtggttgccggtcagaccggcttgtgttgagcggtcagaacggccagcccgcggtctgaccggccgacgctgtgtcggtttcggtttcgggttgtttctttggatatccatgattgtttcacggttatggcttctggatggatactatacgtatgtaatactgttgtttgctaacaatgagtcaagttggtgatagcttggtctcggaatatggtttctttgtttgtttcatgtgtaggtgactcgatgccacgggagagtatttgcggtgatggaccgggagtcggcttggtggtaagacgatgtccgtggtggacagatatcatgcgggatacttaggctagagttgatgcacgtggttggtgattggttatgtaaagtttgtttcttgtactagagggttttctatggtgattaggacttttaggatgagtttggttcgtggctttaggctgcctacctcatgtataaatagagggggagcgtgaggcttcccgatatcgcttttgagagcaattgagttgctagtttagttagggtttcgagtttagtcgagatttttgtaaggagtgttgttggtacactttgtaaacacagagagaagcaataaaattgtcatatactttaagaattcttcgatttgtgtttcaccgggtttcggcggtctaaccggcgacacaccggcggttagaccggcggcggcagcgggcgcaggaaggcgacttcggtggtcggaccggttgatctatactggtcagaccggcggcatccgaacagtcagaccgacagatctatctcggtcggaccaacttccgtcaaatttgagggtaacttttatttccgctaaaagttttcggtttttgggtataccaaccattcacctcccccttctggttggcttagtttttgtgattcgatcctacaaatgtaagaaagtttggtgccatttaattaaagcattataacattttgcagagaacggaagaaaacccaaacaagcctcatgtaatactgcctattcctctttcgtccagtgacgcagttcctaattgctcaattgaaccatcatccccaaaagagtactgatggcctcagcaaacaatcggagaatgcaagcaaatcaagaagatagagtacaattagtcg

SEQ ID NO: 19135 - DNA, 1244 bp, Oryza sativa
cggtattgcctctgaatattcacatgattggcatggaaggtggacaaagttttgtctatcatgtcagcatcagtgattttctctccacatagcttaagacaagtgacaatgcggtgaagaactaagttatattgctccacagaattgtaatcctggaaacgtaagtgaagccactcacgttttgcttttgggagcaaagcctttacttgatggccatagcgatccttcagtgagtcccaaaggaccttcggatcttcctcagtcatatactcattcttgagagtaatattcaaatggtgcctcaggaaatgcagtgcctgattttttcagctgaagttggtaaattattaactcctccaattgatgttgtaatagttgggtcctgaatgaatgcagttcaggagtttcttagcaccaagcatgattttggcatccagtgcccatgtcaggtaattcttgccgctgactgctagttcagcaaaatctctcttagcaatatcagtcattttcctacattagtcatgcaaaattcaataagtactgcaagtaagagcatgacaagtgtgcaaatagtaaattgcctagttatctaaatttagtactatgtcaatatattcccataattctcccaacatttctcagaattactgtactatttatttaggtaccaaagatgaattactaacccattaaatagtatcctgaaaatataaaacaggtaggaaaataaaccataaatatgatgctctctggtgtgtactaaatttcaaattatgacagctcatttcctaaaacccatgtctctaggattctatggttgattcaaaaattaactaataaacagttaatatacagaaaattgaaagtacggaataactaaaaaatgtgatattctctgtaatttctataatcccgagggactattccgctaaaattccaaatccgcataaaatcagaaaatattcggaattttgccgtttttgggccaaatttcgattcgagcccgactccttttataggccgaattcatattcggcccacctctatatactggccatccaagggttaactggcccatcgggaccgtcggcctgctaatggtctcagcctatagtgtggcccaacaaggggtgccacaccttatccgattgagtggcatgggttgaaaccctagcccccaattccaccgatgcagtggcggcacggtttcccggaggctcatgcgggcaaggcagcggggttaa

SEQ ID NO: 19136 - DNA, 640 bp, Oryza sativa
tgtagatcatgcgtcagaggcctaacttgtcgccatcgtacacatatcaacctaagcaatcatatgtcccttatccattggtgtggagaatattcatgcatgtgtaaccccctgcatactgtacatgaaagagcacgcgtagttggttaaatgtccaactcgcggtgctagctggttcaaatcatgcagcaatacttgcctacaacaggatgacacaattgtagagaataagagaaagatcccgcagcgcgtaatgtggtaccgtcgtgtgaaagcccgcatccaccggtcgtactcgcaccctagagatagcgagactaatgcaatggcttcaagaagggcgcaagaagagttggtcgcttcgacacacatcggatgctcatcagtggttggattttgatgccaaggacacataatttgctatagacccacgtcatattagtatttgcagtaagtactgatgccattcatccttttgtagacatcatcagttcccactatgtcttggccagttcttctatccatgtacaatctcccgacttggcttggccagaaaagaaaaaacatacttgtatgtatcctgaggcaaggacccccacagcttggtatagacattgatgtatttttcaaaccgctgttg

SEQ ID NO: 19137 - DNA, 670 bp, Oryza sativa
attgacgtacgcttaggtggcggtatagggacgtatacagcacatccaaatttgcgcagatgggaaatatttggtgcatatccacgtgtaagctgcataggggatacaacattgtatgcagtaggtctaatttgaagtaacgcagctgcatgcaaaacagcgtgtccccaacatgtagttggtaggttgctatgtagtagcaatggcctagcgataagcttaatcctcttaattaatgattcggcgagaccattctgagtgtggacgtgtggtacagaatgttccactttaattcccaaagccatgcaatattcattaaataccttagaggtaaactccatggcattgtccattctaatggattgtatccggttatctgggaaactggctctcaactggattatttgggaaataagccgcgcaaaagcgtggtttctagtagaaagtaagcaaacagtgctccatcgagttgatgcatcaattaataccataaaataccggaatgatccggacattggattaattggtccacatatgtctccctgtattcgtccggattaattggtccacatatgtctccctgtattcgttgcaagaatactggtgattcggcattcacctttaaattagagggtctaacgattaatttccctgttgcacaatcagtgca

SEQ ID NO: 19138 - DNA, 2151 bp, Oryza sativa
tgacacaaactatgatctatcttagtacaaggaagaatagctaatttgtggagagtctgaatagcagctgaactgggatgaccaagacgacgatgccacagggtagaggattgggccaagaagctgtgggcagcaatagcaggtgcagcaataggtagagtgtagaggtcaccacgactattgcagcgaagaatcacgcgccgggtacggaggcccttaacagaaaaaccaaactcatcaaactcaatggaacagttattgtcacgagtgaattgacgaatggaaagtagattgcgaaccaaagagggggcgacaaggatgtttttaagatcaaatttagtggttcctataggtagaaaagaagtgccatgacaaataacaggaatagtatgaccattgccaacggtaatgaaggtataggaattgggaagacgagtatcgagaataccgtcggtagaggacatgtgtgaagtggctcctgtgtcaagcacccaaggacttggactttgcacggacaactgattgagggcagcaatcagacctgcctgatcccaattgggctgagattgctgcattggtggcaagcccggcattggtggagagacatatgggcctgcaaatgtcgtgtgtgcttgaggatatgggccaagcagaccggcactgttgctgggacgccagggagactgctgctgctgcacagcccatggattgaaacagacccatgggccggtagttcgtggcccagcctggtgctgctgctgctggaaattgttcccgaagttgccatagccgccgccgttgctgttgttctgtcgtccgccattgccgccaccactgctgttgttccggccaccgttgtagcgtcactggttgcggcgaccactgttgttggagacatcgccatgagactgtgatgaagaagaggacgcacaggtgccggaagtgcaggcattggcagaggaggcagccaccaccatggttgtctcagcctggaccttgtgtgcattggcaattcgcagctctttgagcaacaaggtgttgtgcgctgaggcaaaggagggcagaacaggggcgctagcgatgttgtcggcggtgctcgaaaaacgagagttgaggccgctcagcaagttgaggacaagctgagattcggtgacggggtggccgacgtcgcggagggcatcggcagcagtcttcaccttctgacaataatcggcaatgggcatgtcaccttgcgtcattgagtggaactcgtgactgagatagatggtgcggggttccttgtttgcttgaaagagatcgtcgatggcgagccataggtcacgggcggtctggtcggtttccatgacgacgtcgaggatagcatcggaaacggagccgaacagccagccctgaacacaacaatcggcttgtgcccaagtcgagtcgtcgggacgagggggtgcagtgccatcaatgtgaggaaggagcccaaacttgccacacatagaagtgaagaaggtcttccacttgttgaaattggggtgcttgagctccagggtaattggtatgtgagtcttgacgttgacggtggcatacgggttgacgaagatcgagccggtagaatccccggtgctggcagcagaagatggagtagagccggatgatgtagatgccattgttcccgaggttgtggaagaggaggtggactcggtagacatggcagagaggcagaataatcacgacgtggcgaagacagaaagcggcgcagcgtgagcagagcagggcagggcgcggcgcgggcagggcacggcgtggcgcgatgggggcagagcgcggcgcggcgcgatgtagcagggcgcggcacggaacgagcgaggatgcggcgcggtgcgtcgtggcgcggtggggacatggaaggcgcagtggggctggggcgtggcgagatcgtgaggggaaatcgctggggcgcggcgcggtggtggggacgtggaagtcgcgtgggcagcggaagagaagcgaacgcggaaaaagcgaaggccataggaagcggtgaattagggtagaaggaaactggtatctgataccatgtagagaattatgagacgcctcacaacgcctcacaacccaacgtgggagggtgattgtatttatatatccaatacaatagagatt

SEQ ID NO: 19139 - DNA, 1168 bp, Oryza sativa
tgacattcatgcattctatagtactccacaaacacaagctgtaagtggaaaactctaaaggtttacattaaatctatgtgtgctattaattgtgtttcagttacacatacatattaaaatacaataccttgttacaagcatgttaactgtttattttaatttgttttaagtatcccaacaaataagagttgcagatacatctgagtttatgctgattttcattacctatgcatagtattgtttttctctcagacaacttgaactgtcggacgtacaatgttgaaatgcaccaaatgatttgattgtttataagcctataataatggcatgaacaaaatttgtgatattataatgattcaggatgtaatgactacaacgaatacaatagaccagcaggccgaataatgcatcatgcagcagtccaagtacaagaaatggtggaactactcggaaaataaataatggtgtggtttgatgtctattgtgtacattcacgtcaaaagaaaatgtctattgtgtatattgctggcaatcgtcatcagaacgaagggcatgtgatgttaccgtgctatagcacatttgtttgtttttgtaaaacaatatgttttaattgctctttgttatatatgtactgtttgattgtgaactatggatcataacttatatgtctgatccttggaataaagaaatttgtttcagaaaaagaggatagttatgtaccgtaaataatattttattttctggtgaaatgcactatgggatgagtcactcaattgactagcaacttgtccatgctaacgctacgatagtatttaactaaataataaaaagaatgtgtatgttttggcaatcaagcataaaataacatcataccatttccatatttcgaaattatgtaattcttaatgtacaacttcacaataagtgcatagacaaaaaaaaaaaagtccaaaccattcatgaccatccaatatttgatctacatcccttttacaagataattcatattatttttccttatatgcctgccaccaaaaagaattttccgtctattctatcctattcacatgacccagtcaccattaggagcaacactgttttttttttcttttttgcaaaaaagagcaaatccatatttctctctcccatatatatggagttaccgatc

SEQ ID NO: 19140 - DNA, 1571 bp, Oryza sativa
caaggatgcaacaccggctagaggatccagagattgccgatgcaccggcttgatagaagtttgtccagcaccataaactttaaaatcggagatttagcctcctaaaccgttcaaattacctctgagttactttgatagtggttttgttttttttttttttgagagggtacaaatcagaacgcacacgaacacacacaacactcacaccacaacgcacgcacacacgcgtgcgcgtccctaacacacgttaggaaagagattcgaggacctatgcctcactgtacgggaaacatacagtaccaccgaacacgcacgtatatgtaccctattacctaactaggaccaaccgaagttgactcaggaaacgggaaaaacccctgtgaggtccgtgagtcgatgagtggtcctcaaatcttaaacaagcagttttggaacataccaacagagctacgctcaggttttggataactggtatggcatgttcacatactgtcaatcatcggttatcaatttatattctatagtgatgtcatatcagtattatattaatcatccatttgtaagggggaaatttgatcgaacccgacccgtattcacccctttatcacataatcatactcatccaacgattatgtaaattaaataaaaactactatgcaaaaccattttaagtgtaatataacatctcataggataggattagagttcagggtgctgcatccacgttttcaaatcatagggggcatttggacttaaaaaaaaatgaaaacgcgaatataccagccgaaagtaaagctgcggcggatggggtgaatggctccctcctctccccgccgagacctcgacggctaggggaccgacggcggtagctccgcagctagggacaaggagcggccgatggccttcgacgagaagacccggacggcgtgctggcggaaggcggcggtggtgatgggccggcactcggagcggtggcgggaggacgccaccggctacatcgtgtgccgccgcttatggagctgccacggctgcctttgctacgagtacgaccacatcgtccccttctccaaaggtgcgtcccccccttcttgcccactcgatttagggagaatcctcaagttttccgtttcttgcttggagaggtggtggtcgatccgtcaagttcgtatctgtaggattctgatgcgtttgcttgccgcggtgtagttgcaatgttggatactcggactatttttgctcgatcaagtattggaggagttgtcgctgagttgagttcatccgcagatgagcactaattttgttttattcagaggaacatttagattaaggttgggatgtttaaaatcggatatgagtacacaggtgagttcagatggagaaattttagcctaatctcctgtgggtcagtagatgataattggaatctgtaatgccgtatgtttttgtttttttactaagtaaatcatttatgtttagttaaattagggggagatgccttctccaatcaataaagatggctgtgcaacaatatcatgtaacatttagcaatccatgttaagcaagaaacatgt

SEQ ID NO: 19141 - DNA, 1829 bp, Oryza sativa
gcatattttgtacccacgaacattaccaacacattgcagcttacattttttttcatgctttctgaagtaacacgcatttttcactttttacagtcgtagtgaatctgctaatgagttctttgcttacacataagaagacccgaaaataattgaaggatcagtgtatggcgtcaaaacagaaagtaataatacagattgatcctaggtgggctcaggccctcccagtttgtggaagtgattccctgcattatggacggagcagcaagacagaagggtcaaggaaggaggaacagcacgcttggcagaagtgattccctgcattacgtcaactgccgcagcagctctacccgtggcagagcagctggcaaccatagcgagcgaggccagagcagcaaacgccatggtcggtcgctcgccggtctgttctcgtgccgcaacgcgtcctcgtctactgtgttctatggcgccgagcagacagtcttcactgctctcttaggactcggtggatcggctaggtggagacaagggggtgttttaactaggcttaagacagcaactgcatcgtgtcgttgtaatctttgttttcttttcgagaaatgataaatggaatggatattaatgtctatttctgttgtttattttgtctgatagaaatgataatttgtgaaacaatgcatttaaaatgaaatcattatcataaaataggcgctacatgagcaaggtgtcgttgtctgactttcggcctctaatctgtacattttatatagttacaacccactaagcctaaaacttaacatacaaacataccacctcatcatctattagtaataattacatatcaaagctaatgcaagcatgcacatcatctatattgtatcaaattctacgaatcaatatgcaagcaaatccaatcaacaccccctcgtatcatttccacaatattttaacatagatatctattatttttataatacttaacatatttccatccatatatctcccatcaaagtgaggtatatcatttattttgtttcgtgattagtactaataattaaacacaaacttttcatcaattttcctacctcttgcttcttacgatgcaaatcttacgcaacaatttaatatttcatctacaatctgctacatgatctattaaatttatttttcttgagatatggtttgacaaaccagttgttaataactaatatcctttttctcctaactcgattgttaacaaaaaaaaaacatattcaaaactaattagtaatcccacaagcaaaacgtgggaaatcaactaattaaattaatactcgctacatattctttcagcaaaattttagttttaccaaacccgcaattactccacgatgtcaagagagcactaataaaacaatgcgaacattgcaaataaagtagttattcggttctttgtgattttagatgaattgtggcatttcaatgtgtcactctagttaacggcctcgaatgaccccttaccagtagggatgaaaacggtcggaaacggtcggaaaaaccctctaccatttccattttcattttattttctcgaaaatggaatcggaacggtatactcggaaacggtaacgatatcggttatatcggtatctcggaaacggaaccgtcggaacgggaatataccgatatcggacggaagtcgaaaattcatgtcggaaacagcgaactggggtatcatcccgcatttaactatgtatgaagatgaccttataatttcacccttgcatcattacgctgccacacaacaccgttatatgatgattaataagttgacaataagattgataaataat

SEQ ID NO: 19142 - DNA, 1634 bp, Oryza sativa
cgagagaggcagtatgtgagtcctcggggccaggcccgtccctcatcagtgatggggttttgttgcggtctgtccaagataattgataataggccacaacgaaaatccatcaccgatgagggtcatggtcatcggtgacgggccaggtataacagcctgacaaaaataactgtgaagcccatcatcgatgaaggttgatctttgatggggtttgcttgtggcccattactgataacccacagtataaataatgcaagaccttcaaggaattgttatcccaacctagtatgttgttcacacttcaggacagatggctagaggggatattttttttccttttaatttaaggaaagaaacaagatgcttccaaggtaataataaataaattacaactcaattttcgtataatacatagctatagatattatacctgttttttcacaatttgaacatggtgttggtatttgaaacggttacagataatccgcaagcgcacggatataccgatgtagcacttcccctcagagtattccaagggtatcgaatccaagggaacgtgtgtggtcagatcttcctccggttcatccaaggacaccaagcaattgataggctaggatagagatgattcactagtgagaaacagtgtctagggaaagcttaattttaatcctaacgcaatacttcaggcactggcaacccgctgttcccagatatcgctctactatgtacccggacagggaggacttaagtgatctcgagggctgtcaccacctctacacccacctcaaacgtaatgtgggatacgcaacaattactggataataattacctaaacaccatgtctaagcaattaatatctactttagtgtttataactcaccaaagcaatcactatattttagttgattatagtgaacaataatcccgtatgctatttaggaactaaccaagagataattctcacaagataaatctaaattactcaagaagaatatattgaattcagagtaataaacagaataaaagaaataggagaagattaccgacaactccggaattcttccgactccttctactctactctcttcctattctagtatacaatatagtacaatagagcctcttataattcagctcgagcttggaagtgaggtccttttatagggcagttatgacggttatgagaaggggaaatgtccgaactgcccccaaaccgtcattgggagaacatcaggagcgtccacgctaaaccccaggatcaacgatgatcccctggttcggccgaacctgggctgggccctcctggcctggccttcggtcggtgaactccctgtaccttcttctatccatttcgcggatttttgggttgatccactggtgtttcgatgaagttcgcaacccctccttgtatggatacataattttcctcactttagtctaaatttcctcccaacttcagggtttatcatctgcatacaactatacaccaacacttgtggaacatgtgagattaagcacctatactatgttgaatgttttattatctaaactttatgcagatgttggcggtatagaatcggcatttaacagccgccaacaaaaccccccacacttagctctttgctcgtccctga

SEQ ID NO: 19143 - DNA, 2831 bp, Oryza sativa
attcctgcagcccagcggcgagcttgtggatcgagggctccggcgatttcacctcatcctcttggaattggctgggaacccttacgattggagggggcgtcaaatgacgcttcaccttcataggtggagggctacgggactccgctgccccctccttctccgatgccatcaaaagccggagtaaacccttaccatacccaccgccggtagttcgcactccctgaatacggaatcgctcctccttcggagtggatggagtagcggtgggtgtggtgtacttgtggagcacctcatcccttgccttggtgaacagggtgcccacatagcactcggcgggagacggcgcggccttcccatcatcttgaaaaaggcgtcgtgccttcaagagaccgagctctcccgttgtcggccgtcacgcaggcgaatccccctggatttttattcttgtaacatggcgaggggagagggatcgcactgccgaacggggggccaattggggccgagaagggttctgccgaacccctggttcggtcgaaccagggagctcgccgacgggctccagattcacaggggaacccggcactgttgcgaggggctgcgcccatagtgtgttcaccccttccatcgtgtaatgctccaccgggatcaattgatttgccagtgtcggctctccatcaaaattgtaggtggaattggaggaggagccaatgaatgggattagggatttgccagccattagtgggtatgagtggaaattcgaggaattgggttgaattggagaggggagtgtgcaaatgtggaggaaaggaggaagaagaagtgttctggtgtgatccgaacgttctacctccacacgcgcatctaaacagactagggacgagcgggggagactagcattcaaattcggggccgatcgggcactgccctggttccctggtgagtccggcaggcccccaattttcttcctaggcccactaaaacctattctaagcacaataatgacaactatacagggttttaagcatgcaatagatgagatcattgttggtatttcttacgaccacagataaatccgcaagcgcacggaataccgctgtagcacttcaccttcgggtgacccctaaaggatatcgaactcagggaacatgtgtaatctacctaaggctaaggcatccaaggacaacaactgatgataggtaggctaggctagagaggactttctatatgttttaattatgcacgctaagcaaaggtaaattcctatctgttgcttcgggcaccgatccctgctagtctgctagcgtggttccggctatagctctatgatatatccgaacgtggaggattactgggacggaattcagggctgtcaccacctgccgcttacctctgacaaatccgtgggatacacaacaaacaaaggtaatctctaacctagacaccatgtctaagttattaattactactctaatacttgcgcgggaacttccttctctatccggagtcctagtaatagagcactttgtatgaatactaaacaatgaacccgcaaatatggaaatataacttactcagactaaataattaaataacaaaagaaaggaacacgagtgcttacttaatagaagaagttctccgtacctggagcagagtataccgacagctccggtactcctctcgaattcctcctatgaagctatactcgtcgaggtagaagtcggatgagcgccaaacttccaggcactcctccagagcttcccctcactctctaccttattctagtgtacaaaagatacaatagagcctcttgtaattcagctcaaagttgtgtgtcttggaatgagagtgagctcctccttttataggcaggtatgacggttacagcctatgcgaaatgtccaaaatgccccggaaccgccattgggacgtgatcaggagcgtacacatggaagatagcgatgaacggccacagaacaggttcggccgaactggttggttcagccgaacccaaaaagtgtcctcccgacctctccttcggccgggaggttgcttagtgggcccccaataacctgggctatgttttggcctaattctaaatggtttttattgacttattgcacgtctaatccgtgtaaacgcgtcctgaatacgtggaggtgcattttgtcacatgacgatgtgttttcttctcaaaataactgcatacacatatttcaccaacactagtggaaatgattagtaataatccctaccactaagttggaaaccatgttttaattcattatatgcaggtattgacggtcaaatattatgatttaaggaccgtcaacaacaccaccacacttaacctttgctcgtcccgagtgaaggctatggactctacaacagaattatgacttccttacttccttactaatagtcacgcaaacaaattattcaaagtcatacttgtatttgtggatgtttgtagtgtctaccatgcaatcctgagcaattgagaaatggaacaatcttcactaagtcaccctaacttttcatgaagaacaacatggggtttttcatataacacaaaattataactttgctttactcctccattgattctctcgatcactcaaagtgtatgattcctcacaaaggcatatgattgtgccttttcttttcctaccatctaataaggcttatgtggagctcagggtatggaaaagagtagaacattacttgcatcacatatatttcaaagtcaaataatggatccacagaaatacaagtcatactttctggtcaagaatgtgtatgtgtatgtgtatggttaatttgtgggtggaaaa

SEQ ID NO: 19144 - DNA, 2042 bp, Oryza sativa
aatgagtagccaagaacagaacgatgcttttctaacacggtgagaagacgttgagtctcgtcttcagagagcttgtcactgattatgacaggagcctctctgtcattgtgtaggaaggcatatcgtaggcctggaggtagaggtttaagctcaagcggaggtcgagatggtggttccatgattggcaggtcgagagtctcgccgggatccgcttcctctttgatgaaatcggggggacctcatcttccagaagggcctcgggagactcatgaggaggaactgcggtaacctcttccactgactcaatttctgggagagggtcggtcaaggtgatccttgcccgcgagaatggaattgagaattcattctctcctagtattattttgaggctaccaaatcggggtgtgttgatgataagttgctcaatgggcagcccgattaggatatcaaagtcttggatttcaaagacgtggaaatctaagatcgcctccctgttttcaaagcagacaggcacatcttgcacaatcccaaatccttcgatgatatttccgtttggatgcttgaagaatttgtttgtcggggtcactgccttgtcgattaaataagcgaatgcaaaagactcagagacgaggttggccccgacagttggactcagagacgaggtcgttcccttccaggtgacaaggaatgattcagggagcggtatttatccgaattacttcggatgaaagctctgcctcccttagccattcatcgctcattatggatgtcaactcccggacagtttctcgtaggaacccgagttccataggatcgggaggtgacaagggaacgggtggtttcctcttactaaaatagtttatggtattgccgtattcttcgtcaaaaccgtccctaaacagaattgcggcactatccagagtctgaatttcttcattctcgacggacggctgctcaggaaccttctcatcaaccgagctagcaaaagtggatggttcagcaagtggctcgatcgttagaggttcctctatcttggacacggatgcctccgactggggttcattggactgcgtcatgaaggaagtgttttctagaatgcgatccaaaatcgtttttccttgtgacggcattttgtgtatgaatgatcctccagcggttatgtccaaatagaatgcagactccttatccaaactcgtatggaaatgtgggagaagcacatactcgggtaaggacagggttggtccggactggactaaattagtgaatctggaccaagctgcaccgattgattcgtttttgatcaatgcagactccttatttctactcgaagggcagtaatacgggtaactgggaagaaggcaagatagaatctgtctcgcagcttttcccagctaccgtttacacatccaacggtagaggtgtaccattgctttgctctctcttgaagagaaaatgagaacaatttccaccgcacagtttcttgtctcatgccacgagtcttaaggcatgagcagacttgttcaaagtctcacagatgatggtagggattttctagatcaaagccaaaaaaggattttccctaaccatactaattagttcgggacgaatttcatagccagttgtataaatgggctccgatgaaggaggtggctcatagaattcgccccgaggagcagacagctcaaaaagaggttgctccatggtcgagaagagtttgacaggaatacttctctgggatagcaggggtgaaggtagaataacaaaaatgaaaaaggatacgaggatgaactaggttcggaaatgatcaacaaccgttcctcggcaacgacgccagaaatgcttgttggtatttgatacagttacggataaaatccgcaagcgcacggatataccgatgtagcacttcccctacggagtattccaagggtatcgaatccaagggaatgtgtgtggtcagatcttcctccggttcatccaaggacaccaagcaattgataggctaggatagagatgattcactagtgagaaacagtgtctaggga

SEQ ID NO: 19145 - DNA, 1003 bp, Oryza sativa
cccaatccggcagaaaagctttgtcaagttcaaatttttctagacaatcttcagtccagatgtatttcggtccagatagtgcagcggcctttttcgcatcatcccctcttagtagtgctctttccttgccccctctgaagacgcttaccatgtatttctccttgtgttcatcctttttcttggggtcgtggcttctgagcaccctaggcacttcggacttatctttgtccgtggcttcaacagtggtctcctcaacagggtcccttgtaggatttgggtcctcatggatggtcggttctgattcatcccattgcaatgttggtacgtcttctagctatacaccgatggatgaaagaacttgcacatctggtagagccacatctggttcttcgacatccggtacactttgcacctcatgttctttatgtggcaagtcaggtgtgtcaggccctttagttggcagaggtatcttagcctcttccgccttgtccttcaacgatcgatgcttaggaggtctcggtggttttccaggaccagcggcgacattgctaaatatgatattctttttgtgccatagaatgacaaggtcgaccacatccccaagtactgtgattccatcatgtgttgggatgtctaggtcgtacgactcgaaccctggattcacctcttgcggctgcactttcgcatatgcagattcaataaatccgccatggtagtttctgccaggaatagcaattcccttcgccgcctcaagtgtcctcctagcgcgtccaattgggatgtgcaaccggcaaggtttagtctcttgtaaatcctcgaacggatattctggctccggttctttgggatcctgtagtggaatagaatatttcatgcagaaatctatcatttcttgttcaaaccgcttacccccctcgtccctcaacttttccttgtaggcgtcatgtttcttttacgaggaggcgtcctgtttgaagccttctttccaactcagcttagagga

SEQ ID NO: 19146 - DNA, 3188 bp, Oryza sativa
tagtcgatttcccatatttcttcaataaacctaaagtatgtctgtttttcccctagtgaatctattgcttcaactcgaactccgctgttctgtgtaactgtcttagtatctcgggctcttgtactaaaggtgtatccattaatatcatatccctgctaggaatttacagtacttgattgaccacatgagaaccgcttcattgtaatttcctcggtggtatctccatcaggtaaatttagttcttgcaaccaatctacgaagcggcgcttgtgttcttttatcatccaatcatccgtgcgtcccttattttcagatctgagaagttcgaggtgttgatcgatgtaaggctcaacgatagcaagctgatgaagaacactgaagtgagcttctgaaacaaatttgtattcaaggtcgacgaatcttttcttccctaccgtccccctaccagtcaaccttccctcgtgtcgaggtacaggtattccgattgtctttccatcttttaggtaatcaatacaacactcgaccacctcttctgtattgtacccctcaaccattgatccctccggatgggcgcgattccatacatagcccttcaatacagccatgtaacgctcataggaccacatttgatgtagatacaacgggccgagggcaacaatttggggcacgatgtgaaccatgaggtgctccatcatattaaagaatgatggagggaaatacatttcaagttggcattggatctcatgtgggaatgtacgaagaagtgctaactcttcaggatcgatgactttctgggagatagcattgaaaaagtagcacatctttgtgatagcaatctttaaatgttcccgttgaatggcccgaatagcaactgcgagaaacacggtgagcaagacatgacagtcgtgtgaattataaccagataccgacaaatctttcattgacactagtcgtctgatgtttgatgagaaacctatgggcactttcacatcacagagagatttgaaaaatgccttcttctcatctggagttagtgtgaaataggctggaggaagataaactttgccagtcttttctccttcttgcgggtgtagctcctccctaattcccatttcgactaggtcggaccgtgattgcaaaccatccttagtttagttttgtgtggtatgtccaacaatgtaccaattacgttgtcgaatatattcttctcttgatgcataacatctttggcatgacgaatctccagatctttccagtacggcaggtacttaaagaatatagaatgcttcttgaatggggaagggggcttgcgatcttctttcttctgctttgccccctttgatgttttcttacgctttgtcccctttgattttttcttagtcccttttccaaacacgcattctattttctctgttgcctcacatactttatccccgggtgtaactttcggtgcagaatcattctcttcagtaccatcaaactctgctttcatcttgcgaaacttatgacccttgggtagaaactgccggtgcctcaagtaaacaagcttgttggaacctgggaggtacctatagtacgttccattcaagcatattcacacatccagttttacctttgatctgccttgaaactgaaaacatggcggggtaatcataaatggtaacgaaaatgatggccttcactgtgaagtgttgtcgtaagtactcatcccacactttcaacccctcatgccataaatctgccatatcttccaacagtggttcgagaaatacatcaatgtcaataccaggctgtcggggtccttgtatcaggatacatagaagtatatactttctcttctggccaagccaagttggaagattgtacatggtaagaagaactggccaagtactatgggaactgctcatgtctccaaaaggattaagtccatcagtacttagtgcaaatctaatattacgtgggtctttagcaaattctttgtactttgcatcgaaatttaaccactgatgagcatccgctgggtgtcggagcatcccgtccttcttgcgcccttcttgatgccatcgcattagttccgcatctcgagggtttgagtacaaccgcttgatgcggtctttcacaggaaggtaccacatcacaagctgcgggatttttctcttagtctctccgattgtgtcatcctcttctaggcaggtattgctgtttgatttgtaccggctagcaccgcaagttgggcatttaaccaacgaggcgtactcttttctgtacagtatgcagtggtttacacatgcatgaatcttctccacaccaagggataagggacatatgatttcttcgcttgatatgtgttcgatggcaacaagttaggcctcggaagcatgatctacaaaagttgtagaagactgtcgaagctactatcagaccatccaaatctcgccttcaacctcataagttcaagaactgaccgtaaaattgagaagtcactgtgacagccctttgactcatcatatagaatatcctttgttgtcttcttcaaagcttcgaaattatctaaacctctagccgacccaacaagcaactcaggttctacatggcataacaattcctccagatcaatattgtcttcagcacaaccatccgtgcaatccatgtcttcaacaaccggttcatattcttcttcaacgagtctaacttcatcattttcgccatgatgtgtccatataacgtaattctccataaatccacgagtgactaagtgctcatttaccttcgtcagattttcccacactttttcattcttacatttagcacatggacaataaatacccctcctattctccttctcaacgtactccttggcaatatcaataaatttagacacttgttccatatatggcgataaaaacatcggccaatgatacatccattcgagcctgtccatgtctctgcaaaatttatttaatcaaaaaaattaacaaatatatttgtaacaaatatctctgcaaaatttatattaataaaaaaatttaacaaacatgtaacacttttgaagttaacatattatatttaaccaactagaggatgggacgaccacatgatatcaaagattacacataaatccaacaagatcataatatacgaaattaaacataataattagtttcttcatgtcatgaagttttctctct

SEQ ID NO: 19147 - DNA, 1325 bp, Oryza sativa
gagaaaatataaatgacgcatataagttttgtttaattttaaatcacacatataataaatgacgaaccaaataatgtgtattaaaacaatattgcattattacaatttccttaagaatatatattaatgaatgttaatttgttgtttgccacaagtgactggctgtttatgatttcccatgaatttacaggaacaattaataaccaccttaatttttgacagaagttaataatatgtcaggcatgtaccatgtaagaatcaaatcacgcaaaaaaacaccttcaaaccaaaaatttgagatgtcttttgaagttattctgatgttcatgttgctaatgtataattttggaccaagagttgaggaaccgcaaaatcagattttcccagggtatcttacttgaatgatgaactgcttcttcttttcactgataataacttcgtaaaacttagagaaaaaaaaacactgatagaattagctctatgcataatgcatggctgtctctagatgcattatcaatccttttaaataagcacctcaaaagaaatgatggataattagctccaaaaaaacaaaaatgtttactctcccatatacaaaccgtcatctttcgtgcacatttggactggactatttttttttcgcggcaaatccatatcactgccggttggtggactaaacctggaatgacaaacctccagggatatttttgtgtcaactccaactccatcactgcgccacatgcagcctgccgtttcgaaaactggcagggatctcttgttgtgtaccagtgaaaataaaggggaaaaaaatgttggatggctaatgcaagtgggggcaaaagaattagacatctgaccttgtttggttgtgacattattccatacttcttctaaatgctatagccagggaatgcaaacgagaaaatcgatgaagctctgagttggcctcatgaactagagtgctaccactacgctataaatacagctagccatacaccatctctgatcatcgacaccaagcaaagaatcaaacaattcctagttccactttgccagtcctaccaaagcacattttagccatggctagtccatttttcaaagttattccagtacggcctgtgctccgcgatcagtgtgagattaccatgagattgtacttgcaccaagttgttacagggccaaaccacaaccaagaaacaatggtgccctcatcacatcccgcttcgtttggtatgattgttatcaacgattggcctatctatgatggacctgacttcaacacaagtactattgttgcacatgcaagaggaatgcatgtccaggtt

SEQ ID NO: 19148 - DNA, 2005 bp, Oryza sativa
  unsure (1)..(2005): unsure at all n locations
gtgtctcacactctgccctcattgtgaagaagaccatccaccagggaagtgtcccacccgcaaggtcacatgttttctgtgcgaaggtacaaaccatgtgtccaaggattgccaactcagtgtgttgttgaccaagaccgcagaaatccaacgaacaaccctacgattgtctcatcagctagtcagctccaacagcaacattgacgatatcatccacagcaccaatgctcttcctgctccacctgactctgcaataaatcatagcaataataccttcagcaccaaccattctctgcaccgacagcctcaacaaagaattgtcgtcgatggaagaagttgtgtctctccccgacctactccaggccgagcaacgggcaatcaacctcaggagggcgataccaagcagaagaccgtcatccgcttcaaccagcaatcagaagtaagtttctcccgtgaatgatagcaatatgcagtcctatcacatcatcaaagacccaatcaaggatgatgcagtcactagaacaatgccagctatatctctccagaatcaaaatgagcagtcacgtttgtggttttcagttcgctacttatcattgtgtaattgaaagtttgcagcaatcatgtaataaataaatatattcatgtccataaacagtgagtttgctatgtttatggatgattcatgttgaggatacaatgtaccgatgttaagcaccttccctttttatttaaggcagtgccttctattcatgtaataagggagaaatgtgtaatacatacaagttctatgaggattcttttggaagatgcggatatgtgatcatgtgtataattgtttactgataaagaagacctagggtctcatttcagaggaatcatattctaacctcgagttaataaccaacctattgatggaaaagaaaaccaattaaactgtgttggattaaaaagccaaaagggacttttgtttggactaagagtttcagatgtgtcttcttcggatcaaaggcaacaaccgttagtccaatttttgacaaaccacttcaggtttcaccgaaaggcagcaggccaaaggacctcgtcatccctagaagcgtccgcaacccacattaaagagtaccacctgttagagataggccgaaagatgattgataaaagagattggcaaagaggttctctagcaggaaagaagtaggccgaaaggtgattgataaaggataaacagaaacatgctctgcattgctcaaggaagacccctgatagtaattgccccgcaacagtcaccttgtcattgaggtaaaaaaaaatcatgagtaagcaagatgacctangtaaaagtgtttccatgataggcaaggagtgaaatcttcaactcggtatcagatgctatacggagtgaaaagtgcaggcaccggttaccaggcaatgttatgtcttgggagatgattcaatgggaaggaactcatcaaggtcgaaggtgtaaaggaatacatggaatgctaaatgatgacaagcatgatattcttatgatgacaagcatggtattctagtaatgacaaagctgatatcgacgcataatgtgaagtgggtaacttgtatgaggttgacgccaaagatatgaattatgagaatttttcgaactgaaaccccatcttcaagtgccgcaacccagtcaaagtcagctagaggtgcaaccagggacaagtcaggtgaagtgaagattccatctgccaatgggagctcatgccaagtagttcagcgcggagaagtccggttagaaatgtccgttcaagaagaggttgcagaagaagctgaactaagaagagaagacagcccaacctatcttcttgctagcctcctcgaatctcgaggacgagattcctgtaaggggggtggatttgtcacgttctgataaattcatcccgaaataaaaatcattccctaaaaggaataatagaattaattaaaattcgaaaagaaattgccaaacactaaaatacctaca

SEQ ID NO: 19149 - DNA, 3959 bp, Oryza sativa
cctgcagccctctcgtcgttcccggtcgtcgtggcgttcgtccctccgtcaagccgttctcgtccgtcgtccgcgtccgtcaagtgtgccgctgcagccccgtcgtcgtcttcgtcctcgtctccgcgtcgtcaagccttgtgccggccgcgtctcgccttcgtccaacgatcaccgccgaagtcgtcccctcgccgttcatctccgtcgttcctggccgcctccgccgcgcccgttcgtcgttgttgttcccacgcctcatcgcgtggtggtaaggatctctcctctcgctgccccgtcctcgtcctttcggtgtcgccccgtacccgttgtgcggttgtcgaccccggtacccgtgtaccggtgtcggtagtcgttcacgtgtgcgggtggtgaccgtgtagtgtccgtgttagtgtgcccgctcggtagccgcgttgtttccacgtgtgcagcccgcgtggtgtctagtggagtccgtttgtcggccactcgcctcggttgacacacggggtccgcttccgtcaacccgtggaccgtctctgtgtactcggtctactgcggtcctttaggttgacatgtggggtccgcatgtcaacggcgcagccttcctgtcttttctaggctagcgcttacacatgttttatagttgcaaaacctaattataataatccgcaaatctccatataacagcattaaacttcggatgaccatgtcttggtcatacgaactctgaatcgacccgttcaagtctcctaatgtttgttataacctaaagaaccctgtgctttctttttatgtattgttatttcttctttataggcttgtagctttgcttgtgtgcttcgcgtagcttctgtcgttccggaggttctcgaggcgtgggtcgcggtcgtcgccgaaggttcggaaggccgttgtctgcgagcaaggcaagtcacatcatccttgagcatattgaatcccagtttataaaattattttgatttaaattaatgcattgttgctttatttaaattctcgcgttatcactgttttatttagccatgcctatttacctttattatgaccttattattattgctattgttattattaccttgttcaccctaggataaacaaacccccaactagtgggtactctattcatggttccactagtatgaatttaggtagatgcttcgctgattaattaggcaacattaggtggttttataactttagactttgggaattctcatatcacttggacactatggaattgttggcttatggtggaattggacatacacctctcttcctctttcaaaaccccgaaaacctattttccggtggggtttgggtgcatgccagttgtgggaagtagcaccccggccaatataaggattaagctcgggcctctgttgcgaagcactaccgtacttccacatgtctagtgggtaaggcttagtttgtggctcagtctggttataaacaaaggtacacggatggagatggacgaagtcggggctcgatggacatctctaggacaaatgatggctacacgagctgcggcctggtagtcgagatgtcatggcacagggctggtgttctgttgctaggggctcaatcctgcctgcctatcccagaggttccggctgtaggtggagttgggtcggtactcttgtttatgtctaggatgggttgggaactatgtcatgtatttcgtccgtatgccatggtggtatgtggcacgtggttacacgtgaggaagatgtgtcttgtgggtaaagatgtacacctctgatcagagtaaatctattcgaatagccgcgcccccggttatgggcaagcctagcaatgtacccaagttagtggtttacttcttaaaatttgcttaacaactaaaatgtggaatggttggcctgggttggcttgggacgagctgggacccagggtcgggttgccagttcggtctgaatcatcgtaggccttgggttaaggcaggttcgtgtgggtttacggccttgtttaataatattgtgtagctctaggatcgtgtttacaaagtagctttgagcaactaagtgtcttttaaatgctgtttactgcaaaatttaacccctatattattaccccttgtacccccttgcattaatcatgcatctgccggtgtggcttgctgagtactatggttgtactcattcttgctctatcttcccccccttgagtaagagaagctttggagaagaagtcttaggtggagtcctgacttataccccagttgagcgcctgtgaagatggagccataggcccgctagtctgttgctgtttatttttgtctgtcaagcctgaagtgcctttgtaataatgtaaatattatcgatataataaagatgtgccttttgtatcatgtttgtatggtgtaccccggcttttcctgggacggggattaatacactagcgttcgggaaaatgcaaattttctcgctcgcgacacaatgcgaacatctattgtgactagacacttactatagcttcgtagactagttgatcttgtggatttggcatgcatattgtcccatcatcattcttacgataccaggccctggcccagttccttttccgagggtgtgggatatcgccaaacacccgcggcgtgttcgattcctctgcctcttcatcctcctgcctccattcctcatccttgccggcatatccggcggtgccaagtcggtgcgggtgctggttcaacgtttggagtaaccgatatgcctcgcttctagctctggactcgggggtcgacttcttcgcgtggaatgactcccagacctgatccgtgatccaaggaaatttcactgttggatcgggattcatcgggttgaagacgaactcatcgaccttaaccttaaaagcagcctgcttgataaggtcctcgtgctctgcaggataatcgaagctctccttgaactttagccaagcacttttcttctctgctatcggcacttgcttgatgtcatcttgcagaatactgaatttctccctccctatgaccccgcagatagacctaaatcggctcaatactttccggggacctgtcggcaagcctacttggttcacctctgttatgcagtaccgttccttagggattttgttccctgtcctaggagtaggtgcccttaaggacccaccagttgtcgtcgatattgatttgccttgctgagacgtcgtttaattttttacaaaataacgaaaatacacaattaagtgcttaaatggctaattatccaaagttctaaaatcacttagtcacataaataaactaaattgcacatctcacagtaataaaatgaattgaatatcacatataaataaattaaacatttcatcaagtcctaaaatcatacattcacctcatatcatctatttatccacatatcatctatcactaaaatcattcatgcaccacatttcatttattcatccacatgtcatcgatcacaaaaatcattcatgcaccacatttcatcaatcactaaaatcatctatcactaaaatcattcatgtaccacatttcatctattcatccacatctcatcaatcacaaaaatcattcatgcaccacatttcatcaatcacacaaataatgacaggaaccacagttcatccattcaccacagggagcagagggcgatgcgatggaggactaacttgagcacggctggtgggggtcggtggtgagctcggtggcagcggcgctgggatcggtggagggcgtcgccggtcggtggaggggccgggctcggcttgaggcgtcggcggtcctcaaggaggtcggaggaggccaagaggcgggcggcgtcggcgtcggagaggagggggcgacgacgacgaggaaggacgtcgccggtcggtggatgggccgggctcggcttggggcggcgtcgtgcatcggtgaggaggtggcggcagcctgaatg

SEQ ID NO: 19150 - DNA, 2585 bp, Oryza sativa
tccttcctcccgcacctttttttttttccttccgcacttttttcgtgattggcccattagtaacaagattactgtggctttccgcctaagagtaaataagttacgaccacttccgtacttccaaattgatttagtaacaagattactgtgtctttcagcctaagagtaaatgagttactaacacttccacacttccaaattgatttcttctcttagtaaatgaattactcctaggttattttctgccctttccaatttggttcctcctttcagtaaataaattactctcttagtaaatgaattactcctaggttattttctgccctttccaatttggttcctcctttcagtaaataaattactctcagatcgttatcagctcttctcttagtaaataaattacttaggatattagtactcccaattggtttgcaaatcttctcttagtaaaataagttactcctgatactggagtaaatatattgcagattgcacaaggccgctggagtatttagtgacaaaacaaatgaaggtaaaaaattatgattcatattatcaacctaaccacaatttaataatttctttacaaacatcaattgtttgatccagtgtcggtgttacatcaacaatctgataatgcactcaatgatacattggcagaaaaacacaaaactaataaacaaaatcaaatcaacaccacccgctaatacatatgtcgataccgatcgatgccagcactaatatagcaatgtagatcagggccgacgacgctgattattaactgcaaaaggcagtaaatcctgagttcagctcacaagtagtaaatttctgatttcatctccatccccactagccagctgaagcctcatcccatcttgctggccttgccatggcaggcaaaagcaccacaagagaaagctccacccaatgaactgtacaaaatcaagagcagtatcaaaaagaattcgatggatcgacagattctacacaattgtagaacaaaatcaagaccctgatcaacatgaccatatgcagtgagcgcttcagaaaaatgaatccatatgctctgttgaaccacaaaattgcagaaaattcaatggattgacaggttgtatgcatttttacaagaaaatcaagaacctaatcaacgggaccatatgcattgagcagttgaggaaaacatgtatcgatctgctttgttgaaccacaaagataattgcttgagaaaaataaaaggagctaaaaaaatgcatagctcagctgcaacccaacgaaccttgcagctagcagacccatcatgctatccacagcttcctctgcccatgtgtgatctatgctgtcgtcgaggcgtggccatccacctggacaacatccttctgcctcgctggggttgcagcctcccccatgatcgtcagctgaggtgcagaaaactccacaaattcagagcattcctgaagtctatagatgaaaaatcaagtagaccaaaattgagaaatctgttcatcaacaaaaaaaaatcagaacatgaactacatctacagcagaaaaaagctcataggggactacaactggtttgttcaaccaaaatattcagcgaaaaactatgatcgaaaggatcatatgtagagagcagttcagagaaaatcaattgatatgctctgttgaaccacaaaatttcagtgaactgctattgaatcaagcttctagagttttcatttataaaaaatatcagagaacctgatgatgatgctattggcagttttccaaattttgcacacacaaatatatcactgaacaaatgaaattcagatgggagcacttttctgaatatattgcacaaacaattcatggttgaacaaatgaaaattaaaatgagagcatatggttcttcatgcgttgcaaaaaaaaaaaaaaaaaaacctggctatcaggactattcactcatgatgcttgatccagcaaaagcagccatcaccaaaaaataaataaattagaaaagcttgttaacctatcaattacagaaacctgtagatgcatagaagcctgaaaatttcagaatatcaatggatgttagtgttacacaaaccaaatccagatcacatagaactaacgaaccagccagaagtttggtaggattatagatggaagtctcatgaattctctgagagctaaatgcttccctgaagtgtttcaacagaaattaagatgctctccaagcttaggcagtcacaatagagaactgaaggaagaattcccgtggggacgagtcgagcggctgcggcgtacctggtcctcgaggtctatctgggtgggcttgcccttggcggccgggtcagagtagacgtccatcggcagacggcagcggccaagcagcgagctggtggaggacaaccacgatgacggcagcgcgcaggaagaagcgggaggaggaagaggaggagaggactgcaaggtggcctgccgcccgtgctctcctcccaccgccgccggtggatccgtgcgaggtcaggcgagggacgcccgccgccactggatccggacagaggacgaccgtcgtcaccgggttcgagcgggggacagccccg

SEQ ID NO: 19151 - DNA, 607 bp, Oryza sativa
tggaagtggaaacaataacaatgaagataacccaactcttgctcaagttctggctcaacagactcagttaatgaacatgatgatacagcagatgcagaaccagcttaaccaagggaacaacaatgctccaccgccgcagaacaagttagctgattttcttcgtgtgaggccacctaccttttctagcactaccaacccagtggaagcaggtgattggttgcacgctattgggaagaagttggaactgctccagtgcacggatcaggagaaagttgttttcgcttcacatcagttgcaaggacctgcatcagaatggtgggatcatttccgaatgaacagagcagaaggacaaccaatcacttgggcggacttcacggaagcattcaagaagacacacatacctacaggagttgtctctttgaagaagcgtgagttcagggcattgaagcaaaaggatcaaaccgtggcagagtatcttcatgagttcaatcgtctggcacgttatgctccagaagatgtgcgtactgacgaggaaaggcaggagaagttcttggaaggcttaaaggatgaactgtcagttacgttgatctctcatgactatgctgat

SEQ ID NO: 19152 - DNA, 4001 bp, Oryza sativa
aggaggcacaaggtagtagtcagagacagcgtatcaagccactccaaattggtgaacctttttctgctggtcaaggacagtcgcaacagttgaatatcggtggtgagatcaaaacagagactaatgaaagcaatgaagttaatatcgagcaagctaatcagccggtgccaattcagcaggatcagtctcaagagaataacagtagtggaagggagcagcaggtatgtttcaactgttacaagccaggccactttgcaagagagtgtccgaagccgaagcatcagcagccgcaaggtcaggtcaacaatattgtcgtcacaggagccaatgcagtgccagttgcgtcttcaagagttgcgtcttcaagtgttacaactcagccaccagtttcaaagaagcagtagttttctttaaagccttagaataattatcggagttatggaataagatagactgcagtttacctattccctttttctttctagccgttccgattctcgggacgagattctttgtaaggggggtagtttgtcacatcctgatttttgtttcaggatttataaattatttaataaattaataatataatttatattaagtgttctttaatttacaagtgaagttaaatgtgggaaataaaatttcctaaatataaagcatggatggatttaatttttattaaattctccatggttaattcaactctctgaaattttctcggatttttcagagctcaattcctaaatgatacaaagaacagttcagtaattatttgatcattaatgatctaattataattgttaagagcttttcttgtttaaaaatccttaaattataaattgttgtttaaaaggaattattagaaatgattttaaaagcctagaagagaagatctaattttaatttgctaaatctcaacataaaattgggctagataaaattttgttaaatactttgcttaattctataattcctagatttttctgggatttatttgagctaaggaagtatttttaataaatggaattgcatttcatgaataatttaaattgaaaaaggtttttaaaagtcttcttttggctttgggccgaaagccggcccaaaacctctctctttccttttcttcctccccggccagtcggcccaagtcggcccagtccgccgagccgccgctctcctctctctctcagccgctgacaggtgggtcccacttgtctgggtcgtcgtcctcctcgcgccgccgccgccgcccgaaaccctagcgcaagccgccgccgtctccttccaaattcggccgatcctttccttctccggtgaaatcttttgaggggaaataatcttctcgatctcctcttccttttctcttatagaaactccggtcaattttctttggaaaccggtggattcgagtttgattcggattcgtttttccccaacctttccttctcgtcgccggcagccgtgggccttcgccgccgcctcctagcccctttaaaaggacccccgagctctcctctacccgccgccaccctcgccttcgcctctcgtcgccggaagagccctagcgtcgtgcacccttgcgccgccgtcgctccagccgtgagccgccgtcgctctagccgtcgccgtcgctcgggaagaccgccgttgtgctcgccaagtcgtcgccgtcctcgtccgccgcttcgccaccgccgaagaccgccggagcatcgccgtcgccgtcgacccgaaggttgccgccgcttcctcctcgtcgccgtcgtcgtccgttgttcttccgccgccgttttggtcaccgatgagttcgccgtgtcgtccgcttcatcccggtgctttccgtttgtgccgtagagccgccgttcgccggcgagcgtgcgccgtccgagccgtccgagccgccgagccgccgctgccggaggtgacgtcatcgctgacgtcatcggagtcgtccgccgtgagccggtcgtggaccgtttgatctcagccgtccgttttggatagggttgatctcggccattcgttcccgtgaaccgttgccgtgcacccggtccaccgcaaaccctagccgctgacgcaataatctttcttttccttttcaaaaataattcattattgcgtcataattcaattaaaatccatataagtgttttaatccgatttaatctttaaaaattcataactaattcatttgaacttagtttaatgtggttcaagttgcaaaagttgtgtaaaataaagatctacatattaaaattgtccataaattgaattaaatttatttaattctttttaaatgggctttaaatagatttaatcttgtaaaattcatttgaagtcagaatgaggccgttcaagactcataattcatctaaaattatgatctacatgtttgtttactttttatgtattgtttatttggtttttattagtctttttcttcgttttgtgtgttagcttgtcgtttccgtcgttgcgaaggttcgcgagtgcgccggaagtattcaagaagattaattgaataccgattattgcaaggcaagtcacacagatcctaaacacaatcctttgagcatgttgatcctatatttaaattctctatttatttcaactgtgcatttattttcgaatgtcattgggtggaattaacctattctttgttatggcccttttgatcttgattactttattccttgataccttgggttattataatttgactagttgagctttatatattggttcagctagatattagatgtgattgcttagccatgcttagaaacattagcacactattgggataacttatgattcattattatttaatgatggtttaatgatagttcacgatggttaatcgtgattggttaattaattacttgccaactaaaacttgataatggtgggttgtgagcacatggttttgagagtcgtgctcatgacaattaaggaccggttcgcgagctactattgtgaaacattaaccgtgccaaccacaagccagcgtgggcaacggctttaccttttgtataacatgattcattgcggagcaccagactgagaagtggcggagataagcccacgggggtcgctggggagtccatgccttgttttataagggggtgattatgatccaggaatggtgcactgtggtgagttgtgttatgcaaagggtattgtcacagcctctattcgggtactttccagtatcgcgacgcatggtagacatgatgttgaggctgtgtcttgtgggtacagtggtacacctctggccagagtaaaactattcgaatagccgtgcccgcggttatgggcgagttgagcaatgtttttcgtgattagtctcacacctctcataataattatagatgttatacctggtaataattagcttagctcctggtttggagattagatctgttcagccgggtatggttgttcagaatggttgggcctgggcagcacgggtgtgctgttcagtgttgattaaaatttctgattaattactccaatgttttacttctcttaaatgttttgctaaatgctgcttttacaaatgagccaatattatgccatcctttggtatccttgtgcacttgcatatttgctgtgtggcttgctgagtatgtcatatgctcaccttgcaataatcaatcaacctcagttgaagaaaaaggatccagaaggagaagacgtttggcttataccccagttgagctgcctgtgggagtggagccggagcttcgctagattttattttccgctgcagttttcttcatgatgaggactaagtgcctcataagtaagtatttatcgttttagttaatttgatgaatctgtatattaaattgtcagtttgtgtacctcggctgattcctggacgaggattttatgcacaaataagttcggaaattactagtgaatttccgggcgtgacagacatgatcgaagatatcatggatgacttctcagtttatggaaagaatttcggtcattgt

SEQ ID NO: 19153 - DNA, 627 bp, Oryza sativa
aaaagggagtagaaaattccgtagcagatcatttgtccaagctgcaaatcactaacatgtaggaacagccgatcaatgatttcttaagagatgacatgctgatgacggttcgcgattccaacctgtggtatgccaacatagtaaactacatggtatccaagtacgtaccaccaggggaaatcaatgaaaactgaagtatgaaagccgccgtcacatatgggatgagccatacctgtatcgggtctgctccgatggcttactacgaagatgtgtgccaactgaagaaggacttaagatcatagaacgatgccatgcctcaccctatggtggccattacggtgcattccgcacccaggccaagatttggcaaagtggcttcttctggaccaacgatgtacaaagacttaaaagaattcgtcagaagatgcacaagctgccaaaggcaaggaggaatcactgctcgccatgcaatgcccctcacatacaatttgtaagtcgagatattcgatgtttagggtatagacttcatgggacctttccctaagtctcgcaactgcgagtacattctggtggcagtcgactatgtctccaagtgggtagaggctatgtcgtgcagcgctgcggatg

SEQ ID NO: 19154 - DNA, 779 bp, Oryza sativa
ccggaagttgaacactggtcttataaaatgctactccttgtaagtgcataccttctatacttgtgatatgattggactatatctcctaattaaattagttctaatacataaatgttttatggttgtgttggatcgagagtcgtcgccttggtaatcaggttgggttccttgatccatccatggtgaacgaggttaatttacgacagagcttcactgaggtggttgactatgtcaaccggtgtttatgggcccatcaagacaaggaatacatcatatgcgcacacaaccaagagtaagaggacaatacccttcgtgtatattgtttttgaagttaaggttcttagtactaacgctacataaccactgcgcaggcgacattggattctcctagtcatcgtacctaagtggagtagggttacctaccttaactccaataagtccaaagattatgatttcagtgaaatcaccaaggccttaaatatggcttggggcccatatgtggaaaagggtggtagcacaaggagggcaaggacgaactttatcatgacaccaagtttacatgcgcacaacagatcggagaccaatgtggtttccatgtgtgccacaacatgtcaacacttctaagagaggtgaaagatttcgaccctgaggttgttgctaatggcgaataaactcatttcaatacctacattgctattaaaacgttctaattaccctcttatttattaaacagaaaggtagagctggcttcagatctcacccatcaaccccccgctatc

SEQ ID NO: 19155 - DNA, 733 bp, Oryza sativa
aaccaaatgccaatcaataaaaagatgttgtatcgtttcattagaattatagaagcaacacttagtgctacctttccaccttctttttgcaagattatcttttgttagagtaacctcaatggaattctaagctcccaaaggaaatatttccttggaattactccgttaaacatgagagttctgtacatggagttgatggtaaatgtttcctttttattggctttccacacaaagacatcattttgttccgtaagttgagttgatataacttttgagaccaagttataccacgctgctaggttatcccctacaatagctcttctgaaagagacgtttaggggcaccttttccaacacttcggccaccattacattttttttcctaacttgattatacaacgaaggatacatcttatcaaaagaggaatcaccactccaacaatcctcccaaattctcaattgtgtgccattacctacttgaaaagcgccacaagaaagaaaagagttttattaacctccatcagccctgcccaaaaatgagaatcccctggttgttttcctacaagtgtaattgttttcttagccaagtatgttttttctaagtagcttttgccaaaccccatcctcattgataagcttatacaaccatttactcagcaaacgtttgttctgcacatttagattatgtattccaagacccccacaatccttaggtgtacaaatcacagggctgc

SEQ ID NO: 19156 - DNA, 605 bp, Oryza sativa
ttccagttccaaacatgtacgaagaaatactggtaagtaggggtgaaaacggtacggaaatttccgagaattccggcaaccgtttccggtttgcaccgaccgtttcaatcggtatcggtaattgcggtatcggaaatggaaacggtaatctctttcggaaatggtagcggaaatgatatggggttttttccgaccgttttgtcggtaactgttttttatcggtaatttccgtcaaatttccgacaaaattccgaagaaggaagtcggctaggcctggctagcaggaggaggagcccattaggcattaaggagcagcccattccgaataaagaagccaactaggcctgaccgcatcgtcgtcttcatcggcgctggggcaccgccgcgccatgttgggcgccgccaccaggtcgccgacgccggccgcaacctccttcgccccgacggcctccgtcgcagccggccaccttccctcccccatgctccaccgccggcttccgtgccaccgagccaagcgccgagcgccgccgcaccgccccagcctccttctccccaccgatgccgcccctttctcctctctccttcccccaccgccgccctgcgcc

SEQ ID NO: 19157 - DNA, 2256 bp, Oryza sativa
atcggccgccgggcagccccgtgacggggaagggtgaatccgctagggtttcaggttttgggtttcaagttttagttttttttttcatgatttttcttttagcagtgcagtgacataatttaccgcttgtgaaaagtggaatttcatggacgggtgtgccatctgcttgtaaaaatagctacttttactgacacctccgagcaggcagacggcccaattgcatgcgaaaatttgttttgacggtatgggaacatgcatttttgtagttttgaattaccttatatttaatcaatatacatattcaagttggcatgaatacattttcatattctgaattgtccgggctgatcaatttgtgatagcgaacagaatatgtatttagttcacatgtacatagtatcttcctctacatgggcatattccatgtactatctgatctaaatatttaatgcatatacagccattattgatgggtggaaataaaaccaaattagcacatcgatgtccagatatgcaattcaattggtttgccagatccaagtcctcgtgaaacaaattatatacttaaagaacaaaagtttgcgtatggccaatcatctcctgccatttaatcttgcattctgcaagtatatatgctatttgtacgtactcatgctcccaaacaatctttcttcaagtttgagcttgaatagttgttaagggaaaggctttcatgagttagtagcggaagtttggagaaaagagaacaagggttctatgatgatggaaagatagcaaaataagatccatagattaagacagttcttgagaggttgggcaaaaagcacaagtgaaacatatagaaaagagaaggctgaactaagtgcaaaagcaaatcagttagattaaaaagccgaggtgcaaatattgactaggcaggagttagatctcaagaactacttgaaaaatagactagctcatctgttaagggaggaggaaattagatggcaccaaagataaaaaacaaaacatttaattgaaggggaccggaatacaaaatactatcatatgattgcaaatggcaagcataggaagactaaaatttttcagttagaacaagaggagggtttaattaaaggtgatgaagatttaaaaaagtacattactaaatactacgagaatctttttggaccaccggaggaaaataatttttccatggtggaatcacagaaagaggacattgcacaggtatcagatttagagaatgaaatgctaattaaaatatttaccgaagaggaagtaaaacaagctattatccaaatggaacaaaataaagccccgggacctaatggtttccctgtagagttttatcaagtgttctgggaggtaattaaagaagatctcatggctatttttacagaatttcatgaaggaatattgccgctccacagcttgaattttgttatcatcactttgttaccaaaacagaaggaacctcgacaaattaagcaatacatacctatatgtctgttgaatgttagcttcaaaatctttccaaaggtaatgactaatcgaatagctctagtagctcagaaagtcattagatcttcacagacggccttccttccagggaggaatataatgtaaggggtggtaattttacatgaaacaatccatgagatgcatagaaaaaagaggagtggagttattctaaaattggactttgagaaagcatatgataaagtagattggacttttttacaacaaaccttgaggatgaaaggattttcgcaaacttggtgtaactggatttaacaaattgttagaggaggaagtgttgctgttaaggtcaatgatcacattgggaactttttccaaacaaaaaaaggcttgagacaaggagatctcctatcactaattctatttaatttagtggcagatatgctatctatcttaatacaaagggctaaggatcagaggagatttcagggagtcatacctcatctagttgacaacggcttctcaattttgcaatatggtgatgacacaattctcttgatggaacatgatcttgatgaagcaaaaaatctcaaacttgtacttagtacatttgagaaacttgcgggtttaaagatcaattttcataaaagtgaattgtttttttatggcaaggcaaaagatgtagagaatgagtatgtcatgctttttgggtgtagatctgggacttacccatttagatacctaggaattcctatgcaccacaagggctgcaggaat

SEQ ID NO: 19158 - DNA, 982 bp, Oryza sativa
attcctgcagcccgactggaggagtcgtcgacgaggacgaacggagacgacgataacgaacaccggcggggttcggatggaggggaggcgaggccgagggcaaccttgatgctgcgatgccagaggaggagatggcgacgtcggccggcgcacgggcacggcggaaggggttgcgaaggaattccggcgaggcggagggcgagaccggcgcgggcgatggcgttccggcgaaaccgagggcaggccggggtggaggtcgacgcggcgacgccgagggaggagacggcgcggccggcccgcacctgagcggcgcggcaggggcggctggaggcagtgggtggcggcaatgccaccggttgccggcggggacgcgcctccggtggtttccccgcgaaacggagggctaaccgggggagaggaggctgctacgaggccgagggtggcgacggcgcagccggacggcgcacaggcgaggcgggaggtgcggctggaggtcggccggtgccggagagagagaaggagaaggcggggagaggcggggcggccacgggagagcgcgggagggggctaaaactggagaacggaaggagggggttcctttttataggcgcggggagggagccggcaacgagagaggccggaacggaggcgggaatggcggccggtggccttggaaagcggcgggggttggcgcgtccgttcccggcaatcggggacacgattcaagggggaaaacgggggaaatcaaagaggaatcaatggggattaattccccctatttaatttggaaagagccggcttgaatggggtggatttggaggaggaacaacgctagggttcacgggagagagaggaaggaggccggcggctagaggtcggggatgcgcctgacaggcgggacccacgcgggaggcgcgcggtcaacgcgcggcaacggcgcgcacgcgcgcgcacgtgcgcggcacgggtgggaggcacggct

SEQ ID NO: 19159 - DNA, 2173 bp, Oryza sativa
tatggatttctagacaagcggacttccaacaaggcggagaaagatgcacgccttgaagccaagatccgggcgtcgatcagagtggagctgacctctgaattcgacgagaagctcgagtcgatgagggccaagattaggcaagagatccgagaagagcaacataacccgcaggccgccgctgctgctgcgcaagaagagttaggaagtcccaaccaaaagcgcagcagttgcgcatcaactgagttggcggaaaatccaacatcggtcgacagcgccatcaaccacataacggtaaaagtttcatccacaatgcatgaaaggcttaacgaatccatatgttatataatattctaaaaaaattgatgaatctatcgcaagaaccaacgagctgcaccctcacagttagggtgatgccgaccttcatggttccagcagccgagggacttgcgtacaagccgaccccagagacaagagtgcatggaccgcaacttagggccgactgtgcaaaagttcaagttgactcagtgaagcccgaatacgagctgttcctactgaagtatccgccgaacgacgaggtcctatcactaggaaatgcccgtggtaccttcatccaatggcccaaggacctcattgagataaggattacagcgagaccaaccactgcaccaagcggtcgtccgccaaggagacccacctttgctccttcagcccctatagctcaagatcgtcatgcacaatcttatgatgtgcagttgcagtatgacacggattttagggaggaccgtacagaggccgactgcaaggcgattcatgaacccctaccgatgaagaagagcaggaaggcacactcttccccttagagaattactctcgataaacccgatgcaaaggagagaggaagaggtggaaaggtgaaggcctcacttctggctccaaggaagctagatctgggcaaggggcatgaagagacttaggggaaagaggtcaagaagaaatatgtcgctccataggagttccaactaggcatgccattggttagagacgacgtgctagccacaatgggcaccacttgcaaggaccttcacgtatactacatggagaaatctaacgccaggaggtaaaatagagctaccgatatccttggagagcatgatggaaagccattccttggtccaacaaattatatcgtggtggactttaaggatctattcgacctctataggctccgagcggtggatacaagccttcttaagtgctactccttgtaagtattgtcacccaactcaatttggtaataacaatccgtttaactcgcttacaagatcgtttatcttgcgtgtaggttaagttggcagtggtgtcagaagaatgcaccagaagttgccttccttgatccacaagtggtcactttcacaaatctcgagaatgatcgtcaaggaatggtcaactacatctacgacaccttgtggtcccaccgagaaaaggagtacattatgtacgtctataatcaatagtaagtgtgttccctaaatatacacaacagcatgacacatatagctctagtatttaactttcactatattaatgccgcagtgcccattggatccttctggtcataacacctaagtggagtacatgccactacttgaactccagaattgataagcaggcatttgattggacccctattcaactagcgatagatgaagcgtggggccaatacgtgcaaagaggaggccttaggaagacaggacatgacaccctcatccaaaaaaaagacttctcgatgaagcaacaaataggtgaccagtgcggattctatgtgtgccacaacatgcgccttctgtacagagaaaaggtgaagaatttggctgaatttgaggtcgatgtcttaattgtgatatactaactacatcaaagtacatatatatgatcgatcaactaatctcaaattatgacaatgtagggcaaattgccaagtctctgcctaccagctttgaggaggttcgcgaagagatagccggcttcatcctctgcgaaataattaaccccaaaggaatgtttaggcttaaactaaaatgatgaacattgttgaacttttatatttaggcaatgatgaacattgattaagaccttgattatgtaactatgatatttatatttatgtatataa

SEQ ID NO: 19160 - DNA, 1887 bp, Oryza sativa
ccatgttagtatattgtcctaagttaatttcctgatatggatactattcattttttgttgaacgaccatgacagtttgtcataaagaactcggcaatcaggggtggtctctcaaaacaccagaagggcatagttagggggtattggctgcatgattgtatactatagagtgtaaattaaagatacataagtattaggatgaattctttttttattcttcctccatttagccgaggatttatttaatgagagtatcttagtttttcttcttcgtgtcgctctatccttgaattcattaacccctgcttagactctaacttatacaaataacataaattattagtatagtcttctcttatcaatttttccttgagattaaataaatatgataccttagaatatttccggatgaaatgctacaatagtatattcgtgcgcttacggataatatttgtaaccgtaatataccaggaatatttttgcaccactactgagaattatatttccagtaatgtcattaagaaataccaacaataatctactatgcttttggaaaattaggggtggagataaggatggggaaattagggcttgaggcttaagcttgggaccaaattcccattaaaatagggggctactatatactggtatcccgttgggatactgtcccaacggtatcgctcccagtccacctccctcagacacgagagcgtaggccaccatgggagcagcgcagacgaggctgacgccggtggcgcggacgcagccgccgccgccgagctctggcgtagaggacgcagctgccggcgacgagctccagcgtgaaggacgcggccgccggcaagctccggcgtggagcatggtcacatggacggcagataatcctgcgtggtgacagagacggcgccatcgacgagctccggcgtggggagtggacggcggaggatcctgcgtggtggtggcggcggcaccggcgacgagctccggtgtggaggacgcagacaccggctgaggcgtggacgatggacacggccgccggtgacgagctcccgacaaaggacgcggtcgttggcgacgagctccgatgtggaccgtggacgggagcggatgcagctgccggtgacgaggttcgggttcagtgtggagcgtcgacgggggaggacgcggccgccggcgacgatgcctcaacaccttgatgcccaacttctggtatctagtaggtatcatatgaatatgatacctcacaagtatcacccccgatacgtcgtagaaattacatgatacctgatagctatcacatgatacctcacgagtatcgcctgatacgtgataggaatcgtccgatatctgatacgtggtagaatcgcatgatacctggtaggtatcacccgataccagctagttattaggtgatacttataaggtatcatacgattcttaccacgtggaagatgatagttgcgaggtatcaagtgatacttgagtaggatcttgttaaacctgggaggtatgatgatcctccttagtatcatgtccggtttcaccaggtttcataggtgatactttgggaggatcatgtgacacctaggaggtatcataatcctcatctctatcatgtctagtatcatcaggttccacaaatgatatcctaagaggatccctcaaaagtatcattatgtgtgatatctgtgcagtaccgcatgacactacttaggtatcatgtatggtaacaagattctatgggtttcacaaatgatactttagtaagatcgtgtgatacttgcgtttctaccatatatcagatgatacttgcgaggtaccggatgatacctatcaggtatcatgcgattcttaccacgtggcgggtgatgcttgcgatgtatcaggt

SEQ ID NO: 19161 - DNA, 706 bp, Oryza sativa
ctgcagcccatacacatattagttcgagccaaccatctgaaataattcccagttcaatcacaccaccagaacaaactgaacatacaaatgaacatgtcactgagcaagataacagtgaagctcctcgaaggagtaagagacaaaggacagctaagtcttttggtgatgatttcactgtgtaccttgtggatgacactcctaagtcaatttcagaagcatatgcatctcctgatgcagactactggaaggaggctgtccgtagtgaaatggattctattatcgctaacgggacttgggaggtgacagagcgaccctatgggtgtaaacctgtgggatgcaagtgggtgttcaaaaagaagcttaggcctgacggtactattgaaatgtacaaggttcggcttgttgctaagggctatactcataaagaagacgaagatttctttgacacttactcacttgttgctagattgaccacaattcgtgtgctactttccctagcagcctcacatggtcttctcgttcatcaaatggacgttaagacagcttttcttaatggagagctggatgaggagatctatatggattagcctgatgggtttgtagttgaaggtcaagaaagcaaggtgtgcaaattgttgaagtctttttatggtctgaaacaagctcctaagcaatggcatgagaaatttgacaaaacattgacatc

SEQ ID NO: 19162 - DNA, 1204 bp, Oryza sativa
ttcctgcagccctttagaaatatttagagacttgaaccaactaaatccgagctaagatgaattagttatgaatttttaaagattaaatcgaattaaaacacttatatggattttaattgaattatgacgcaataatgaattatttttcaaaaagaaaaaggggtttgttgcgtcagcggctagggtttgcggtggaccgggcgcacggcagcggttcacgggaacgaacggccgagatcgatcctatccaaaacggacggccgagatcgaccggtccacggccggaccacgagggacgacgacgatgacgtcagcgacgacgtcaccaccggcggcggctcggcggctcgggcgcgcatgctcgccggcgaacgacggcgcgaggacgcgaacggaggacaccaaaacgatgcggacatcgcggcgaactcacccgtgaccaaagcgacggcggaggagcaacggacgacgtcggcaacgaggtcgaagcggcggagaagatcgggtcgacggcggcgacggtgctccggcggttgacagcgacggcggaggggcggacgaggacggcgacgcgacagcgaccacgatggcgatcttcccgaacgacgacgacgactggagcgacggcgacacacggctggagcggcggcgacgatggcggcgctaggtcacacggcgctagggcgctaccgacggcgagaggcgaaagcaagggtggcgacgggtagaggagacaccggggatccttttataggggcaaggaggcggcggcgaaggcccacggcgaccggcgacgcgaaggaaacctcggtgtcggtgacatgggaccgggagtatcatgacttagagacttgaggcagacacgatcacccacgtggcctaaccccctcgggggggttgggcccgagggtgatacggccgcccttctctttgtctccccgaggggtcggaccgctcccgtctcggccccgagggccgaggcgccctgaccccttgtgggttttgcgccgcgtatatggggtaggtgagcatagcggggctcacctaaccacatttattgcggtttggacgagcgcgtcacgccgcatgtaacgcagtgcagcgcgctcgtttatccggtcagtgaccagtcacagaccgatcagatcgtgggttaggtggcgacaggcggtctgacgcacgcctcgccccatcccgtcaggat

SEQ ID NO: 19163 - DNA, 1381 bp, Oryza sativa
taatgaattcccatgtcataatccttaattaattccaaccatctcctttgtctcatgttcagatccggctgagtaaagatatactttaaactcttgtgatcggtatacacctctgtacgagtaccgaaaagataatgacgccaaatcttcaacgcacgaactactgcagctaattcaagatcatgagtagggtagttcttctcatgcggacgtaactgacgagatgcataggcaaccaccttcccatcttgcatcagaacacaacctaacccaagtttggatgcatcgcaatacacttggaatcccttctttggatcaggtaagatcaaaataggagctgatattaagcgattcttcaactcttgaaaactctgctcacattcttctgaccacttgtacttcacatctttctgaagcagccgtgtcatgggcttagcaatcttggaaaaattctctataaacctccgataatatcctgcgaggcctaggaaactgcgaatctctgaaacggtctttggttgtttccagttggttacggattctacattactaggatcgacggcaactcctcctgctgagatgacgtgaccaaggaacttcacttcagacaaccaaaattcacacttgctaaacttagcatacagttgatgctctcgtagcttctccaatgcaaggcgaaggtgttcttcatgctcttctttggttcgggagtagataagaatatcatcaataaagactaccacgaacttgtctaggtattccataaacaccttattcatcaagttcatgaagaaagcaggggcattggtaagtccaaaagacataacagtacattcgaacaacccatacctagtggtaaaagctgtcttaggtatatcttcctctttgattctcaactgatgataccctgatcgaagatctatcttggagaaaacagtggcacctttaagctgatcaaacaaatcatcaattctgggtagcgggtacttattcttgatagtcacatcttttagtgcacgatagtccacacacatcctctgggtatgatctttcttttccacaaaaataaccagagctccccatggagattaactcggtctgatgtaccctttctgaagcaaatcgtccacttgcctcttgacttctgccaactcgttggctgccattcgataaggtctcttatggatcggagttgttcctggtaccaaatctattctgaactctatatcccttttaggcggcataccaggtaaatcatctgagaacacatcgggatactcccggactataggaatctcttccaaagttatttggttcagtattgaccttaaagactcagaagacaatgcatgaacagttacaactcgaccatcattgctgg

SEQ ID NO: 19164 - DNA, 1588 bp, Oryza sativa
ctgcagcccagaagcaactcgaaggcgaagacattgtcacccattagcaatggcggagacgttaaggccgatgaagtagaagtgctggtgatgatgtcagtgacaataatccgtcaatctgttgagaagatatcgaagctcgagcaatttccttgatgcgagcgtgtgcataacgaagattgatgcaatgccccttgatttataaagatggcagtagaacttggtgttatagctgttgtagatgcttcacttggaggaaagtagaggctgttgtacaattcattgaaactgagctgattggttgataactgtaaactcctggatatgtagattaaatctcgaactaccagctaaagtaaaatgtcggctctgaagcgaagacgaagataataactcccagagttgactcgttgattgattgattgcttcatcttgacataaaacttgtcgaattttgagtcttatatttgtatagcccccgactctttggtcagtcaagaaacaactgaacatagagtcgagaactgtagcttcttgtcgtcgagtagaattcttgaaaattggagaaccacttgtagtagtagattaacacgacgtcaaatttggtagtgcaagccgagatgtcgaggctcttgtagacgtcgtggttggtgaaataacgaagctcgtgaagtagaggcattatagtttgccggtgccaaagataataaagatgaagtcgctccaccatggtgacaaaattgcatagccgtgatgaagtaaacacgagtcggcggcaacagaagcaaaccggtagcgtagacgcgtagttgtgaagataaaaacaccagtcagcggcggcataaccagtcggcgacggaagaagtagaatgatgacaaaagcgaagacgtccttgaacggcggcaaaataggctagccatgaaagtgaagacaccataggcggcagtgaaggcaaaccggcgatgacgatgacgccagttaatgatgacgaagacgtgcaaccgtggaggtgaactagccagtcggcgtcaggcaaggcggccagaaataaagacgatgacgtccatcagtagtggtagtggtataaaccagctgtagaggcaagggcactagtcagcagtagacgagacgaccggcggtgaaaacgataaggccaatcaacactggcagaatcaggcagccgtggaagtgaagaaaccagtcagcagtagacatagacagtttgcgttgaagatgatgatgcctattagcgatggcggcgacgtagccagccgttaacacgatagcaccagttggcattatacgaggcggccggtcagtgaagatgtagacgttgaacaacggcggcataataggccaggcatgcaggcagagacaccagtcggtggcgacgaaggcaagccaatggtgaagtgatatatgcccaacaacggtggtatgaccaaccaaccgtgaaggcgagcacaccagtcggcggcggcgaaggcaaaccagtgttgaagacgtagacgcccaacaacagcgggacaataggccagccgtgcaggcggagacactagtcggcgacggcgaaggcaagctggtcgg

SEQ ID NO: 19165 - DNA, 8527 bp, Oryza sativa
ttataaatatatatttctcctgttgtcaattttgatttccccgagtagatgacttcttacgtttaaacacttagcccaactagtcatagcccccaagcaccgggagtcagcctaggcacttcccaaacatgcatatgagcgacatgagttcgtcattaatggaacaaagtttcacgaatcagaatttactactcgagtacttttgcaattgttaagagcataagataaatttatctcatctctatgcttttgatttattccgagtaatacttagcaccttgcgttactcggtccatccaacgagcccccgggtgctaggaatcggcccaaaggcaactatccgtcgacaaaccaaatggaaagcatagaaagatagaactccataactcgataggtactttatctttacttggattatatcgcaagtaatcaagataggcattatgaacaatgttgaaaaatatgatataatatctgtagcccccggctcacttgtcaacgttgatgtagtgaggcagaggaaaaggaaaataccatatataaaaaataaaacaatgatgacttagctttttagtattcccgctggtgatgacagaactagccgatgtgggaataaagtcgtccatcaatggcaatgaaagcaccaaccatggaagcaactgagtcatccgtcaaccgtataggcgaagtccgccaaccgtataggcgaaaataccagtcagtggcgacgaaggcggtcgatggtgaaatatgatgatgcccatcagcagcagcataacaagccagccatgaaagcgaggacaccagtcagcggcagacgaggcggccggtcggtgaaaacataggtgcccaacaacggtggtgtgaccatccaaccgtgtaggcgagtacaccagtcggcggctgatgaggcggctggtcggtgaagacgtaggtgccaaccgaccgtgtaggcgaggacaccagtcggcagcagataaggcggccggttggtgaagacgtagacgcccaacaacgatggtgtgaccaaccaaccgtgtaagcagaaacaccagtcggcggcggcgaaggcaggccggcagtggagacatagacgcccaataacggtggtgtgaccaaccaaccgtgtaggcgaaaaaccagttgacgacgacgacggcggccaatggtgaagacaatgccgccatcggcaacggtggcggagtacgccaaccgtggaggcgaaggcaccaatccatggctgcgaatgccacatatgtacgtgcatacgaaaataacagatcaaaaagtaattagagatctgtgaattaaatgactagaaaaatcaatagtttaatctggtttacataaaaaaaattaaaacgatagacctggtgaaggtttatgatcttgatgcacgtatgttgtgacacgtcctattttggaacttgcatgtagatggataatttatccgtaaccaatgtccggttcactgatccaatggtaacctcaatgattggaaacgcatactgtgtagcagtagtctaagcgctgtcgctgtgcgatcaggagcatacacacgtgtagataatttcttccagatttcttgacatgtggtgtgcctgttacatgtatttcatcatcggggttgatctatggtgtaaattccagattagtctgttgttgctggactccgcttcggacttcagttggagaaactcgatctcaccaaggaaattaaatcgatgagatgacaaacattgaaagcttttttcccgtagtaggatgttcgcagccattgacattagctcgtaatcaatcttgacgggttgctccgttcgaagatgtcgaggaatctgacgatgaccggatgaggttgaagtgaccttgagcccccccaactggtttgagtcccagtcagagagagtctgctagagtattcggcgacgaggaggcaaaaaatctaccaaagcgaagatgaagtgagcgacttacgaagttgattccatcgcacttttcgacaggaaactcggcgtcacccctacctggcgcgccaactctcgaaacatgaattcggcaataataaaaggggtagcgcacgagacctaaaagtagatggatgcggagacaaaggatttagacaggtttaggccctctcaatgagaggtaataccctactcctgtttagggatttgaatccaccgggtgtgtattgatctgacgatcaggttgtgtcatctaccccctagagggcctcctgcctaccttatataggacggggggcaggattataagatagaaaccttaaccaatacggtatcggtttcctaaatctactttacaatattatcaaaccaggactttaggccgttccataatatacaaggaaacgtaatacccaagtcatgatttgttacatattccatagatataagttatcccctataactaatcgataaccatgacgtgtggatatggggtacccataatctctacactaatctccacaccttaagtgtttgccatttgcgttaccctataacaaacccaacgtttttcagctttgctgtgatgcatgccatctctaacactcaatgatgccgatcgcgttaaaaagctttaccaatcgataagatgatcttactagcgcgaaaccaaaatgatcttactagcacaacactacataattaaatacatatatatatcaattgttattatattgtacttatcaatgagggaataatgggatgcataaacgaccgagatgtgtctatgggggtggggtatgattgcgatgacaaccttctactctaaaatatcaacatcaacctacagggattcttttccatttgatggttaatatctagcactactctttttaatatcatcttgatatattttttagtgcaaaacttctacatcaaatcctttcaaaagcttgaaattaaaaagaactcattagataacacacgggctataaaaaaagcatgcacgactactttctagtattaaagctaactataaaggtagcccgtgcatttgcgcgggcttgtattttagattgcgtttgaaaaacttatatagatggaatatcaaccgaatgacacctgtcatttttccaaagcattatttcgccataaattttcttcatcctcgttacttagatactatttgttagcttttataatatataatattttaatacatcgctataaataatttataattatctatgatcaattttgggaggtgaatttttcttaaagataattaaagggtgttgcgatttcgcataagatgtatccataatactgacatacttataataaacataggtttttaactgtaaatttattacataaataatctgacaacataaacttacactaccacataaacaatttattacgtaaataatctaacaacataaacttacaataccatagaaacatggataggtaccacttgggaatccgtcataggtgttcgatttcccattcggcatctaggaagcggcaaagatgagggaaatcaaaggtgcgggttccaaaaccgggaccttagagaggttttaggaatcaaaaaaaggcatcgagcagctcccattcaccccgccgagaacacatcgaagaacatccaagaacgaatgaacatgaacatcaagaatattcttcccaactactgggaaccatcaaaactactcatccccatcaagaacacaattacaaaaaacacatcaagaacaaatagatagcacaaagagccaccgctcgacaccaccgccattgccgccgcctcctctcgtgcgccgccgcctgccaccacctcccctcccgccagatctagcggagcggaagacgctgccgccgctgccgggccgagagagaggagtgcgtgtgtgcgagagaaagaggaatgcgctcgagagagagagagcgcgcgttagatagagagtgagaggagagcgagactatcggtcttatccgtgcgagagagaggggcaccgagccctctcaaccttatccgctcaagaccaccgatcggctcggctcgacttttaattatccaacacttatagtaaattaaaggtgttagttttttttaaaaaaaaatacatctagctatataatagaaaactgacacctacagtctattaaaggtggcagttttttttttttttgtattttcaacccgcatagatgggaaatggtatatatgtgccggttttattacttccagcacctataacaccgagctctatgtgccttttttaagtagtgtgatcaaatcatatatgtatgatatagttactatataaataatctaacaacataagcatattagaatacatttatgatttaaatgctatagttgcctaaatgttttttacgtaaatctctgtgtcttttttagcagtgtgatcaaatcatatatgtatgatttagttactatataaataatctaacagcataagcatattagaatacttttatgatttaaatgctatagttgcttaaatgttttttacgtaaattctgctttcttttagaagaaggaaaataggagagataaatagataatagaatgaaaagagaagaatgggaataggagcgtgcagagttcatatgtatacgtgcatccgcaagaatatataggggcccaatttagagttagattaggatggatggattactcttttttctacatcttatctaatggtcaaaaaggatgggcccacctatttaaatgaaaattaagggttagatgtttctttaccacatggcagcttaggagcacttgtagagtgccatgtggcgacatatgagcatttgtagaaagtttaatggacttttagtatataataatagatagatagatttcagcccatgcatgctgttatcactttgtatctaaaaaccaaacaaagataaaagaaaggtgaggatcaaaacactcaatttggaactacgaaatatacttatattcaatagataaagaagaagctgcaaactcttccttttctttggagtatgacaccagattgcagtagttctatcctggtagacatgaatatacactcgacttcatgaaatagtagttcccatcaaataataatttttggatagacattaattcaaatagtagttttcattttggacaatcgtcaatacaacatagtatttgccagcaaagccgagtatacagggccagtacttacccatagaaaaatgaaaccataatcagtacgtacacaatcgcatgaatttgatagaaataaaacaatcataggaaaacaaaccatccatgacacctacagttcgtgatatacccggctgaaccttgtgataactccgcatcagactcataggatggaaaccatccaaacctaaagaacaaaatacactcaaattctaacaaccgtaatgctagtaaataaataccgccacttattcttccaataaacttttaaaccgaaaatctagaattttgaataaaccggtgaaaaaacttggccccactactttaattgtaatatttgaaccacataaccaaacttagcaaataataatgccttgcatatgtactgaaaattatctgcagctttcatattaagtgaaaaatctaattttatttccaaccatctcagatttaagtaaaagaaatcagctgcaccgctagaaaaatatcgacgagacctacgacttttgcgtacagcacaaaacataacttctaatggattaataccactatttcagtctacctagaaaattaaaatcgatctatggcaacaaaattaaaagtaaaattagaagtagcaaggaactagttttagtttacccttgcggccattataattcggtaaatctttcattctcctcaaccttccctttttctgctcctctgtttttgtcagcagcagtgcgtagagcagtcgacagacgactagccaatcagctgggaaggcagcagccagcaggccatgctgggtaacaacaggcagcacagcagatcagcagagcaacatactagcgtctggcctcgccacctgtgaacaccgtcacagctaatttgatcaaatggaacaaatagtgctgttgagattataggcataaaatgatttaatctatttcataaataaatcatgacattacagatgaaaactagcatgaacgcatcattagatctacacatgtaaactacacagtataacatgaacagatcaaatatgcgcaacatattgaatacgtaccgaggtagcggaaagaccggctgcttcggtcgaaacttttcgcaggcgtctacgaaggcacgcagcacgcgagcgaagaggaagacgagccgtcgcggacaaacagggagcagtcgcgcaaagcgcttcccaaaaatcttattgccgccttctcccggtgcaggacgtcgaaggcagaggttccggagacctgcactcccgatcgcaggtgcacgccggcaagcgggatggagtaatctacgagcgacggcgcagcacagagtaggaggcaaaccctagattgattttgcgtgtgttgcgtgaagacggcgggtcggtttatatagagaagggtcacttgatcagggcgcccgcacgatctccactgcgcgtaaccgaatcggataagttgcgcgtaacttatccggactccacgccgtttgcacgcaccagatttttcggaacgtttccaaaacaaaaacgaatccgaatttgcagcaaaacaaaactacaaaaggaggctgcatctgcgcaaggtgatgaaccaattttggcggatcattcgacgcgtacgtcgtgcacgcggccgcctgccctgccaggccaggcgatgcgaggcgagcgagcgcgcgcatatgttccccctcttctctctaccacacatgcttcaagtggctaggagggcatcctcccttttaaggaggtccccctcttctagaataagcaaggtggtactaaactccacatgcatgccatcctaggaggtgggcttttgtgattttccaaagaattaatcttcgagtgggctaaggcccattcattaattccaacaatcccccaccaaatctcaaaatcccactgagatttgccttttccaatgtactgtttatataccagcggttcgatggagaccgattaagattgaacatccacctagaactccaagctacacttaatcacaacttgaacaatggactatgccttgaattgcaagtcctgtgcaagcaagtttcactcagagtcttatctggtactagaccgtctgtagactacccctcgggtggagcgtataagtcatactcctaggtctatagtaagcttcctagaagattcacccaaaatctccatagactgcgaccaacagtcaagctcacaaaggtgagttctttcaagaatgctctgcaggacaacatcttcgctaattaaagccaacagaacacattaaggcatagccaacctgccttacagctcacgagagtacatgcatcttcacttagagagggtatagattggtactctcctctagtttactaatggtttgttcttcccagattctaattcacgggatctccgatcacatagactgggttaccaccatagtataactcacatgggtctcaaacccatctccttcgatacattgtttatcacatttcgttatagtcccttcgtgaagggatttgccaggtttctagctgtttggatgtaatccaacgttataactccggagtttcttaatttcctgatagatttcatattatccttagaactattcactttaacaattaccgtttgattgtcacagtttataaggatagccggcaccggtttttcaacaataggcagatccattaatagaacatgcagccattctacctcaacagtagcagtatccagtgccgtcagctctgcttccatggttgacctcgtcaaaatggtctgtttgcaagacctccatgaaacagcaccaccacccagtgtgaagacatatccactagtggctttgatctcatccacatcagatatccagttagaatcactataaccctccagtaccgcaggatacatagtatagtgaagccccaattccacagtatctttcagatagcgcattactcgctcaagcgcacgctagtgatcatatcccggattagaggtaaatcggctcaacttgctcacagcaaaagagatatcaggcctagttgcactagccaggtacatcatcgagccaatgatttgggagtattccagttgattcctagcaattctcttgttcttgcgaagcaacaaactaggatcagaaggtgttggagaaggcttactatcaatgtagccaaaaccaattcaagatcttctccacataatgggactgcaagagtgtaatcccattctcacctctaattagcttaatgtttaagataacatcagctactcccaaatccttcatatcaaaattttgagacaagaatgatttaacctcatttatcacctcaaggtttgtcccaaatatcagtatgtcatcaacatacaagcataaaa

SEQ ID NO: 19166 - DNA, 1617 bp, Oryza sativa
agacctaagtctttttatctttctgtcaagttgattttcaacttctgccttataaattttaaaatagtctagagcttcgtctttcgttttcaacaagtacacatagaaaaatctagtagcatcatcaatcaaagtcatgaaatatcattttccaccctttgtcaacaccccattcatttcacaaagatcagaatgtaggagttctagtggtgccaagtttctttcctcggcagccttgtgaggcttgcgaggttgcttcgattgcacacaactatggcacttagaacctttgacaatggaaaacttagaaattaaacacatgctggaaagccgagacatcaatccaaaattaatatgcaataaacgtgagtgccaaacattagcctcatcatccacactgccacaaatatggttcacagacttattgtagaaatcagaaagggaaaagcggaataggcctctgcactcataacctttactaataaaatatccatgtttagacacgactactttattagactcaaaaactaacttaaatccgtctctagtcagacgggagccactaacaagattcctgttgatagaagggacatgttgcacgttcttcagctgtacgatctttcccgaagtaaactttagatctaccgtgccaacaccatgaacagaagcatgtgacccattccccaataggacggtggaaccccgtgcgacctgataagaagaaaacaatgagatgtcagcacaaacatgtacattggccccagtatcaacccaccaataagtagactgattaactaaaaaaacagtaggtaaattaccatacccgcttccatctccagtcttgccaatggtcacattagcatacttagaagtctgccctgcaggtgccttcatccccttgcgctgtggatacttcctagccagatgaccaagttggccacacacaaagcaagtcctctcatcttgattaggattgttattgttcttcttctgcttcttgaagttggtggtctgctgagctttgtattttcccttgctcttgttctgggccttgtgcacaatattggcactggactgcccaccatcgcccttagacgcggcatctttttcccgagctttctcctcaatatcaagagacgttatcaacccctcaacggagtattcctgtctcttatgtttgagtgcagtaccgaaacttctccaagatgaagttagtttcgcaataatgcacccgaccacaaatttgtcgggtaagacacacttaaggagttcaaattccttagccatggtttatatctcatgagcctgttcgactacagaacggttgtcagccatcttgtagtcatgaaactgctccatgatatacagatcattgctagcatcagtagcaccgaatttagtattcagtgcatcccacaactccttagcgtcggtcatatgcaaatacacctcgaccagacgatcgccaagaacgctaagaatgcatcccacaaagagagtagtggctttctcgaattgcttctgtggttcagcagtaagaactccttcaggtttgccagtactcacccagaagcatttcatagctgtcagccacagagtgaccctgatctggcatct

SEQ ID NO: 19167 - DNA, 9330 bp, Oryza sativa
cctgcagcctttttctaataactctataattaaaaatatgttaacaacagcttaattaacatcgactcttagtgtttattaaattgaagtttgatgcatgaggaaggataaagaagagaaaggtaacagaaaaattgctagagcatctgtcgtctcaactcttatatgagggtaatctctttgtagactaaaagtatatatcagcttatcttaataaatactagcaatggaaatagaatccgacacataaatatcttaataggtgaaagcagcaagcctctcaaacagcgatatgcctcgtcatctgaaatatcagggacctttaggagatgggagttgaaacagagatggaccgttggatcatttggagtggagtccaaccaggaggcttccagaccaggtcccaatgcagattactaataaagaaataagggagcgtagcagagtaatgcctaaagcaggggattaaaaaaatctcatcagatgtttttttcagctttatcactttaataatcaatctatttacatctatacatgtacaatacaataggctacaagtaacaagttcttcgtataaacgtccaaaaaataccattcaaattatgatagactttgcaagctatatatgttataaatattgttagtattctctctaggatcacctaggtttagatctagtcgggttggttctatttgattgaatgattgaacaataatagagattaagggaaaacggtttagggatgtgaccggttgacgttggatgaggagaaagtgccggccatcgtcgttgtcgtcgctcggcttgacgaggacggcggcgacggtggtcgtagtagtagaagtcataggcaacgatgaggcgtggcgcggcggtggtgtcttcccatcactggctgcaccccctctcgatcggattatggtttgtgggtgtagttggcgccggcaacgaacctcatgtcgtgcgccgctctagcctccatccctctttatatggcgcatggtgacggggcccaccagccattgggctaggtgcccctgatcagggcgtgggtccccttgagcccaacggctcaaagggagggagatcaatctaacattctcccccttgatctcactatttcttttagcctttttctattccatcacagatttgcacatagagcatgtttcatcgtcacggtcaatcaccaatggattcgacatccactatacacatctctattcaaatatagatactttaacttttgggccctgtagtccaggattcataaggcttcccttaaacccatgccgactacatgtttcttgaacacgttgagtgataggcctttcgtgagcggatccgcgagcatcctttctgttctaatgtgctcgagactaattgtttgatcccagactttgtccttcacaacatagtactttatgtcaatctgtttggcagcaccacttgactgattgttgtgagcgtacaaaactgcgggttcgttatcgcagtataactttagtggtttctcaatactatcaaccacctttaaaccgggtatgaacttctttagccagttcacctgcctagtggcctcatagcatgctataaacttggcatacatagtagaccctgcagtgataatctgttttgagctttttcatgaaatagctcctcctgccagggtgaacacgtatcccgatgttgactttgtattatcttttgcaaagtcagaatcagaataccccactatctggagcgattctgatcttctgtaagacagcttgaggcctttagttccttgcaaatagcgcaagactttctttaccaatttccagtgctctgagcctagattactctgaaatctaccaagtaacctggtaccaaatgctaaatcagggcgtgtgcacacttgcgcgtactgtaggcttcccacggctgacgcatatggttttgttttcatttcattgagctcatactgatttgtgggacattgtcatgccccatacttttccgctttgactataagagcaggtgaagcactgcatctgtacatgttgaatttcttcaacaccttttctatatatgtcttttgataaagtcccaatgcatactttgttctatctcagtgaatctgtatgcccaaaacatatgaagcctcaccgaggtctttcatgtcaaagtttgaggacaaggatttctttgtttcctgcagtggactgacatcactactagatggtagaatgtcatccacatacagaattaggaaaatgaatattccattcttaaattttgaataaatacagttgtcctcgacattctcttgaaacccaaatttctttatagtcccatcaaacttcaagtaccactgtctcgaagcttgctttaatccataaatggatctctttagacggcatcccatatttttgttccctttcatgacaaaaccttttgtttgtgccatgtatactttttcctctaaatctccatttagaaatgccgtttttacatccatctgatgtaattccaaatcataatgtgccaccagtgccattattatcctgaaggaatctttacaatagactagagaaaatgtctcattgtaatcaatcctttctcgttgcgtgaagccttttgccacaagtcgcgccttcaaattttctatattccctctggagtcatatttggttttgtagactcatttacaacctactgttttggctcctttaggaatttctttcaaatcccaaacatcgtttagtttcattatttcatttcatcttacattgcttccaaccattcagatgagcgagcgcttctcatggcctcttcatatgaggtgggatcagcctccatatgcgactcttctatactataaacttgatagtcatcacgaatagccgatcttctaactctttcagaccttctaggggcctgctgttccggcacattatctgtttgaggctgttgcagctcctcctctggtgtggcaataatttcggttgaatcctgtagaacaggttcctcactttcattcattgttgccacaggagaggtaacaacaggtgttggtaccgcaacgtcatgcattgcaggcacaacatcagcaagtagagagaagaaaggctcttgaatcgacggagcaggtacagacaccccctctcctcaagatcaatttctcgaacaaccgagctccccctaatcatttcgtcttccaagaagacagcgtgtctcgtttctacaaactttgtataaatgtttggacagtagaaatcataaccctttgatcttttaggatagccaaaaaaatggcaacttattgtcttgggatctaatttcccaaggtttgggttaaatactttagcctctgcaggactcccccacactcggaggtgagctagtgagggtactcttcctatccatagctcatacggtgttttgggcaccgatttgcttggaacgctgttgagtatgtattgttgtaaatctgagaactccaatggaggaagaattacactcttaactagtctctcaattctccccctcgaaatatggcctaaacgacagtgccataatttcgatgagacatcaggagttcgctttcttttcttgttttcttatatcaacgaggacacaacattcacattcttagaaagagataacaaataaagctcgccgacgatgatctcgtatacaagccaacacatgccccccggcatatcggctcgaccgacgacactcctgcttcaaggcttcgtcgatacgttgaccgatgccttcgagctgggtgctagcgccattcagccacgagatatatccggccgccgattcctcgggatccccgcggggtactcggagctctttacagactctcgacatggatgtgcagcaactcttcagatacgagttgaaccacacctcacgaccccggagtgtctctacggcctggtcctttctcacttccagcatagtcctcttgagttccgcgacctcaaacttcgtcctccagtactggatgcgatgatcctggtcagcaagtgcactctcgagatctgctcagcatggaaacgactaagtcaagttgctcttctctcccgagaacacaacaaatcaagtcgatccagacggaagggcaaaggaaatgataacaaagacaaccaacctaagggagtcgtcgccatgctcgtttcgatgggcgaattttgagctacatcgccctccggcacatgtggctcgaacgcaagtaatggaacgactaccggcaactcagactgcccgtgctactggacatcctcgacatcaacatctctacaaacgacaacaaagttctcaagatcaaaatgctgaaaacgctaaggtgatgactgcgcacacaaaggcggttggaaccaataaaagttttacaaagcatggccaaagagtacaagagagctaagaccctactcttcaaaaagagggaggacggactctcccaggtcaccgacctcctccatctcgtccttgcgcacatcgctggccgccccctgatccaagatcttctgcagatcgagttcaggatgccagcctcacacacgcaaggacatggcacgccccggtatagatcccgttggacgtctcctctccgaccctggccgcgtgtttggaggggatcgcctccatcgccgctgccagctcctcaagtgaggacgtcaacgagaactcgtcggggttcgccgggatggtggccttgacgccgtattccccggcgagctggtgcaggccggtgtaggtgacacgcagggagccgcggatctccgacaagcggttctcgagctctgacatacggtgctcgagcccctgccgttgtcgctcattgccagccaccagctcctgcatcttctggaggtcctcgcaaacctccgctaagtcgcgcgccagccggtcggcgcgctcattcgccgacgacgctgccgccgcccttgcctccgcgagcactagcctcgagaaggcgccccatctcgacctggagctcctcccaggtgagaacggcagctggcgaaccccgaccagcggcaagatcgctgattgggccgctaggtgtcgcctcgcgactcctgggcacgaccacgacatccgtcgaggccatggcaggagacgcgctggaggtccctccagacccgtcttgcgccaccttcgcccgtgccgccctgcgaaaagatggaactgagacaggctgcaacagtttgatgaagtgacaagatctcaaaatcatccacttacttctcgctaagcatcactagccgctgccgtcgcggaggtggaggagacgcgtccgaggcctagagtacaaccgatgcgatgtgaggtgcaaatctttcgactacgtaataaaagaacagggaaacttaccgagggggtgggtgtcttccgacgatgtccgaccatagaggagaatttcctcccctttttcggaacattgccgccactcgttgtggcagcggcagcagcagcgtcagacgcctccttggcaactttctccttcagcaacgccgccacctgatggtccacgagcggcccgatgatatcagtcagagggagagcctacgtgtcatgaagtcacaatgcaatcccggaagaaaaaaggaaaaggaccgctgagtacacttacattgatggcagcatcacgctcggccgcccccttctcgcaaagggggacggggacgttgctcgccgttgtcgggccactgatcaccagttgactgacgcggcgctccacggttgcactgtccaagcctgtagatccagaccagaatccaataagtcgggaagaacacgcgcataagggggtcaatttaactaaaaaggaaaataccccgaggagaaacccgggtcgcgtcctccggcctagaataatcaaaggctggatgggctcgagcgtgaagcggctgaatccacctaccaatgaagtcggcagtgacttcataccccgacaacccctgttctcgaaggtcattaatgacatcgatgaaagactgaagggaggagatcaaagcgggtttggtggtccaggatggaatcttgtttggttgttcttcaggaacaatgaagaccggatccgaatcctctatctgaagatagaaccacctcccccgccatttgctgcaagatgaggggcactggaaggggatgtatcgtgacttcaggccatcccgatgtcagaaaccaacacacccggacacttttttaggttctatctagcgcaactcatagtagaagcggaaaaggtcaagaaacggctctaccccaatgtaggcctcacacagatgagaaaagatactcagaaaggcgatggaattggggttcaaatggagcaaggaaagaccatagaaattcaacaccaatagaataaatttagacggcggaggaagaaaaccacagagaacaaagtcctcgatcgcaaccatgcgacccaggacaggctggggttcagtacctcctacttctctttctgtggtcccgcgaccgggaagggcgccatcctcctgcagtttcttcagtgacgcactggtggaggttgacttaccgccggggatcgccggagaaaggatcgagatgagctagctagggtttttgcgggagcaaagaagacgagggatgcttggaagctggagagttccttcaacaggcggacttcaaatgggatccccaaaactcccttaaatagacgtacttccgacggtgcgaattccaaggaaaggagagagatggccgccgaaaatttcggggtccattatgcgcgacagtttttcggacttcaatttaaattcactcatgaccgttgagcttcacccgacgttgtcgatcactccttgtctctcggtttccacatcgagaacgatgacaacatcagaagtcgcgatcggtctcacaagatcatttaagtagaagtcgggggctactgtccgagttacaggtaaggtataccctccacccttcgatatacgtcacattttgatatagtatgtttgcgcatatacggacgttctcagcaaaagttaagaaagtccagcatggagtctacagatggaaagagtcctactcggatagaactgggtcatcattgtatcgtgtcgggtccgatgtctccgagtccaacctggagaccagttgacctgcggtataaaagggaccccccgggaggacctaaggcattgaatctcagagccaacacatccactacagcctacgaagccagagcttacaggagcagaattgccgggtgatctagttgaatcaactcgattacgatctcgtcggtatcatcgagttccactatttcctttgtaatctgtggtttccatcatataatcccatatcaactggattagggctattacctattaaggggcctgaaccagtataatttttgttttctgcttgctcgatgtcgtattacgtagatgctcgtaccagcgtaccccaataccctctatatctggtctacgggtatcccccgtcgacagggggtttctaaaatatgtggcttttttgttgcactggaatatttcagttcactgcaacattagatcgatgcatagtgaaacattgtgagtaatctaggtgaaacctttttggtggaacaaaaaataaaccaaattcatttaatagagggtttccaaaatatgtgggtgatttgttgcaacaatacgtttcataatataaaaatccactgcgacatttgattcgtacatagtgaaacatcatgagtacactagctgaaacgttgtaaaactactggttgaaacatcagaagagaccacatgcaacattaaaaaaatcaataaaaaactaatgtgtggtcttgttgtaaagatttaattgtaacgaatttagtggtacaattagatcgtaaattagataaatagtttacgagaaaaaatcttttgaagaaataagagaggggggcatgtaataaaagattcgttgcatgtctgcatgcagtggcaggggacaaaacctgcgtccgatttttctccaccccgctggtcgccggggtgtgagcattttcggtataatcatgtaaaaccggtaaaaaatatttttttcaatatttttgtgacttctatgtgtgaaagactgagggtggtagaatgagaaggccctatagcatcttatactttggtttttgcccaattaattattgtggtaacataacagacttgccaataatttgtacccatgctgccagtcttagaaatctcggtagatgtgcccgttatatataaatctacaacggcaattttgctccatgtgatcaaaacttatttttccatacggttgggctactcatttgccccaacatatatatgcaaggagatgaggggaggccatcaatggcagtggttcaccagagattgaattcgatgattaaaggctgaatcaagaagggtaaatatgggggaattgatgatgaggaggagagagaatgattttttattcaattcggagtgtaatcatccggggagggaggtcggcgtgccggcgacggtagggtttggtcgggagggagaagaacggcggacttgaggtaggggacgcgcctggcacgtgggccccatctgccagcgcgtgaggggaaggggatgggaaggtggccggtcaactagaccaggacaggccgagggggagaggggagagatgggccgacagctggagatggcccaagagggagggagagaaagaggaggaggtgggtggacaaatacagacttcgctcatcggctggggagaggaggactttgggccgaaaatgttatggcccaaagagaaggagagaattattttatgtttttcatgttaatataaactctgatattggttgttgttgtattaaaattatttttgttgctctgaaaattcaaataaaaatttagggaccaatttagagcatggagaattcaagaaaaatactccaagccagatttcaattcttcttgatgtattttaccttttaataatttatattattccttttaattgggataagtccattttacactgtcgaactctttgctttgtctaaagtgcacacccaaactctaaaaccgggtaaatgatgtttaatttaccccttccattcaaacaagggtggtttttcttaaattatgctgacgtggtgatccaatcaggcaaaaaaattaaaaacaaataattggtaccacatgtcagatgccacctatctcctacccaatatctcttccttttcactctcttctctccttccactacgagaacggtgctggcgataagatcgagttctacctcctcgtctcccccctcagtgccggcgagctccccgtcccccg

SEQ ID NO: 19168 - DNA, 8723 bp, Oryza sativa
tgtggatcgttggtatcagggtatatgcgagattaagataaaagagatggagacaaggatttctatataggttcgagccccttatctgacaggtaatagccctactcctgttggccgaaaccggtgttgcttttattcatcataatcacaccaatacattaaattgggataacttatctagctgtcatcaacttggcggcatggataaccaactcgtagtggacgacatggtagtcttccctcgaatccgcactcggcgaaatcagagatagcgctagatccctcttgttggcctccgcagacaccatattgtgtttgtctagacttatctctgatatcgatatccagcgacttatcttggcgtgtgttggcttctattgatctatgttgatctgtatgtcttttggcttgtcccctctcctcctaggggggcttgtatttatacccatacatgcccccttgtccaagtagaactagagagaccaatatggatacaatccgagtagtccttgtcgtttccatgtagaactctatttgtccttccttatccataactccttctatatacgaggtttgtttccgtataaaacatgttatgtggtgggccttgccgagcttagtcaattagtgttaggtatatagtatccataaccctgacagtagctcctgacttcaatgcaaatgaacgagttcatgtcctgaaccgaagactttggaataactattgtcgtgctcacctgaccattctcggtgagatcagagatatcgctatattccccttatcgacctccacaggcactatattgggtttgtctaggtcccaatgcctactcagaaggtatggagtttgcgactaagtcccccatcttgctataatcgagaatttggattgaagtcaagaaattccatctcggcgggtacaccatcgcttcattccatattctttgttgagctccatcaaccgttctcgagtaatcgagtgggcatagagactgcgacaaagccttgaaatctgactagactgttataatgtctgactttcagaaatttacgtagatgctaagacgaccaccacattgggcaatggccaggtgtatagttgtagtcaacaaatcacagaagtagtgagagaatcactacaccgcaggtcgaagaccagttatagtcataactcgaccacttgaagtggaggtacgagagattgctacgacctacgagttcgagaaccaggagtaggagtctctcaaccgtttgaaattgaggtgcgaggaccgcaacgtagtaggtcgaagaccagtcgtagtcgtacatggaccattagaagccgtggtgtggagatcgctacgttgctggtcgaagaccagtcgtagtcgtacctcgacaattagaagtcgtggtgcgaggatcgctacgtttctggtcaaagaccagtcgtagtcgtacctcgaccattagaagtcctggtgtgaggatctctacgtttctggtcgaagaccagtcgtagtcgtatctcaaccattagaagtcgtggtaggaggatcgctacgttgttggtcgaggaccagtcgtagtcgtacctcgaccattagaagtcgtggtgcgaggatgtcatgtcctgataaattcatcttgaaaaaaaaaatcattctctaaaaggaataatagaattaattaaaattcgaaaaaaattggttaacattaaaatgcgtacaagaaaaattcgaatgtggcccggagaatttttgtttaattccccttggtctaaaatgagccctcaaattttacttgaattttcagagcaccaaaaaaaattattaagcaacaacaaccattataagagtttattaaaaagaaaacctgaaaataatcctcctttgggccaagcctggtccaaagtctccctctctccctcagcccgctgtcgaagtctctcttccatccctctccttttcctcccttctctctcgggccgcccctccctcctctccccctcccggcctgcctcggcccagccgccctctcccgtggccgcctccctcacgcgcccctcacgcgcgttgcacgcgcgctgaccgcaccccacgtgggtcccacccgcgccggtcgtctccttcctcccgcccggctcctctctctctcctgtgaaaccctatccgtttcctccctcaaatccacgcgattcaagcattggattccaaaattgattggggggaattaatcccccttccatcctctttgatttcccccaatttcccccttgaatggcaccctccattgcccggaacgcccgcgccattcctggccaccttccatggccgccgggcgccatttccgccaccgttccacgcctctcccgtggcccgttcattcccctctgctataaaatggaaccctctccttccgttctctcgttttagcctcctcccgtgtctccccgtggccgcagcacctctccccgtcgccctcatctctctcctgtgccgccggccacctccagccgcctctgccgcctcgcccacgtgccggccggccgtgccatcaccatcctcggcgcctcagctgcatcctcttcccccggcgttgcctccgtttcgcgcggatatcaccggaggcgcatcctcgccggcaaacagtggcgttgccgccactgtaccgcctccagtcgtcccggtcgccgcgccaaagcgccggccgacgtcgccgtctccttcgtcgacgtcgtagcatcaccctccgccccggccgctcctcggtttcgtccgaccggaaataacccaacgggtgttccttacgtgagtgtattattccttgtcccaggagacaaggtacacaaaaagttgatacatttcggagtttatcaagcggaagcgtaaatagttactttattacatgggcggcgaaggcccagcacacacaaagacaaacgggaaacagcgtaaatagttactttattacatgggcgacgaccacaggcgcttgacggcaggcacgagctaaacaccaaagccttcatcatccaggcgctcctcttctgggtttgggaaaaattgagcaagactgattacaaccacagtacccaacaagacacacccataagtgcagaataaatgcaagggagtacaagggggttataatacaaagggttagggtttgcagtaaacagcattaaaagacacttagttgctcaaagctattttgtaaacacgatcctagagctatacaatactattaatcaaggccgtgaacccacacgaacctgccttaacccaaggcctacgatgattcagaccgaactggcaacccgaccctgggtcccagctcgtcccaagccaacccaggccaaccattccacattttagttgttaagcaggtttcaagaactaaaacactaacataggtacattgctcggcttgcccataaccgagggcgcggctattcgaataggttatactctgatcagaggtgtacatctttacccacaagacacatcttcctcacgtgtaaccacgtgccacataccaccacggcatacagacggaagacatgacatagtttccaacccatcctagccatagacaaaagtaccgacccaaccccacctacggccggaacccccgtgtcacaccctaaaaatcctaaatgtataaattgttgtttaattggaatttttagaaatgattttaaaagtctagaacagaagatctaattttaattaataaattccaatataaaatggggccagataaaatttcattaaatactttgctttattctataattcctagatttttctgggatttatttgagctaaggaagtatttttaataaatggaattgcatttaatgaataatttaaattgaaaaatgtttttaaaagtctcttttggctttgggccgaaagtcggcccaaaaccttctctctctctcttcccggcccaagtcggcccagtccagtccgcagccgcgcgcgcgcgctcgctgtcgctgacaggtgggtcccacctgtcagtcttcgtcttcctcgcgccgccgccgccgcccgaaaccctagcgtgcgccgccgctgtctctttccaaattcggccgcgtctttccttctccggtgaaatcaatagaggggaaatgtttcccgagatctcctctaccttttctcttttggaatcatcggctaaaatcgcttggaaagtgtttgattcgaggtcgattcggatcggtctctctctctccgagcccgagtgacggagcgtggggctcctcaccgggagaccgtgcaggtccccctttgccggttcggccgggggccatgggtgagattctaagctcccagtctgtgtgtggaaggttcgcgagaatggaaacacacaagacacgggcgatgtatacaggttcgggccgctgagaagcgtaataccctactcctgtgttttggtggatctatgtatgaagaagctacaaaagagctggagaaccagagagctcttactctctccctctctgatcgttctggatccgaaaaatcccccttctaagtgggcaaggtcctccttttatacctcaaggggataccacatgcaccatctctctcttttttgtggggacttatcctatcttttcataaacagacggagacttgtatggttaccgtccgaatgaccttctgatgggacggcccatacctacctccacttccgccggaagcaggcgcgacgtgggaacatggctgtctgctgacgacatgaccagtgtcagaccggtcacaaatcggtcattcttgtccaccacgcgtcagtttatcaatctgcatgttcgcccctcttcatacaatgtcttgcttgtaatggttaggatgaagcctggtatatatctgaccgggaccaacgtgccatctccaggagctaacacgctggctccggctagggacgagtgcttggaggctctcatcctgacgggatggggcgaggcgtgcgtcagaccgcctgtcgccacctaacccacgatctgatcggtctgtgactggtcactgaccggataaacgagcgcgctgcactgcgttacatgcggcgtgacgcgctcgtccaaaccgcaataaatatggttaggtgagccccgctatgctcacctaccccatatacgcggcgcaaaacctacaaggggtcggggcgcctcggccctctgggccgagacgggagcggtccgacccctcggggagacaaagagaagggcggccgtatcaccctcgggcccgacccccctgagggggttaggccacgtgggtgatcgtgtctgcctcaagtctctaagtcatgatactcccggtcccatgtcaccgacagtagcccccggcgttatgccagggcgatcgccctccccgagggaagcggtcgggcgtgacgccacttctaaggcctggtgacaggtggggccggttcctacaggtgccgtcgaactacatcacccagagggcggtgtgaggcagctgcgatgggctcgagctggcctcgggggcggagacgagctcaggagctggggtccactccaccacaaagtcggcgagggcctggctcttgatcgcgtggcttggttcaaagcgcaaatcgaattcagagagttcgattgcccatttcaccaccagtccagtaccctctcggttatacaagatttggccgaggggataagacgtaaccaccgtgacccgatgcgcctggaaataatggcgcaacttcctcgaagttatcaggatagcgtaaagcatcttctgggcctgaaggtatcgggtctcagcgtcccggagggcctcgctaacgaagtagacgggccgctgcacctttcggcggggctgatcttcttcgtcaggggccacatctccagggcgctctccatccgagaggccacgcggggcgcactcggcttctgtgccgacgacctcggggtcagagggcgacaggcgcggccttcccgcagtggcctcggggccatcctgggggtcgggggcgcctggcaccgtcggacaagcaggcggagggccagctccggccgtcgggggccttgggccaccgttcggctcgggggcctctcctccctgctctctctctcttcgggcagaatcccggcggtcgcaagtcgcgcgcatcagcaagggaaaaccgaccgacaataatgagcggcccctcggcttcgcgtttgccttcaactccgacaaggagtgcggtgacgacggtgcggacgacagtgacggcgaggccggctacccaggcacgtcggagtgagcccccaggcctccgccaatcttaatagcttttccttcttcttccgaggccttcgggcccccttcttgttataggctgatttaatctgcaatcaaataaagaggaaatttttgtgtcaatttcatttgttctgtgtatgagacgaggatggtctgtgccacggtccttctgtgtcttggcttgaacaagggctcgtgcccaggtcccagcctcaaacggcgcgggtcaaggctagtgcctggggagatccacatgtcgagactggccaggccgggagcgtggtgaccgagggttatgggtgacccgattgtgggtttttgccgattcccccccggagttcaccacgtcccggggcacggctcggttctgggccccttttggcgattttagccgacccgagccccctagggtaggattgagcacgagtgacctatttcaagtcaagattcttcaaaaggaaacaaaagcacagacacagcctttaggaaatcgaaaatgcttttattgaaatacgaaagagaaaaaagataagcccccggccaaccctgcacgcccgggggggtgcggggttggcccgagcccaagacctgacacccgacccccactaggggtagaagcgacgaaggtgttcgatgttccacgggttaggcagctctgtgccgtcgcccgtggccagccgaacggagcccggccgggggacgccgatcactcgatacggaccctcccacattggtgagagtttgctcagtccagcacgtgtttggacacggcgtaggacgaggtcgtcgacgcagagtgatcgggcccggacgtagcgctgatggtagcgccgcaggctctgctggtagcgcgcggctcgaagggccgcgcgccaccttcgctcttccaagtagccgaggtcagggagcgtcggcttccttctttttgtcgctcgcaggcctcccctttcgggtggccagcgaaacgccttcgacggcgaggacatgaccctcgtcgtcggaatgagccgacctcttcttcctcctcctgtcccgccgccctgaccgagcggcggacccgggggcggccgaagtggggctctttggaggcgatattttcgagcatgcggttgtgccgcacaccccccctgaacgcgtagatcaccgcgtgtgcagggatgcatggtatggtgttgcggacttgacagaaccgctgaatgtatgagcgaagtgactcatcatccctttgctggactgcatgtaagtccgcttcttcacctgggcgcggatatgtgccttgaaagttcatggtgaactgttggcacaaatcctcccaagagtggacggacgcgggtggcaagttcattagccaaccccgtgcctgttccttcagggccatgggaaagaaattcgccatgaccctgtcgtcacccccggcggcctcgatcccggtcgtgtagacctggagaaactcggcggggttgacgctcccgtcatatttttcggcgatggtgggctggaaccttgggggccaacggatgttccgaaggctcgccacaaaggctctacagctgacaccaccaaccgggggcacggagggctgatccccgcgtccgtgttgatgtgacactccggacgaggaggcgccctccgttgcgtgggcagcacgtcggccattacgccggcgctcgatactgatgcgggcatccggccccccacgcagatcttcctaggtcggaggcgctgacgaaggagtggcggccaaatggcgagcaacagccgccgctcgccgcgccctccgccttgacgatatggagccggtggtagcagcgccagaggtcttggtggcggaggaccgcccaccagcacctaggcgctgccgtaccgtcatgaccaagttggccacgtcgtccagccaacgttgggctggagactccgggtcagggacaatgggcgggtgacgtaggagcgcgcccgcagcttggagcgcgccctgaggcgtgctgccgtcgccgtagacgaggaggcgacgctccccatctcgccgcccttccccatcacccgtggatgttgaagtcgcggatccttcgaccctctcgagcgcctcctcccgcctaggactttggcgtggagggggcgatggagtacgagctcgacggcgtgggttcggctccccgttgtcaccgctaacactcggagagaggttgtgcgcctttgcttgttcggccattgggctgaacaggaaaagcttggcgcacacgaaagaatgcgagagcttagaaaaacacccgcagagccccctacctggcgcgccagatgacggagcgtggggctcctcaccgggagaccgtgcaggtccccctttgccggttcggccgggggccctgggtgagattttaagctcctagtctgtgtgtggaaggttcgcgagaatggaaacacacaagacacgggcgatgtatacaggttcgggccgct

SEQ ID NO: 19169 - DNA, 12462 bp, Oryza sativa
cagtagaggtttcgttgcagccttagaagcgaagcccactctaattgatcaaattagagaagcccaaattaatgatcctgatattcaagaaatcaaaaagaatatgagaagaggaagagctatcggtttcttggaggatgagcaaggaacagtatggttgggcgagagaatctgtgttcctgacaacaaagatttaaaagatgcaattctgaaagaagctcatgatactttatattccattcaccctggtagtaccaaaatgtaccaggatctcaaggaaagattttggtgggcaagtatgaagcgtgaaatcgcagagtacgtagcagtatgtgatgtttgtcagcgagtcaaggcagaacatcagaaacctgccggtttgttgcagcctttgaagattcctgaatggaaatgggaggaaatcggtatggatttcatcactggtctacccagaacgtcatcaggccatgactctatttgggtgatagtcgacagacttaccaaagtggctcatttcatcccagtaaagacaacctattccggaagtcggttggcggaattgtatatggcaaggattgtgtgtttgcatggcgtccctaagaaaatagtgtctaatcgaggcagtcagtttacctcaaatttttggaagaagcttcaggaagagatgggttctaagctgaactttagtactgcttatcatccgcagacagacggacaaaccgaaagggtgaatcagattttggaagacatgttgagagcttgtgctttagacttcggtggaagttgggataagaatctaccttatgcggaattctcgtacaacaacagttatcaagctagtcttcagatggctccgtacgaagcactgtatggtcgaaagtgccgcactccacttttgtgggatcaaacgggagaacgtcaggttttcgggacggatatcctgagggaagcagaagaaaaggtgaaaatcattcaagaaagattgcgtgtggcccagtctcgtcataagagttatgccgacaatcgccgcagagatttgagtttcgacgaaagagattatgtgtatcttcgtgtcacgcctcttcgaggagttcatcgttttcacaccaaaggaaaattggcaccgcgttttgtgggaccttataagattgtcagtagaagaggagaggttgcttattagttggagttacctcaatctttggcaggagtccataatgtgttccatgtgtcgcaattgaagaagtgtttaagggtacctaccgaagaagctaatcttgaacagatagaagtccaagaggatctgacctatgttgagaaaccaatccgtatcttggaaatagatgagagaagaaccagaaatcgagttatccgtttttgtaaagtccaatggagtaatcactcggaagaagaatcaacttgggaacgagaagatgaattgaagtcagctcatccgcatctgttcaccagttcttccgaatctcgaggacgagattctgtttaaggggggtaggtttgtcacaccctaaaaatcctaaatgtataaattgttgtttaattggaatttttagaaatgattttaaaagtctaggagagaagatctaattttaattaataaattccaatataaaatggggccagataaaatttcattaaatactttgctttattctataattcctagatttttatgggatttatttgagctaaggaagtatttttaataaatggaattgcatttaatgaataatttaaattgaaaaatgtttttaaaagtctcttttggctttgggccgaaagttggcccaaaaccttctctctctctcttcccggcccaagtcggcccagtctagtccgcagccgcgcgcgcgcgctcgctgtcgctgacaggtgggtcccacctgtcagtcttcgtcttcctcgcgccgccgccgccgcccgaaaccctagcgtgcgccgccgccgtctctttccaaattcggccgcgtctttccttctccggtgaaatcaatagaggggaaatgtttcccgagatctcctctaccttttctcttttggaatcatcggctaaaatcgcttggaaagtgtttgattcgaggtcgattcggatcggtctctctctctccgagcccgaggtttccttcgcgtcgccggtcgccgtgggccttcgccgccgcctccttgcccctataaaaggatcctcggtgtctcctctacccgtcgccacccttgctttcgcctctcgccgtcggtagcgccctagcgccgtgtgacctagcgccgccgttgtcgccgccgctccagccgtgtgtcaccgtcgctccagtcgtcgtcgtcgttcgggaagatcgccatcgtggtcgccgtcgcgtcgccgtcctcgtccgcccctccgccatcgctgtcaaccgccggagcaccgtcgccgccgtcgacccgatcttctccgccgcttcgacctcgttgccgacgtcgtccgttgctcctccgtcgtcgctttggtcaccggtgagttcgccgcgatgtccgcatcgttttggtgtcctccgttcgcgtcctcgcgccgtcgttcgccggcgagcatgcgcgcccgagccgccgagccgccgccggtggtgacgtcgtcactgacgtcatcgtcgtcgtccctcgtggtccggccgtggaccggtcgatctcggccgtccgttttggataggatcgatctcggccgttcgttcccgtgaaccgctgccgtgcgcccggtccaccgctgacgcaataaacccctttttctttttcaaaaataattcattattgcgtcataattcaattaaaatccatataagtgttttaattcgatttaatctttaaaaattcataactaattcatcgtagctcggatttagttggttcaagtctctaaatttttctaaaattgagatctacatgttaaaaatatccacatgtactgttcatgcttgtttatgtgctgttttggtttttttttgctcttttctatttagattccgacgtttccggagagtccgttttcgcaggagaagaatttgaagagttccaaggccagcaaggcaagtcacacagatcccaaacaaccctttgagcatgttgatcccgtttaaagctattgtttctattcaactattgcatttattttcgaatgtcattgggtggaattaacctattgtttgttatagcccttttgttcttgattactttattcctagataccttgggttattataatttgactagttgggctttatatattggttcagctagatattaggtgtgattgcttagccatgcttagaaacattagcacactattgggataacttatgattcattattatttaatgatggcttaatgatagttcacgatggtcaatcgtgattggctaattaattacttgccaactaaaacctgataatggtgggttgtgaacacatggttttgagagtcgtgctcatggcaattaaggaccggttcacgagtttcggttgtgaaacattaaccgtgccaaccacaagccagcgtgggcaacggctttaccttttgtatagcgtggttcattgcagagcaccagactgagaagtggcggagataagcccacaggggtcgctggggagtccatgccttgtttataagggggtgattatgatccaggaaaggtgcgctgtagtggattgtgttgtgcgaggggtattgtcacagctcctttccgaggtaccgtggtggtattgaggcacatggtgacatgatgtggggctgtgtcttgtgggtacagtggtacacctctgatcagagtaaaactattcgaatagccgtgcccgcggttatgggtgggtctaacaatgtctttcgtgattagtttcacacctctcatcataataacagatgctataattggtaataatttgattagctcctggtttggaatagtatattcctggtttgaagatagaactgtgcagccgggatggttgttcagaatggttgggcccatgcaacagggtatgttgtgtagcgttggattaatactgtttaattaatacttaactgttttattaaattctgaaatgtttattaaatgttgtttatgcaaatgaaaccctactatgccatcctttgttatcttgtgcgcttgcatatttgctgcgtggcttgctgagtatgtcatatactcacgttgcaatcattcatcagaggaagagttctacagtgaagctgatggtgtggaggattaggtgtaggcctggtcaagctgcctgtggagtggagtcgtctgcgccgtttatcttattttccgctgcttagatctttattgattgagaggaactatctacctctataatgacattttattcgcttattaattagagtaataattgtactatattatcaatttgttattgtgtgcctcggctgattcctgtacgagggttcacacacatgtaagcgtttggaattttggatagaaattccgggcgtgacaccccgggacaggtaggcaggactgagcccctagcagcaggacaccggccctgtgccatcacatctcgactaccgggccgcagctcgtgtagccttcatttgccctagagatgtccatcgacccccgactttgtccatctccatccgtgtacttttgtttataaccagactgagccacaaactaagccttacccactagacatgtggaagtatggtagtactttgcaacagaggcccgaagaccggtccttatatgaccgaggtgctactatcaaaaccatgcaccccgagcccagcctaaaaccattttgagggttttgaatagagggggaggtgtgaatccaattccacaataatccaaccattccatagtgtctaggtgatatgaatattcccaaagtctagagttgtaaaaccacctaatgttacctaattaagcggcgaagcatctacctaaattcatactagtggtaccatgagtagagtgtccactagttggggttttgtttattctagggtgaacaaggtaataataacaataacaataataaggtcataacaaaggtaaataggcatggctagataaaacagtgacaacgcgggaatttaaataaagcgataatgcaataatttaaatcaaaataattttataaactaggattcaatatgttcaaggatgatgtgacttgccttgctcgctttcccaaacatcggcttcaacctccatgaagagaggatcttccgaagctgcagcgtctacacgaccaacggaaaataaaagggcttttactctaataaactccatataacaagcaggaacaaagcacaaaaatgggttcttgacttcttaaggaaaaattagagacttgaacagtccaattccgagttcaaatggccaagttatggccatttgaagtttatatactcttaaaataaatatttgcgaatttcttcatttaaattttaatttaaaaagggtttatcgcgtcagccgaggggagggggcgcgcggaccgggtccatgggagtggggcccacgtggcagcctcacggtccacggtggaccgggtgcacccgggctcacaccggccggtgccgtgggccccacacgtcagccgcacccgagggcgcgggcggctgacggccaggccccacacggcagccactcggcgcgcccgagggcggccatgccggcgcggtcggcgagaggcggcacgcccgcgccactatggtcgccggcggcggccatagacgcggcggagcagcggccgagagagcggaggaaaaggggaaaggaggcgacggtccacggctcaccccggggcgacggcggcgacggaggaggcggccgaagcggagggaggcggcggcgtggctcgggtcagtggggacggcggcactccggcggtcggcgaccgaaacggagaggtggacgaggtcggcgaggatgtggtgaagccgaagtaggcggcgccgaggtgggaggcggtccggggcgatgacggcggcggaccggagctcggcggcgacggtggagagagagagtgacggcgtgagctcgattccagcgatgagaaggcgcgacaaagggtagaaacatgcgaaggaagtgcggggagggtttaaatagggttggaagggggagagagcggccggaggggcaggaaactggcgcgggaggtccggccgccatcaatggcgccggcgagatttgcaggggcaaatccgcccatttgaacgcgagagagagtgggaaaaatggggggaaagggagaggggatcacggggagtatttccccccactttgttgcacgcggggacggcgggatgcggcggattaggcggcagcggcggcgcttggcgcgggcggggcggcgggagcggtgggaggacggggatgacggatgggccccacacgtcagcgagggtggcgggtgggcccgcccgtcagcggcgcgcgcgcggggagggaggccgaatgagccgcgggggagaggagagagagagaggtggggggagagggagatgggccggaccgtcccatggaagggaagggggacttttagggtttttcttttttttaaaactttttcaactttgtttatttcttcttaattattatttgtgctctgaaaattccactaaaatttatttacacattttaggcttttaggaaatatacaaaaatcctccaagccttatttgacttttactttgcacattttaatttttggaggctttcacacatggattttaattattctaggcataatttaaaggatatattttagggtcgttttgggacgtgacactatccttcctcctcgtcgatgtctcctccggcagcccctaacgccgtgcccgtgcgccagccgacgtcgccgtctcctccggcatcaccgcggcaaggttgccctcgccctcgcctccccttcggctgaaccccgccgatgttcgtcgtcgtcgtcgtcgtcctctcatcgttcccggttgtagtggcgttcgttccgccgtcaagccgtatccgttcgtcgcctgcgtttcgtcaaggttgctacggccccgtcgtcatcttcgtccatgcctccgcgtcgtcaagcgttgcgccggtcgtgtctcgccttcgtccaaagatcaccggcgcaatgtcattcgttcgtctccgtcgttcccgtctgactccgccacgcccgttcgtcgtcgtcgttcccacgcctcatcgcgtggtggtaagggcctgaaagtgcatctaggcccttaatgattttgatgattgattacaatgcgattagagaggactaacacttttattcaagcaaatgtgaaggttgttatgtcctcgacatgttgtaatgagatgcataccccatgaatgcgacatcacgatgcaatgcggcaatgatcaaatagtatattgtaccttttaccttacattgtgtcgtaggaatgtcgtactattaagagggataccacatgcatattattggtaaaatactagtgctcaaaatgcttcatctttgtgtgagttgaaaaacctaagtcaaaattttaatcacgagttgtttcacttgtcacaacacttacaccgggtttctttgcaagtttttcaaaatctcttgaaggttttggaccatgttttatgttgggtttgatagcccacgaaactagctttccatagagtccaagatcttcgaaatcggagttcagagtaaaaagttattgcagttttacttgagcaacatcataatatccgatttgaaatcagactatccgatgtatcggactatccgatttttcatataacttcactctctgtcttgatttgaaaaaatcctatcgagtgagtttttctatgtatcggagtatccaatgtcggatcagatagtccgatgatacagagactccgaaatttcatagaactcgagtctctgtatgaggacgaagtttttgcttctaaaatatcagatactccgatttaacatcagatagttcgatgtctcggaaagtccgaaatttcatggaacttcgttctctatttctcgttgccttggaggtttaaaatatcggactatccgatcttgtatcggactatccgacgtgggctgaaagattcccctcacacggccacatttttggggggtctataaataccccccacctaacccttttctagggttacccaactcatttcattctcattcactttgggttgagcttggtactaaggtgctttggatctttgagctctctctccctctctcaaatccctccttgttctttgtgtggtggatcttggtggttgtggatttggtgtttgagggcctagtgtgtgtttcactcgatcttgagcgctaaggtttgaccaagagttgtgtggtgtttgttactcttggaggttgagaactcctagatggctaggtgtcactcccgagccaccgatctacgtgtggttggctgggagaagtttgtgaaggccggatctcgcctccgcaaggaaagagataccccttagtggaaggaagagtgcttagtgcaacctcttgaggaaagggttagcaaagactcggctcttagtgagctcctcaacggagagtagaatcccctcaaggatttgaactccggggacaacttcgtgaacttcatcattggtgatctcccttcatcctccttttagctttgcttaattgtgccgctatagatctagtcgttgtttgtgctttactcttgtttgtgtgatatatctacttgttgtgcttcattggtggatcagacagtctaatccaacatcagactatctgatattttcggatagtctgactgtggatcagactttccgaccttatttcagttttagcttccgcataaagttttaaattagcctattcacccccctttaggcctaattgaccctttcaattggtatcagagcctaatctcctaattaggcttaaccgcttggagagatcatgtcgggtcaaacggggaatggcaaggatggtgataagggagctacgtttccttatgactatccctccacatctgcatcttatgtgagcacctatagcggcaaagctccgtacttcaatggtacggactatgccgcttggaaacataagatgaagatgcatttgaaatctattaaccctttgatttggagaatagtcgaaaaaggctatgttttgcagaatcccgtggaacccaccaaggaggacgacaagaacgagcacaagaacgctcaagccgctaatgcaattcttagcgccttgagtggaagtgatttcaaccgtgtggacggcattgagagtgccaaagtgatttgggacacgcttcggagtttgcatgaagttacggatagtgttagcgagttcaaggtggagattctcaaggggcagtttgagcggtttgtgatgttggatggtgagagcccaagcgacatgtatgatcgattaagcaagatcgttaatgagatcaaggtacttggctctaaggacatgaccaatgaggttgtggtcaagaagatggttcgggcaatcactccaaggaactctaccttggtgaccatcattcgtgagcgtccggactacaagactctcacacctcatgacttgctcgggcgtatccttgcccatgacatgcttgagcaagagtccaaggaggtcatccaatacatcaaccaaacctcaaccacaagcattaagaaggaagacttggcattgaaggcgaaggaagaagaagaagagagtcgcaagagcaagagcaagagcaaggcggagatcgatgatgaagagatggctctcttcgtcaagaagttcgacaagttcatgaagcaaagcggcttcttcaaggaaagttcgtccaagtattcctccaacaagtcaagtggaagacactccgcaagggtgtgctatgtgtgcaaagagcccgagcacttcattgacgattgcccccacatcaaggattgcccccacttcaaggaagacaagaagaagcttgagaagaacgagaagcacaagcatagcaagcatgatcgctatggccaagctcaccttggggtgatcttcggctccgacttcgagtcaagctcaagtgatgaagaaggagttgccacattcgccgtcaagccttcatcaccaccgagactcttcaactactcaagtgatgaggatgctcccatttgcctcatggcaaaggagcctaaggtaccctctcccctcaagtcatttaatgttgatcttgttagtgatgaggaggaagatgttgaggatgaggttatggatgacgagttgttcaaatccatagccaaggaatccataccacacttgagtgagttgcttgggagaattgagaatcaatatgcaaaccttgagaggcaagaggaattgctcattcgtgagaaagagcggtctcatgaactcaagagtgaacttgctaaggagagagagaaaaatgaggctttggtacggctttacaagcaaaccaaagagtctcatactaatcttgaggtggcgaacgctcaacttcaagagagagtggatggcttggacaaagcttacctctctcttgaagagaagttcgaaaccttaaagaatagtgtctctctccctagcgaggcatcgtgctccaaaattgtcccaagcaacgaaccatgtgtgaggtgcaaagatattgatattgaagcttgtagtactaactctacttctttgagtgctttacaaaagcaaaatgagaagcttatgggactccttcataatggcctacttaagtgccatatgggtagtaaggcgctaaaggagtacctaggctatcaaagggacaacttcaaccatgaaggtcttgggtatgtttctccacctaaaggaaaggtggacaagagtgtgatgatcaagaatccccaaggtcttagcaactttgttaaggccaaatgtatccttcctaatgattatgcttctcattgttcttttgatacatcttatgttcttaggaaaaatgctaatggtcgtgctgttgctaagtatgttggcccaaggggcaaaaatatttctatcaagagagtgctttgggtgcctaaggcacttgttattaacatgagaggacccaagcaagtatgggtacctaaaactagaaattgatctcttgtagtaatatctctccgatggaagaagttgggtgattgatagtggatgcacaaatcacatgaccggagaaaaatcaatgttttcttcccttgatccaaatggctcttcgcaagagaacataatcttcgggggacgatggaaagggaaaagtaatgggattgagtaagattgcaatctccaatgatctttccatctccaacgtcctcttggtaaaatctctaaactacaatctgttgtccgtttctcaattatgttccatgagctacaattgtctttttaccgatgttgatgtgaccgtatttagaagggatgactcatccgtagtctttaagggtgttctcgagggcaagctttatcttgtggattttttctcaactaaagccaaacatgagacatgcttagtggctaagtccaacatgaggtggctttggcatcggaggctaacccatgtcggtatgaggaatcttcacaagcttctaaagcacgatcacatccttggactaacaaatgttcaatttgagaaagatagggtgtgtagtgcatgtcaagccgggaaacaaattggagcacatcaccccgtcaagaacgtaatgattactacaagaccgttggagcttcttcacatggacctcttcgggccaattgcttatctaagcattggaggtgacaaatatggtcttgttattgttgatgacttttcacgtttcacgtgggtgttcttcttgcatgacaagagtgagacacaagccatcttcaagaagtttgaaagaagagcccaaaacgagttcgacctcaagatcaagaacattcgaagcgacaacggcaaggagttcaagaacacgtgcatcgagagtttccttgatgaagaaggcatcaagcattagttctcggctccatactcaccttaacaaaatggagtagccgagaggaagaatcggactctcatcgagatggtgaggacaatgttggacgaatacaagacatcggaccgcttttgggccgaagccgtcaacaccacatgtcacgccatcaaccacctctatcttcaccgccttcttaagaagactccctatgagcttcttaccggtaacaaaccaaatgtctcttactttcgtgttttcggtagtaagtgctacattcttaataagaaggctagatcctcaaagtttgctcctaaagtggatgaggggttcttgcttgggtataggtcaaatgagtgcgcataccgtgttttcaacaaaacctccggtattgttgagatcgcgcgtgatgtgacatttgatgaaattaacggctctcaagtagagcaagttgactcacatgtgttaggtg

SEQ ID NO: 19170 - DNA, 7927 bp, Oryza sativa
tgaccaagcgttttgagatgtccatgatgggtgaattgaagttcttcctcggccttcaaatcaagcaactcaaggaaggaactttcatttgccaaacaaagtatttaaaggacatgctcaagaagtttggaatggagaatgcgaagccaatccacactcccatgccatcaaatggccacctcgacctcaacgagcaaggtaaagacgtcgaccaaaaggtataccgttccatcattggctcactcctttacctttgtgcatctaggcccgatattatgcttagtgtgtgcatgtgtgcaagatttcaagccgctctgaaggagtgtcaccttgtggccatgaagagaattcttagatatgtgcacacacctaatcttggtctttggtatcctaagggagcgagttttgatctcattggttatgccgatgcggattatgccgggtgcaaagtggataggaaaagcacattgggtacttgctaattcttgggtagatcccttgtttcttggtcttccaagaagcaaaaatccgtcgccctatccaccgccgaagcagaatacatttcggcggggaattgttgtgctcaacttctttggataaagcaaaccttaagagactatggcctcaatgtgtccaaaatcccactcctatgtgacaatgagagcgccattaagatagccaataatcccgtccaacattcccgaaccaaacatatagatattcgccaccatttcttgagagaccattccacaagaggcaacatagacatccaacatgtgagaaccgacaaacaattggcggatatcttcaccaagccactagatgaagctaggttttgtgagttgagaagtgaactaaatatcttggattctcggaatgtggcttgatcttttgcatgcatttgtttttatttcctagtataagttgctttccaccttgtgataaattaaacattcaattcatggatgtacactagtcacacttttgtggatattttgaatctatgtgtatggggatctcatttttcaatgaattttggtccttgcacaatttgcaatagattcgtacattccctctttgagggtgaatcatcatgtctcatgataattcactctcatttgatctttggatcatccatttgacttgtggctattgttttgtgtggttgattgtgtactagccattaactaaaatggggcctaaatgttcgactattcctttctctccaacttccatcaaaattttgtgaaaaattgaatctcttcaaattcccggtgcgattcccttaaaaaaattcatttccaaaagtttgcaaaatattttcatcaatattccggcgaaaatcttccctttttggtgcttagatgccaaagggggagaagatctatccttttattatggtcgaacatgagtggtttttatttgtatgagacatgtgtgtttcttaaattagtttaatgctttgtaagacattattgtttaattatgaatgcttgggatgtaatggataatattgtgattgtgatgagcaaaatgtgatatatttattttctcgtgagcttcaatgtggatgcaaagatttagggggagatctctacttgctttaatgcacacttttaggggggcttttactaaatctttgcaccaaaatcatctattatattcattctctcttgtgatctaatcgtattgtcatcaatcaccaaaaagggagagattgaaagtgcatctaggcccttagtgatcgtcaaggttgctacggccccgtcgtcatcttcgtccatgcctccgcgtcgtcaagcgttgcgccggtcgtgtctcgccttcgtccaaagatcaccggcgcaatgtcattcgttcgtctctgtcgttcccgtctgactccgccacgcccgttcgtcgtcgtcgttcccacgcctcatcgcgtggtggtaagggcctgaaagtgcatctaggcccttaatgattttgatgattgattacaatgcgattagagaggactaacacttttattcaagcaaatgtgaaggttgttatgtcctcgacatgttgtaatgagatgcataccacatgaatgcgacatcacgatgcaatgcggcaatgatcagatggtatattgtatcttttaccttacattgtgtcataggaatgtcatactattaagagggataccacatgcatattattggtagaatacaagtgctcaaaatgcttcatctttgtgtgagttgaaaaacctaagtcaaaatttcaatcccgaattgtttcacttgtcacaacacttacaccgggtttctttgcaagtttttcaacatctcttgaaggttttggaccatgttttatgttgggtttgatagcccacgaaactagctttccatagagtccaagatcttcgaaatcggagttcggagtaaaaagttattgcagttttacttgagcaacatcagaatatctgatttgaaatcggactatccgattttttacagaacttcactctctatcttgatttgaaaaaatcctatcgagtgagtttttctaagtatcggagtatccaatgtcggatcacatagtccgatgatacagagactccgaaatttcatagaacttgagtctctgtatgaggatgaagtttttgcttttaaaatatcagatactccgatttaacatcagatagttcgatgtcttggaaagtccaaaatttcatcgaacttcgttctctgtttctcgttgccttggaggtttaaaatatcggactatccgatcttgtatcggactatccgacgtgggctgaaagattcccctccaacggccacatttttgggggggtctataaatatgtcacaccctaaaaatcctaaatatataaattgttgtttaattggaattattagaatttattttaaaagcctagaagagaagatctagttttaattaataaattccaatataaaatggggccagataaaatttcatttaatactttgcttaattctttaattcctagatttttctgggatttatttgaggtaaggaagtatttttaataaatggaattgcatttcatgaataatttaaattggaaaaggttttaaaagttctcttttggctttgggccgaaagtcggcccaaaaccttctctctcactctccccggcccaagccggcccagtccgcccgcagcagccgcgtgcgagcgccctcggacgctgacaggtggggcccgcctgtcaggtcgttgtctacctccggctgcccgccgcccgagccctagcgtcgcgccgccgccatctccatccaaatccggccgcccctttccgtttccgatgaaattaatagaggggaaattatccccgggatcccctctatcttttctcttatggaatcatcggctaatttcgtttggaaatccatggattcgatctcgaatcggattcgtctctctccccgaaccctagaccttccttcgcgtcgccggtcgccgtgggcctccgacgccgcctcctagccgctattaattgacccccaagcccgccgctacccgccgccaccctcgcctttgcccgctgccgtctgtagcgccctagcaccgtgcagccgtgcgccgccgtcgctccggtcgtcgttgctgctcggggaggtcaccgtcgtggtcaccaagtcgtcgccgtaggtcgccggagcatcgccgtaggtcgcagatctcgtccacccctccgtcgtcgccgtccgttgatcttccgccgctgttttggtcaccggtgagttcgccacgtcgccctctacgtgttggtgtcctccgttcgcgtcgtcgcgccattgtccgccggcgagcttgcgcgcccgagccgccgccagtgatgacgtcatcgccgacgtcatcgttgccgtccgtcgtagaccggtcgtagaccgttagatcttggtcgtccgttgtggataggatcgatctcgaccgttcgtttccgtgagccgccgccgtgcacccggtccatcgcgaaccctagccgctgacgcaataattcccttttccttttcaaaaataattcattattgcgtcataattcaattaaaacccatataagtgttttaatccaatttaatctttaaaaattcataactaattcatcttagctcggatttagttggttcaagtctctaaatttttctaaaattgagatctacatgttaaaaatatccacatgtactgttcatgcctgtttatgtgctgttttggtgattttgctcctttctgtctagattccgacgtttccggagagtccgtttttgcaggaaaaaaatttgaagagttccaaggccagcaaggcaagtcacacagatcccatttaaagctattgtttctattcaactattgcatttattttcgaatgccatttggtggaattaacctattgtttgttatagcccttttgttcttgattactttattccttgataccttgggttactataacttgactagttgagctttatatattggttcagctagatatcagatatgattgcttagccatgcttagaaacattagcacactattgggataacttataattcactattatttaatgatggcttaatgatagttcacgatggtcaatcgtgattggttaattaattaaattgccaactaaaacttgataatggtgggttgtgagcacatggttttgatagtcgtgcccatgacaattaaggaccggttcacgattttcggatgtgaaacattaaccgtgccaaccacaagccagcgtgggcaacggctttaccttttgtatagcatggttcattgcggagcaccagactgagaagtggcggagataagcccatgggggttgctggggagtccatgccttgtttataagggggtgattatgatccaggaatggtgcgctgtggtggattgtgttgtgcgaggggtactgtcacagctcctttctgaggtaccgtggtggtattgaggcgcatggtgacatgttgtggggctgtgtcttgtgggtacagtggtacatctctggccagagtaaaactattcgaatagccgtgcccgcggttatgggcgggtctaacaatgtctttcatgattagtctcacacttctcatcataataaaagatgctataactggtaataatttgattagctcctggtttggaatggttaattcctggtttggagatagaactgtgcagccgggatggttgttcagaatggttgggcctatgcaacagggtatgttgtatagcgttggattaatattgtataattattacttaactgttttattaaattctgaaatgtttattaaatgctgtttatgcaaatgaaacccaactatgccatcctttgttattctgtgcacttgcatttttgctgcgtggcttgctgagtatgtcatatactcaccttgcaatgattcatcagaggaggagttctacaatgatgctgatggtgtagaggattaggtgtagccctggtcaagctgcctgtggagtggagtcgtctgcgccgtttatcttatttttccgctgcttagatctttattgattgagaggaactatctacctctgtaatgacattttatttgcttattaattagagtaataattgtactctattatcaatttgttattgtgtgtctcggctgattcctggacgagggttcacacacatgtaagcgtttggaattttggatagaaattccgggcgtgacaagttggtatcagagcctccttgaccctaggttatgccaaatggttacccatagaagccctctaaaaatattggaaaagtagaactgttctcctccccttctcttttaattaaaccaaactaatggcacatgcacttcataatctcttttaatggtcctcattcaaaatttattccagtgttattagtactgtacatctattactgtactaatggctcattttaccagcaaaagttttacaatattgttttatttaatcttgctgcaagaaaataaatttagcatgttgattttataactttcttttatctctgttggaacctgttgttcaaaagtacaaaatttgtgaccttatttccaactgtttcaacttatcttgcaagcttggtttactttatttacttaccttttactttgattttctaactttattcaaattaatccaaaaacttgtgctattaattggataaatgtcttaactccctcctttcacttgtctttagatgccgcgctacaagcctgagtacttgtttggtgttgagggatttgtccaggagttgcgtacgatgtcctttgccacaggatttgggactgcccctttttatgcctagattcctcatgatcgtcatgaagagaagtgccgagtcaaagtcactttgaacagtaatagtgaagatatcccctcagtgatgttcgaagctggaggaagaaactacatccatgcatgtcaggaggtagcaaggatcgccataggcgagctccgcgatcgctacagtgatcagttggccgacactgagtatcgctaccattctcgtcaaccccagggaagtgaccgtggcagctaccttgagactgagggaattgagaatgatgctaccacaaggcatttggttgagatgctgtgggctatggatgaaacccgtgcagagactgtgttagcagctcaagatcgtgaagatcggaatcgaggtaagatttgcaagctagaggacaaagtggatcgattggagaaggaactagccgcgttgaagggagaagcaccaccgcagaaggccaggatttgtcttaccgcaaggaagagagctctatttgtccctcgctatcaattggcaccaaaggtccgtgtggtggaaaaagaagttaccccagccctagcggatcctccggtcgtcaacgtaagtgatgatgaagaagaagaatcgaagcgcacccattccaagattgagtggggagcaacttaagatgatgaagacgagccgaacgagccttcaatcaactccgatgctcggaagaactagaatgccttgtcaagccgttgtcttagatcgttgtattagtttgcttgttttaagtttggttgtgtgtgtctcgcatgtgattacatcagtgatgggatgtaagtgcatgcgtttgtttgctttcgagtgttaggtagttggtgagcttagtggtgtgagagtcttcagtttgtaataatgaaactcacttaagaccaataaaagtcaaattaattctctgtcctaagtagtttcccccggtttctcttcttgtgccctgtccatgccagatggtggtcactcgcagcaacgggaatggccccaacaacaacaataacaacaacaacaatggagagaatcccacacttgcccaagtcctggctcaacaggcacagcttatgaacatgatgatgcagcaactccagaaccagcagaaccagggaaataaccatgcacctccccagaacaagttagcagaatttcttcgtgtgaggccgcctactttctctagtaccactaatcctgttgaagctggcgattggctgcatgccatagagaagaagttggatttgcttcagtgcactgatcaggagaaggtctcatttgcatcacaccagttgcatggccctgcctctgaatggtgggatcacttccgcctgaataggactactgctgaacctatcacttggcttgagttcaccgctgctttccggaagatgcatataccatcgggagtggtgtctctcaagaagaaggaatttaggtcgctcacccagggatcccgctctgttacggagtatctacacgagttcaatcgtctggctcgttatgctccggaagatgtgcgcactgatgaagagcaccaggagaagttcttggaaagacttaatgatgagctttcttacccactcatgactggggattat

SEQ ID NO: 19171 - DNA, 1613 bp, Oryza sativa
aattgaccctttcagggcccctccccccgctgccccgtcctcgtcctttcggagtcgccccgtgcctgttgtgcggttgtcaatcccggtacccgtgtaccggtgtcgatagttgttcgtgtgtgcatgtggtgaccgtgtttgtgtgcccacacggtagccacgtggtttccacgtgtgtagcccgcgtggtgtctagtggagtccgtttgtcggccactcgcctcggttgacataaggggtctgcttccgtcgacccgtggaccgtctctgtgtactcggtccaccgtggtcctttaggttgacatgtggggtccgcatgtcaacagcgtagccttcctgtcttttccaggctagcgctcacacatgttttatagttgcaaagcctaattataataatccgtaattctccatgtaacagcattaaacttcggatgatcatatcttggtcatacgaactgcgaatcgacccgttcaagtctcttaatgtttgttataacctaaagaaccctgtgctttctttttatgtattgttattgcttctttataggcttgtagctttgcttgtgtgcttcgcgtagcttctgtcattctgaggttcccgaagcatggttcgcggtcgtctccgaaggttcggaaggccattctctctgagcaaggcaagtcacatcatccttgagcatattgaatcccaatttataaaattattttgatttaaattattgcattaccgctttatttaaattcccgcgttatcactgttttgtttagcacttgctattaatccttgttatagccttatcattgctattgtttattactaccttattcaccctaggaaaataaaaccccaactagtgggtactctattaatggttccactagtatgaatttaggtatatgcttcgctgattaattaggcaacattaggtggttttataattttagactttgggagctctcatgtcatttggacattatggaatggttggctataacgtcctgaaaattaccgacaataaaaatcactaaaattttgaactttttaaaacttttgcatcatgctggatgttatgattgttattgctcgccaaactataaaattgtcacaatggaaaaattaaactaaatatatatacatctaagtaataatcacaataatacattatttattattaaccacataaatatttatgcacatgatagcaagccaaataaaacacaagtcaattattaatttctataatgtaaattacaaattgtatgttaaatacttgaaccatatcgacaagtgtcatgacatctaagtaattaggaaatagtcaccactacaacgaccctatatataaaggagtgttccactagaataattaaattaatatttataacttttatcgagtccctcatggaataacattgactcacataagataattggtcatgaaaacgaataaagctttatatataaaatacatttatgtgagtgtttaattaagcatttagaccaatattgtaccaagcctcaatttacttttatgacataatagattgaacatgtccatgtaaaatacattgttatacaaataaactcgaccaatgtgctatggtattat

SEQ ID NO: 19172 - DNA, 8143 bp, Oryza sativa
ctctgctgtcgcccatgtgcgtgcgtcccgtcgcccccattcgcgcccaatggataaaacggagcctcctgccacagctagagctagaacgcacagactttaggctttaggtacgatgatggagccaggaaaccttaattgagaaggaaatcaagctttatcccgtcatccacctcattgttcttacccaatcgccattagggctctagctcgtccaggcatgtgttggcaatcttatccccaacgtttccttacacgctaagctaagcccccaacaaaatccccatccctctctgccttttcctccaatacatttcgtcgaacaccttgggcgcgtgctgcagcttcttccctgctccaccaccgcgacatcgaacttcgtcgttcctccttccctcggtaattcctcgctcctgtgactcctcctagtcccctagggattaaatcccccatcaatttcgttgattaggtccatagcagtgccaagccgagctccaaagctccacccatggaggtcaccgtggacatgctatcccgggggctctcccttctattttactggaaaaacggaaccctcatgcgccatagatgctcactctctcaccaatttggtcgcaaaccatcccgttcgccgtagctgcttgcagccgagcttggccatggcgttgccgtgccgcaacgctcgcccctgcccctccttgcaccgccgctgccggtggagggccgctagagctcctccgcaaaccccctgtccaccgccgtgccggcctcgcgccgtaccggctgcgctcggccgagcccagccgtgccctgggtgctgcctcccgttcggctggaggtagaagaagggtaggagagagaaacagaaagagagcagccggacccacttgtcattagctccatcctatttccctttagaaaattaatcctgtgaaaaagaaaatcaaagcattgaccccatatgtcatcagctgttagggataaggatatattttggaataaacataaatgaattaggaacagtagcttttcgtaatttctcggattaattcgaaattgaatctttaaactagtataacttgctcattttaactcggatttgagtgaaacttgaacctaaattcatataaattcataatctttccaatggtatataattcactaattaataaaatatatttataattataaaataattaataccaagaaattagatactagttaacttaaaaatgtgctaacaaataaaactaatattttacagtaaagtagatgtaagaatatttgtctccaacatgtcttgtcactgtaacaaatacacaaactaatttaaatgatgtctcatattaatgtatatattaatgtataggaagatagtactatttaatggttgtataattaaacccatgacttacgaattatttacataaattttagcctcatatttagtaactaaaatataaacacataaagatgaatcattaacttgtttaggagaataataacagagctagatgtgaaggaatcaccaaataatttaatcaatgcaataccatatagaatagcatgtatagacctaaattggttaccacttattagtaacccaacagaaccagtgcttaaacttgccccatcacatatataatatcactcatagaaactagctaatgtataatttaactacaatatattcaggaatcacttggggcattgggtagtacactttctaaatggctcatgtacagtaggcgaccaaaaccatatatgttgttgcacacacatataatgtacattccattataactatactattgatttaccttttccatacattaaactggggagtatatgacaaacatgtatattagataaacactaattataaatttcgacctcctgtaattgatcgttacgggaccacaactacaaataatctgtacctataacctcacagatctaacatacaaagcatggataattattaacccttttataatttataatgacaagtaaaatatgatcataattaaaataatgcctcattggaaaaatgataatataaattaatcgatgtaattatttgtttgaccctaaatccatccaacaacagaacctttagtataagaccatttatagatgtatgcgtagtcgtataaccctcccataaccctgtagcttgactaaaccacatattagctgtatgtacctcattcatattatactggttagctcccaaatgaactgccatgacaatagaatgattaagaaatcttagccctagcatgattggaatccattagcaagcacgaataatatgaacaaccctaggttcgacaccatcattatattttgcttgtgcacatttgattgttgtttgaatattggtttttatcgcgtattacagaatttgtatatcggttagtcgtgaggcaacgtatgcagcttccaggaggtgaaggttgatcaagattatatcaagaataagaattatcctgagcaggcaagtcatcaccccatcccttgagcatgttggtcctaattgtgaaactgttttgtttacaaataaaattgcatgcagtgatgcatatcctacttattattatgccatgcctttgattattgcttatctcattattcccttggacccataattacgtatgagtccctagtcacttatgacaaatgcttagtaatgctaatttaggttcatgcattctcatatttatcaaatgctttatgcttaggcaactaccttggggaaggtagttgagacatgagcgccacattgccatgacattgatgagataatttgtgaaagaaagttaaaactaaagaaatgttttcgactgggatggctggaggacttaggtggtgtccggtaaaggctagtgctgtccctggtcagttaaggaccgagccatgaagttaagcatgaaacgacccccgtacaaccgtacttctcgtgtgggtatagacctagcggagtaaatagccgagcggaggtggtacccaagccgtagtggttttcttgttgtgtgtgaggtagggcctacggtggggcagccattggtaggaccgcatggggcgggtgcctacagtggtgtcgccatcggtaggactgccatgtgcaaacctaaacttaactataacttaatgaatgtgtgagtctttccccctcgggagcaccagaactcctctcactgctagaaaccttggacacctagagtgcatgaggactaaagttcatggagcgggtactgccaatgtgaggttattgaaaggctttgccgtggcaagtctcattcgttgagatgtaggctcatgtgttgggcaagtcgcggagtacgggtaaagtgtacatccactgcagtgtgagtaaaccaaatctattcaaatagctgtgctcacggatattgagcaccgtgacatgtattacacttggctagactctgaattcttgaaatgatgggtgggatgttgcatgatgattttgtactggtggaacaacttctcgagaggcgagaaggggtagaccccagaaaaccatgacgaccagtggcgggaagctatccttgggaacacaatggatggtggatagaaccgtcgctgtttaatgaacaatggaactaaaacttgaacagtttatgctaggtcttaggtttgtgaaatgatatttgaaaactcagctttacgcaaagtaaccatagccactctttgtaatacccttacattactgcattttgtgtggtggcttgctgagtacttttgtactcattgttgctctatatatatcttttagcagagtgttgaagagaagcccttgttagtatgcttgcgtacctagcaagatgatcggagtgcggttccattctaggtctcgttccccagtcgactgcttgtggcatgtcaactgtcacgtcctgataaattcatcccgaaataaaaatcattttctaaaaggaataatagaattaattaaaattcgaaaagaaattggcaaacactaaaatgcgtacaagaaaaatttgaatgtggcccggagaatttttgttaaattctccttggtctaaaaggagccctcaaattttacttgaattttcagagcatcggaaataattattaagcaacaaaaacaattatcagagtttattaaaaagaaaaagctaaaaataatcctccttttcttttgggccaagtttggcccaaagttccccccctctctctctcccggcccgcggccaaagtctccctctcctccctctctttttccttccctctctctcttgggccagcccggcccatctccctcccctctccctcctctccccgcggcccactcggcctctccccgcgcgcgcgccgctgacgggcgggcccacccgccaccctcgctgacgggtggggcccacctgtcatccctgtcctcccgccgctcccgccgcctcgcccgtgccctaacgccgccgccgccgcgaatcccgccgcctcccgccgtccacacgcgcaataaagtggggggaaatattccccgtgattccctccctctttccccccatttttccctccctctctccctcggattcgtttggaaacctctcccctaacctcgccggcgccatcaatggcggccggatcttccgcgcccgtttcctcctcgtccggccgctctctcccccttccaaccctatataaaccctccccgcacctcctccgttcgtttccgcctctcgccgctctctctccccgccggaatcgagctcgcgccgtcgctctctctctccgccgtcgccgccgagctccggtccgccgccgttgccgccgagctccggtccgccgccgtcgtcgccccggaccaccttccccctcggcgccgcctccttcggcttcgccgcgtcctcggtgacctcgtccacccctccgtttcactcgccgaccgccggaacgccgccgtccccgtcgacccgagccgcgccgccgccttcctccgctccggctgcctttccgtcgtcgccgtcgacctagggtgagccgtggaccgccgcttcttttcccccttccctccccctctctcggcagccgctccgccgtgcctatggccgccgccggcgaccataggggcgtgggcgcgccgcctcctgccgctgcgccggcgtggtcgccttcgggcgcaccgagcggctgccgcgtggggcccggctatcagccgcccgcgcccttaggtgcggctgacgcgtgggacccacggtgccggccggtgtgagcccgggtgcgcccggtccaccgtgggccgtggggctgccgcgtgggccccacccccgtggacccggtccgcgcgcccctcccctcggctgacgcaataaatccatttttttaaattaaaatttaaatgaagaaattcgcaaatattcatttaaatagcatataaccttcaaatggccataacttggccatttgaactcggaattggaccgttcaagtctctaatttttccttaagaagtcaagaacccatttttgtgctttgttcctgcttgttatatggagtttattagagtaaagccttttcttttccgttggtcgtgtagacgctgcagcttcggaagatccactcttcgtggaggttgaagccgacgtttgggaaagcgagcaaggcaagtcacatcatccttgaacatattgaatcctagtttataaaattattttgatttaaattattgcattatcgctttatttaaattcccgcgttatcactgttttatttagccatgcctatttacctttgttatgaccttgttattattgctattgttattattaccttgttattattaccttgttcaccctaggataaacaaaaccccaactagtgggtaccctattcatggttccactagtatgaatttacgtagatgcttcgctgattaataggacaacattaggtggtttttatagctttagactttgggaattctcacatcatttggacactatggaatggttggcttatggtggaattggacatacccctctcttcctctttcaaaacccctaaaacctgttttccggtggggtttgggtgcatgccagttgtgggaagtagcaccccggccaatataaggattaagctcgggcctctgttgcaaagcactaccgtacttccacatgtctagtgggtaaggcttagtttgtggctcagtctggttataaacaaaagtacacggatggagatggacgaagtcgggggtcgatggacatctctaggacaaatgaaggctacacgagctgcggcccggtagtcgagatgtcatggcacagggccggtgtcctgctgctaggggctcaatcctgcctacctgtcccggaggttccggccgtaggtggggttgggtcggtactcttgtctatggctaggatgggttggaaactatgtcacgtcttccgtccgtataccgtggtggtatgtggcacgtggttacacgtgaggaagatgtgtcttgtgggtaaagatgtacacctctgatcagagtataatctattcgaatagccgcgccctcggttatgggcaagccgagcaatgtacccaagtcagtgttttaattcttaaaatttgcttaacaactaaaatgtggaatggttggcctgggttggcttgggacgagctgggacccagggtcgggttgccagttcggtctgaatcatcgtaggccttgggttaaggcaggttcgtgagggttcacggccttgattaataacactgtgtaactctaggatcgtcttataaaatggctttgggcaactaagtgacttttaaatgctgttttctgcaaagcttaacccctatattattaccccttgtacccccttgcattaatcatgcatctgccggtgtggcttgctgagtactgtggttgtactcattcttgctcaatcttttccccccccttcagtaagagaagcttgggagaagaagtcttaggtggagtcctggcttataccccagttgagcgcctgtgaagatggagccgtaggcccgcaagtccgctgctgtttatttttgtttgtcaggcctgaggtgcctttgtaataatgtaaatattatcgatataataaagatgtgtcttttatatcatgtttgtgtggtgtaccccggcttttcctgggacggggattaatacactagcgttcgggaaaaggcaattttctagggcacgggcgaggcggcgggagcggcgggaggaaggggatgacgggtgggccccacccgtcagcgagggtggcgggcgggcccgcccgtcagcggcacgctcgcggggaggaggccgaatgggccgcggggaagaggagagagagggggagggatgggccgagccggcccaagagggggagggggaaaaaaggactttttaggatttttctttttataaaatcattttaactttgtttatttcttaataattattatttgtgctctgaaaattccactaaaatttgagggctctttttagaccaaggagaatttaacaaaaattctccgggccacatttgaatttttcttgtacgtattttagtgtttgccaatttcttttcgaattttaattaattctattattccttttagaaaatgatttttaatttcgggatgaatttatcaggacgtgacacaatggtctgtatatcatggagcagtttcatgactacaagatggctgacaaccgttctgtagtcgaacatgctcatgagatacaaaccatggctaaggaactcgaactccttaagtgtgtcttacccgacaaatttgtggccgagtgcattattgcaaaactacctccatcttggagaggtttcggtactgcactcaaacacaagagacaggaatactccgttgaggggttgatagcatctcttgatgttgaggagaaagctcgggaaaaagatgccgcgtctaagggcgatggtggacagtccactgccaatgttgtgcacaaggcccagaacaagagtaaggggaaatacaaagctcagcagaccaccaacttcaagaagaagaagaacaacaacaatcctaatcaggatgagaggacttgctttgtgtgtggtcaacctggtcatctggccaggaagtgtccacaacgcaaggggatgaa

SEQ ID NO: 19173 - DNA, 3362 bp, Oryza sativa
  unsure (1)..(3362): unsure at all n locations
attcgcatgacatggaataaatttttttgtgtatttaggtgacatggtagatgaatactaatatatgaggtccacatgtcaatcaaacaaagaagatagtgggacgtcccactacctccacctcaccctctctacctctatctcctcgatctctccgccggtgagccaaagtcagtggggaggttggcgagcggggtagggaggctggcaaggggggcggagaggcctccccatgtaaatccaagtcatcaccgtcatcgtcaaccgtggtcaaattggacggtggtgaagagcttgggagaagaattaataagtggagccatcagagtagtgtgtggccgtgggtttgcttcggatggcgacggccatgtccctccccgccagtggcgacgacgacgtcgtcaatgagaaaaaggaggaggggaaggggaaggccttctgctcctgccggtggcgggcgtgtgtagttgcgcggcaagcaactgcagtagttgcacaagatctttctccggtttgacctcgacggcgacgggagcctcaccaagctagagcttggcgtgcttctccgctcgctcaagctccttcgcttgctcagcctccgcctagccgccgaggatgagatccatgccctcctcgccatcatggagctcggcgcattccttcactcactcctcctccgcccggctgccagggatgagatcaatgccttcatgtcggcatggagttcggcgcgctcctccgcttactcggcccctgtctggcaaaggtacatgctgaaatataaagtaattgcccgtctttcctcatcaatttaaacttttgggttgaattggtcgacgcatgtaactcaatgggatatcannnnnnnnnnnnnnnnnnnnnnnnnnnnnnnnnnnnnnnnnnaaataaaaattgcagcccacttctaataccatcgagttcgacgtgggttccgtcgagtttgatcgacgtgctcgcctccatactcacagaactcatcgtcgggccttgctgccccatcatcaccctcgaccaggcggaggtcaccgaggccttcagggcctttgactgcaagggcaacggcttcatctctgccattgagctcacacgctccatagctgacacggcgacaccgacagcctcatcatccttttatttgactgtgggtcccatcacccactgacatgtgggtcatagtattttttttcttatttgtttaactgatatgtgggccccacatattttgttttaaatttgtagttttcaattttgctcgttttattttttcgggatcaaactactacgtaagcgctacattaatgccacgtgggacaaagtcctcgtcaatcaaaatcagggagcaagaaatctcgtttgactggttttgtaagttgagagacgggatgaaactggtttttcggttcatggaccaaaatcagactaggacaaatttctagggaccaatgtatcatggaacgaccagggtttcaaaaaccgccgggggcccggttaccgccacccggcggtacggcggttaccgcgcggtaaccgcggtaaccgccaaaaaccgcgacaaattcacttttgaaatttttgaaatcaaaaccgcggtatgagacgcggttaccgtgcggtttgccgcggtaaccgcgcggtttggcgcggttaccgcgcaatgttggggcaaatgaagaacaaaattaaaaaaaaattaaaaaaatagaagaaacacctaaaaatttatagaattttgggataataattaaaaaattttggcatgatattttctatattacggacttgaaatcaattgaacaatacatgtaggtataaaattaaaaattttggcatgatctttgctatattacggacttaaaatcaattgaacaattcataacataatatttcgacaacaacaatcaacaatctgaagatatcgcacaaggtgtccacatgttcacatgtcaagacgtccacaatatagagttcacaagtgaaatgaatacagtcgacaatatagagttcacaatatagtccacaatataacatccacaatatgatagttcatatgaaaagcaatatgcaaatagaagttttgttggacgatgaaaggaaatagagaaggacgtaccaacatagagccagctataagttccactgattatatgccatgttgtactcctctgtggacatgagcatcaatccatgcgactgtagcaaccctgccttgtattcctcccaactttgacctgtccatgatgctgttgtttgccattgagcatacaattgagcgtaccactggggctcttgccactcgtacacccatgtaggagggggataatcagaaggttggggacgattatacgcataccttggatagccactttcaatgctagaggcactgaatgagctgtagctatcctgtggtatgtcaagatgttgtcgttgttgttggtcactcggtgaaacggtagttcgttgagagcttggagcaccgtgatcacggtcctgagtcgcgtgagtgaagtcggcctcacctgcaaatgaaattgtaagaagaaaattaatcaatagtgaaatgcatggtaaaggtctaaatagaaaatgaagcacattgcaccagtgaattggatagggctgtggtgacccccagaaggcacttcagtggttccttctcctccttcaccaccatcgtctccatcatctgtatcagttcttgagctactatcattggactcttggtagtctgggctatgttcggtctcttcatcgctatcaacattgcgagactgtggacctgtgcccttagctcttttggatgtaggtttttttggtggctgtcgagtcttcctttttccaatatgagtgtcagctatattcacatcagcccactctgcaatagtagaagctcccgtggttctgcgcaggtcagtcaagtccactaggttggctacaagtggactaggcacgggagcatcactttcagttgagtcttcatctagttctgggttggcattggaccgagcattatccatccattttttaatctgattgttactttcatagaatgataggtccgatagtctctgaaggggatcgtcgtcctccttcctaacttgggcatttgattgctgaattcgtaggcgaaggttgtagttcacataaactagtttgttgagcttgttgtgggtaagtttattacggaccttggtatgcacgaatgcgaatgtgctccagttccgttcacatccacttgaagagcaacattgaccaaccatgcgcaacgcaagcctcttcaaattcggcgtgtctgaggcaaacatagaccaccattgtgctgcacatgccagggctgcaggaat

SEQ ID NO: 19174 - DNA, 4742 bp, Oryza sativa
cctcaagcaaagcggcggcggctgtatcgatgtccgtcatccactcaaaggcctgacggaggtcttggaagacgctggcacttggagagtattggtagtgagtcatagggtttaatgccgcacctacaaatcatgaaacaagatcgatgagagtcgtacaataccaaatttttcattatgtaatgtcggttactcactggcattgattagagtttgattggtgaggtcgtgcattctcctattgacaatttccatgtatgcttcgaatttatccctttcactcgcaaagagactgtcatattccattctcaacaactgatatctcagaagaacctcactcaaattggggttcttgtcctcgtcagcaaatcgaaggaaggagtacatcggctggactgagttgaccacggtctgtaagttctcccaccaagacatgctagataggcatgcgtgcgcatacctgccatccattgtgccactgaatttgctttgcatgaacccagaagaagccatccactgcatgaactgatctcgcctcctaaggaagctctgaaggaacatgtagtttgtgccgaaccgtgtagcattccacttaaccagttcaccacctatagcagacaccatcatggcatgcagcttggaatggttgtatagccatctgcaaattttccttgcactctcaatcaccatttcatggtccggcatttttccaacctccttaagcatcaagttaattgtgtgcgccacacaaggttgccacacaattgttggatactcttggcgcaacagtctgcaggccttcttgtagttagaaccattgtctgtgataatctgaacgacatgttgcgggcctaattcgcgaaccacctttcttatctcctgcatgggtcaaacacaaaataaaacaagacctcaaacactacacttgatgttatcaaatgagactaaagtgttaatggaacgtagttacctttagtacgaagttagcatcttggctatggccggtggcatcaacggagttgtggaaaaacatgattccattgcaatatatcaaaaagttgatgaccgccatacccgccggtcctgtccaagaatcacacattagagtaacaccgtactcattccaatcacgcttgaacctgtcgaattgcttcttgacgtccttctccgtagcatcaaggtacttcccatgaatctccgaaccgcttggggaaggtatgttttcacctacaatgtacaaatacaaataattaatgcttggaacggttagaacaatgtaaattcatatgaaatgcatacttaccccacttctgtgtttctcgaacggcgctgacaaaatatgaattatcagcatttcttgcaggaatacccgaggtgtagaagaaccttgcccaggactcaccaatggcctccctagcttgccttcccttctttgtgaagaatcctgtatcgatgcgtgtctgcacaggagacttggcagatgctagattgtaatctctcacagaaggtgactcctagtgagatgtagcccttcgcaacaaactggcaattgggttgcttcttcctttccgtgcctcggactgagcggatccactgccaccgccatgctcataagtgccacctcgttgctccacacccctcctaaaactcgcctcttgccgtgaggcttccatggctgcttccatttgttcctcctcgtcggcatcacctgataggtcataatagttgaccccagccgcttcaacccttcttgccctctcactctgacgagtatcacctgcatcttttatcctgtccaattcgcgcctgaagaattcgcgaacatctggaggcactgaattgcaatacgtaaccccttttccttttccagccaaatgaattttaagtcgagttgctccaccaccgccctttctttgatgacaatacttacaacgccatccaggtgccatgctctccccgtgctcccacactggatccctactatctgccatatccaccctgtatgtaacatacgcgaaaagtatagtattagaaattaaatcaccaaggccgcatttctatttcactaatgccatacgtataaaaattcgacttacacatagacttacacatagtcgcatatgaaatccaaattacactcaattacaaattacgctcgcacttgtacgctacgttttgttatggacttattttactaccattccactacttttactttttatctgagtgtttcataatttgtagtgataacaaacaagcaagacaattgcattgcgaaatcaaaattacaaaaattcctagctacggtttaccggcgatttgctcgcggtaaccacggtttctacgcggttaccgctcggtatgccgaggttaccgcgccctatagccccctgatgctaaaccctaaagccacggctaccgcttaaaaccgcgcgataaatcgagcaaatcgcgcggttaccgcgcaataccgagcggtaccggaggacttaccgtgggcgggctggcgtcggcggttaccgtctcgtaccgcgcggttaccgtgccctaccgcgcggtatcgtcgctcgccggcgcggtggcggcggatctggggcgcggctggcgtcgccggggcgttggacagagagggagagacagaggagagatggaacgcacggggggacggtagagatggggttagggttagggtcacctcgtttgggcctcaatgggccgtgtgcacagtatcgggctggcccatttttttttctttttccaattttcaagtttttcatccgttttgctctcaaatttaaataaatattgatctttttcgacaaatttcttcaccataaaacactacaaatcaagcactaccgttaccattttttttgattttttttcttttttttttttgaatttttgaattcggatgaaattcggcaaaccgtaccgcgcggtacgggtaaccgtacccccgcggtacggcggtaaccgcgcggttgccggtttttgaatccctgggaacgactcaatctttcactgatatacgggcctcgaggaatactcacgggcccactttcagcccagcccgtaaaagttatagccgaccgtccctccccgaacctgaaactgaaagcaacacgagaccgcaacgaaagcctaaacgcccacgcctcttcagggcctcctctcgcctccgcgcgccattccggaagccctagccacgccgatgccgtcgccgccgccctccggggagctccccctcccccgccggaggctccgcggccaccgccgtccgccgtgacgccgcgatgccccccacccccgccggtgggcgggggcgggggcggccccacccaccaccacgacgccgcctcgcgccctccgacgcggccgcgcgctgcccagggtcggtgcggcgcggggcggggcggggcggggcggcctatataagaaccggatcgcaaccccgcgcgggggtaccacggggagggagagatagagagagggaggctgtttcgcgtgaggaggaggagcgtggatttcggcgactccttccctcttcgttcttcggcgtagttctcccgatatcgtggcggcgagatcgaggggggatttttttgttctctagagatcgaatttgatgctggtgatcgtcgaattctcgccagacccggatttctgcgaggtatgtttacgatcgacaaccgttgctcttgaatttctgtggttttgatttctggcgtgctagattggacttgttcgtcgctctaggtatcaaatccgcagattgatttcgtcggattaatcttgataaaattgcgattatcatcgaattcagcatataagaaaatcgattctccgaacacctgaaaaaaacgaaatcttcttctaaaaataactgatgaatttgacagctaaattagttgtataagcaaaagattttgtgaacaccggaataaaaagaaatcctgctaagaaattattgataaactcaacacctgattttggtgtagcaaaacgattctgcaaacaccaacaaaacggaattcgcaaagaaaattgttgatgaattcgaaaactgagtttggtgtataggaaaaacgattatacgaacacctgaccaaaaccaattctgcaaagaaattactgatcaattcagaactgcatagtttgcaatcttctactccatgtctaggcagttggtgaaagattgttcatttgttactagattcatcaactttttactatgattgatcaacgaaatacgaagaaaacatgaattgccatgtataaacatcaatcgcttactatgattgatctatgaaataagaacaaaggataaattggcatgtataaaaatcaatgagaaaatttaggtcatcaagacatggcatctgtgatttatgtaggttgaatacaattaatatgaagagtttctgtcctttactgttgtttctgatactgttagcttattgatgtttttaatgattggatttaacataaaaagttactgttatttgtatcgaatgtgtataatatgaaagtgttaaaatatcgttgctgtcaatccttgtttctctattgttcattaacacatagaattgggaattaacagtattaattttattgagaaggggaacatgatttatcaaatagtattgctgataatagggttagatccaaacacaatagatatgaagagaaaacagattgaactcaatgcattagttctgttgtgagcaggaactttctga

SEQ ID NO: 19175 - DNA, 8279 bp, Oryza sativa
ttttcccttaattgtgtacttgtttctgcaatgtatttgctggttcctatcttttgcactgaggttgatgaccatgctcactttacgtttgttttgaaggcactgcagctgtagaatggctattcttgaagcactccagcaaacatcgatccctgttactggatcttcttctattgcagtcagtccagaaaactttatcaaatgtttgaagaagttttaccatcattggaaggaagatggatcaaacctttggggatcttcaactgcaattgccattgctactccaccaccttctgatgacatccgatataagaaatcattagccctgagcatgtggttttttaatcgtgagctccctgaaaccataatggttttcacagagaagcagattcatgtcctgtgcaagcagaaaggttgtgatgctcttaaacctttgaagatgcctgtttcaaaagcagtcagcattgaaatcgtgttgcataatttggcaaagggtgacaatggttcttccttaatggatgaaatccttcatgctgtatgttcccactttgaatcaaaaagtgctgttattgggcacttagcaagagagaagcctgaaggtaagattcttgaagtatggtctgagaagttgaacggatcaaggctaaggctttctgatgtgtcaagcggcatctctgatcttctttctgtgaaagatgccacagagattatgtatgttaaaaaggctgcatatttaactgcatcggttatgaagaagtatgtagttccaaagctggagaagattatagctgatgaaatgaaggtacaacattcaaaactcacggatctgatggagaagatattgctttccccaacaaagatagatgtcaaactgaaagcagaaaatgttgatatatgctacccacctatttttcaaagtggaagcaagtatgatctccggcctgctgctgctagtaacaatgataatctgtactatgattctggaagccttattgtgtgtgcgatgggtgcaaagtacagtaactattgctccaatgttgcaaggactttcctgattgattgtgctggggaaaaatgtaatgcatataaggtcctctgccaggcacatgacgctgctattgctgctttggtaccaggtagcaaggctagtgatggttaccaggctgcggtttctttggtgagggataaagctcctgatcttctccccttttttaccaagtcagctgggacaggaattggcattgagttccgtgaaacttggttgtctttgaatgagaaaaatgacaggatactaaaggaagggatggtttttaatgtttcccttggtttccagaatctcccagagaagactggcgattacaagaacaaagaattctctctattgctggctgacagtgttcttgtttgcaaggaaaagccacatgtcttaacagcttttgtctccaaagctgatggtgatgtcttttattcatttgatgaagaaaagacaggttccccttctgtgaaaccatcgttgaatgcaaaagtgatggtcccagaaaaaccagtgccaaaagcagagttgatgctgccgttgaaagaaaacctgcgatcccacagcaggacaccaaaggaggaccttaggaagcagcttcaggcagaaattttacagaagagaactgctgaaattgcaatgaatagtaatgcctccaatcataaattgctggagggacaaggccttagagctatgcgtgaacctgttgcatacaagagcacaagggatattccctgttccaatcggttggagattcaggtggataagcagaatgaggctatcctattaccaatatatggagttattgtccccttccatgtttgtactgtaaaaaaagcagaaatccgtggggatagcaacagaggagtctatgtctgtattacatttaatgtccctggcactgcttccaatctccaagatccctgcctgaagacaaatgcaaatcgcattttcttaaaagcagtcaccttcatttcaaaagacagaaagcatgctgacgaggctattcaattaatgaggattattcaaagaggagtattagaaagagctaagagagctagtttggtcagtcaggaaaggcttcaactatgtgatagaatgactagggacaggattcagttgatggacttgtggatacgcccaacttttgctggtcgtgggcgtaaatcccctggaattttggtgctccatgtcaatggttttcagtattccgcatctaaatctgaaaaaattgaaatcatgttctgcaatgtcaagcatgcgttcttccagccagctgagaaggagatgataactctcctccacttccatctttacaatgatatcatggtgggcaacaagaagactagagatgtgcagttctacattgaagtgatggatactgtagattcagttggtctgaggcgccgaacagcatgggatcctgatgaaattgaagaagagcagcgggaaagggcacggaggagcggaataaacaggcagtttgagctctttgtgaaaagggtcaattccatttggtctcagccaaggtttgagcagctcggcttgcagtttgaaactccatcgcaaaagcttgggttcaatggagtccacggcagaacaacatgctttattgttcctactccaagttgcctggttcaactggttgaatcgccgttccttgtaacttctctgagggaggttgacatcgtatgcctggaaagggtggcgctggggcagaaatccttcgacatggttttcgtgttccaagacctgaagcgagatgttatccgcatagaggtcattccaatgacctccattgatgggattaaagattggctcaatggctgcaacctgaagtactacgaaagcaagctgaacctcagttggcgtaaggtcctgaaggaggttatgaacaataaagagtcagacgagaacaataggtgggagttcttgaacccagatgctagcgactcggactcggagagctcacagacagaagatgatcagtatgaaccatcagatgccgactcatgctctgaatcggatgacgaagacagtgacagtgaatctgtggtggattctggtgaagacgacggtgccatggatggttcagaagatgatggtggtgatgctgccgaatcgtgggatgagatggagcgcaaggcgagggacgccgacatggagatgggcagtgagtcggacagcgaagacgagaggcagcggcgaagggagaaagcactggccaagtctcggtgtcctagtcatccacaggccaagggtgctgcgcacaagaggcagcgaattaactagttctcagataatggaagtttagcttgttcttgtggcactttattatgcatctgtcgctttttacctgtcgttagtttcggtggtgaacttttgatatgttcttctaggtactttgcataagtacattactttgtcagcataagtgactcgaagaatgttcagttttctattatagcaacattatctcgttttactgcacatggtactttttattgtggccaaattacttgagcaactcgttttgtccattgatttgcacatggatagtcgggattagggttaatgctcgttactgtctcctctgctatgacggaggatctcgttccccttataccaagaatattcttgatggtagaagcattggagctgtgtgtggagttattggtgcatagcatgacttcatccattagggtttaaattctgatgccctagaatgttacgtatatgtaagcgggcttttaatatgttttagtgagattggatctgttgctagttttcgtcttcttaagcagttttcaataggctttaatgagattagatatgtcgctagttttttgtcttcttaagcgcatattaaatgagattaagatgtgtcgatttgaacatatgttgtttggggaaaaatggatgtgttagtgtggtgttgtgtgtatagtgtgcgtgggtgtgtctttgctatataatcagaaaaagaattattgttgatagctaaagaatttcagttttgatctaacttatgaacgacaccattgccttttgcaatttgactaaacataagttttttttttaaaaaaaaacaggaactggaaacaggagcttccattaatcacaggctcaattctctttttattttgaattgcagtagactcctgcgcaagttttaggacaggatgaagtcgaacaggaagtaaaatgagaagacataaacgatcgtatctgcctaaacagagcagttaggactccgatccaactcttcgtttgtgtagtaaatgccgcttctagacagtagcatctgtttccaggaagattggagtcattcaagttgtgctgctctatccagaaccacaccaaacagctatcgccttagggtgtgtttccacgtcaaaattgaaagtttgactaaaattagaagcttgaagaaaaaagttaaaagtttatatgtgtaggaaagttttgatgtgatggaaaagttgaaagtttgaagaaaaagttagaaactaaacaaggagttagtctagagatccttcgcaccataaatcaccatccaccttttatgaactcccatgtttcaagacattaaggctgtgtttagatccagaggtgtaaagttttgacgtgtcacatcggatatacggacacacatttgaagtattaaaacatagactaataacaatacaaattacggaatccgtctgtaaactgcgagacgaatttattaagcctaattaatccgtcattagcaaatgttactgtagcacaacattgtcagatcatgaagcaattaggcttaaaagattcgtctcacaatttatacgcaatctgtgtaattagttattttttttcatttatatttaatactctatgcatgtgtccaaacatttgatgagacagggtgaaaaattttgccagacgatctaaacatgtcctaacatttagagttggttcggtttacggttaggtggatgagatatggtcatcttcttttttgttgtatgaatcgatctattttcttttttcttgtattctctccgtccccaaaaccctaacttttatgggtggatttggacgagtgtttgtccagatttacttctaagttgttatttttcaatgatggaaaagtaagtctcagctgatgggggtattcattttttaataggccttgacatcattgaaaaataacttgaagagcaatacttttgttaagaaaaggacagtttaccaacgttcttacaaggatcacacccccaaccctagcacctcacgcgcacctttttaagtaaaaagagggacctagatgacgtcttcatggaaagaagcgacgaaagcactaccgccgctgtccaccaaaggtctcaaaagagaaccgagattgggttttcacctagctgccccactagaggcggagatggcacggcaacgctctcaggaaggagagacgctcgaacatcatcattgccagccctaccaaggccaggctgggctttcacctgccgcctaccgcctgcctatccacaactgacgcaccatttctccatcgccatctaaattttttcaacgtgtgagcaccactgcaccgatgccccccgccggtcagcctccaccgccgcaggcttgccaagcggctgctttcccgcgcctccctccagccacctgctaccttcgctacaagagtcgcacgtccttgcgaccttcagccttctttgccaccggccactgctttcgtgagcctctgccagaccgcgtctccagggtcgcgccaccgcgagctcatcctctcccgattccggctattccgggcttgccagggcggccattttgggcgctgcctcccacgccgaggagaagctccaccgccgccttccgggccagcccctcgggctccgctggtagtgaagcggctagagggacgaaggtggtggtgcgggctgctagggtttctcccccgagccgccctcgtgagagcgacacaagggacctctactaatgctacacgtaaagtgcaaaattcaaacacataatatgggcgtaagagaaatacaatatctttgcctaatgtgtggtacaaaagaaagtatgaacaagaagaacgtcacacaagtgaaaacggcgcatcatctccttgtcatatactacaaaggatgtgcaccatggtggcggccttgggtgcaatagagccagcctcaaccccctgcagaatgggaacacaagtgtggtgggaaagaaaaacaaaagaatcttccaccttgaaagagacaaaactttaattgtaaattcttccaatattttcctacaagtaaattattttttgtgaaattcgcacacattaccccctgttgtttagcaaccacagttgcaaattatcgattccccaaataagattagccactgtcagttattatagcaaagctgcttgtggtcacacatattgactgcagacaactcaatttctctcatagtaagatttgccagcatgagtttttagttaggaacaactgcttttggtcacagattaacaagggaaatatttacatctccagtgagtaaaatcgttggtttctgtctgttctattattacctaaattattctgtacaatatgatactgttcatgacaatggcttgacatctttgacagaacgaccacatagggggttatcttctatcccaacgctggacatggcgtacttgatgatcaccgtcttcagttcaactattcaacactcttctaaggacgtcggcgttccacccgaatacagaatcagaagagctgtcaacacgtccaaggaaaaggtgtcacctggagattcagatattgatacagaatcttcaacaaacttacagaattcatctgtcatcagagggtacccaacgaaatgttcagtgcaattagatatgtaaatgaaaatatgcacctggggatcgagatctcgtgattgaatatcctatcggagattggaggaatatggtcttttttctcattggcgaagttgatgatctggaaaaggacttcctggatcagcaaccccagcgcagcacgcttggagctggcctcttccaacgctttccctgaggggaaatgtcaacagaaattagtttgccgatgatttgctatatacatgtgaaataatacaatcctgaagaatgagctgtaagaaaaaaaacctcgaatacttgttgatgctttggagctacgtgattttccatgtcctttagggcttatgacatgcaaattgatgaaccactgttcccagtaaatcctctcagttttgctggtgaaccagcttgggtttttgttcttttcgtcaaagaaggacaggcagacctaatatattgaactcccccagtattaaaaccaaataacgcaaatgtgtaaacggcagagtataatgattatgaatatcaaacaaacctggcttcttcgatttggatgcttctccacccaagcaatgaactggttgatcttttcatccacctccttttctaagtcaggaagtccgcattgaacctgggggcagaagcatgcagaaagaacaagattatttgtttggaaccaagtccagcaaacgtcatcagatcataattccttaaattggaaaccttgcaaaattgtttgcaacatcaaatagacagatgaaatgggctgtaacatggttcttcaagaaagaaaacagtactcacataggtgatctcaaagagatcgcagtcaacatctttaggccgaacaagagtaagagttcggtggaagaagatcgtatgtaaaatgcctgcaacatattcatacataacatcactaccaacatagcgtggacagacataagaataacacatctggatggaagctcaacttgaaaaaagtaatgaaatcaggaaaacaacatctaagttgcgactaattagattcttgaaccatatatcatgttatgtcacagaagtgctgcagatagaataattagatccagatataacattgcattatggaatacagccagatccccatctctccctctaccatcatagacacttcacacaagatgcttctttataattagggatggactaatcttaatggttgtaatccttattccactaccacctgctagtattcaccatggtcgatgcttcctttgattcactgaaaaagggacttttttctttttttgcaatatacgactccgaaccaaacaatcactagtttgtccctaaaagaaaaaaaaaatctgaattttcgatctcaag

SEQ ID NO: 19176 - DNA, 6582 bp, Oryza sativa
aactattcattattccccacgagggccattagctgagtgcttgtgctagtcgggattcaattatcacatctactttggtattctccatgagggataattactcggatcagaagccactcagatgagatatgcatgatctacatcacccaagatatttatcactcggggtcatattaattgtcgtgttctatacgtcatatttaagggtatcggtagacatactttaggtctaggcctaatatgtctgcagcccatatttttaggtgtggcctgtcacgttcttttagggacttaggcattttttgcttaggcaaaagtgcacgtgattatatgcccaataccttcaaatccttttataccgcagttactcaactttttaggagttggtgtaatgcattttaaaaggtgccaaccagtaaagctttaaataactgcccgctgacttttttatatagtcaggcggctgttttgttttatcaagcaattgataggatacaatattgttgctttttgccatgtaagtgtgcatttttattgaccaatattatggcttaggctgattatatatttggtcattttccaagcagtagatatatcacttggatcatgttattcgtggattcacaccgcatatgctattaatattaagttacttggttgactataattataaaaaccgctcggttggttggattatttactccttgactatatgtttagtttgttcaactaatcacatagtcgtgggctacacctattaggtgcatctagtcgatgcacctaagtctatattcaatttttttcagccctccacagtcttcagatttggtaaaagtactcgggagaccattgcaaagatgattgaagcactcggctttagagtaatctggttcaagagaagattatcttttcgactgtgaaggtctcaggggctactgtggagattataggtaccccatacccacacggcatggttatccgactagttataggggataacttatatctatggaatatgtaacagatcatgacttgggtattacgtttccttgtatattatggaacggcctaaagtcctgatttgataatattgtaaagtagatttaggaaactgataccatattagttaatgtttctatcctatataaggtgggcaggaggccctgtaggtggcagatgacacaacctgatcgtcagatcaatatacacccggcggattcaaatccccaaacaggagtagagtattacctctcattgagagggcctgaacctgtctaaatcctttgtctccgtatccatccacttttaggtctcgtgcgctaccccttttattatgaattcatgttgatattttagagtagaaggttgtcatcgcaatcataccgaacccccatcgacacatctcggtcgtttatgcatcccattattccctcattgataagtacaattttataacaattgctatatatatgtatttaattatgtagtgttgtgctagtaagatcattttggtgtcgtgctagtaagatcattttatcgattggtaaagctttttatcgcgatcggcatcattgagtgttagagatggaatgcatcactgctcagctgaaaaacgttgggtttgttatagggtaaagcaaatggcaaacacctcaggtcaaccagaatgttagcagttcataagcttatctggtgcatgtattgctatctctttttctcctgatggggacatcctcaatatatccttcatatgctttgatcaaaattttctcacgttggctaattgatctttatttatttttctggtggtttgtttctttatttacaactatcaaagatttctcttcttttttctttcctcacggaaaagctaggttcaacccatggaccagagtggataaaattcatagtactctctccgtattttaatgtatgacgccgttgactttttaatcaacgtttgaccattcgtcttatttaatttttttatgcaaatataaaaatacttatgtcatgcttaaagaatatttgatgataaatgaagtcacaataaaataaatgataattacattaatttttttgaataagacgaaaggttaaacgtttatcgaaaagtcaacggcgtcatacattgaaataccggagggagtagtttgttaggtgatcgagctgctcttgcaggttgcagcaggccttggctcatgcgtgtgtaggcgcgtgaatcatgatttgtaatctagaagggcagcatgaccgcgtgagaccgaccgtgcgtgcatgactaaaaatctagaagcacaacgacttcgctatttcggcatgtgtcgcacgattatttggccctccactcaaccaatgatatatatgtgatttttttgttggatgatttccatcgagcatttatctgctagggggaaaaggacacgtgatccaatcggcagcggcaaacaagccgacttgagattaatagataagaagcactagggataggaggatggggcaaatgaaatatatattgcttgggtattatagaggtttgttttacattggttgacaatgaaatactccctccatcctaaaatatttgacgccgttgatttttttaaacatatttgactgttcgtcttattcgaaaaatttaagtaattattaattcttttcctatcatttgattcattgttaaatatactttaatgtatatatatagttttatatatttcacaaaagtttttgaataagacgaacgattaaacatgtttaaaaagtcaacggcgtcaaacatttagggaaggaaggagtatgtatatttggcagtggtagcatggtttatactggggaagagagagggagagagagtgatatagttcgagagattttaattgatcatgagcagctagagggatgagtcctctactgtgaaagagagcgtgaggtgatctggattgtcaaagaatgaaactaataagcaaagcaaaatatttctgttgaatacgcattatatttggatctatgtgtcacaccctaaaaatcctaattatataaattgttgtttaaatggaattattagaatctattttaaaagcctagaagagaagatctaattttaattaataaattccaatataaaatggggccaaataaaattttattaaatactttgcttaattctataattcctagatttttctgggatttatttgagctaaggaagtatttttaataaatggaattgcatttcatgaataatttaaattgaaaaatgtttttaaaagtcttcttttgtctttgggccgaaagtcggcccaaaaccgctctctctcctcctcggcccaagtccagctgcagccgccctcgcgcgcgctcgctgccgctgacaggtgggcccacctgtcaggcccgtcgtctacctccggccgccgccgcccgaaaccctagcgccgcgccgccatcgtctccttccaaattcggccgcgtctttccgtttccggtgaaatcaattggggggaaacaatcttccggatctcctctaccttttctcttttggaatcatcgtctatctcgctttggaagttcgtggattcgaggtcgaatcggatcggtctctttcctccgaacctcgaggtttccttcgcgtcgccggtcgccgtgggcctttgccgccgcgccctagcccctttataaggacccccggtgtctcctctcttcgctgccaccctcgccttcgtctctcgccgtcggaagcgccctagcgccgtgcaacctcgagctgccgtcgtcaccgcagctccagccgtgcgccgccgccgttccagccgtcgccgtcgctcggggaggtcgccatcgtggtcgccaaatcgttgccgtcctcctccgtcccttcgccgtcactgaagatcgccggagcaccgtcgccgtcctcaagccgaagaccgtcgccgcttcttcctcgacgccgccgccgtccgttcatcttccgccgacgttttggtcatcggtgagttcgccacgtcgcgctctacgtcctggtgccctccgttcgcgtcctcgcgccgtcgttcgccggcgagcttgcgcgaccgagccgccgagccgccgccggtggtgacgtcgtcgctgacgtcatcgtggccgtctgccgtgagccgccgtagacccgatcgatctcggccgttcgttttggataggatcgatctcggccgttcgttcccgtgaaccgctgccgtgcgcccggtccaccgcaaaccctagccgctgacgcaataaatccctttttccttttcaaaaataattcattattgcgtcataattcaattaaaatccatataagtgttttaatccgatttaatctttaaaaattcataactaattcatcttagctcggatttagttggttcaagtctctaaatttttctaaaattgagatctacatgttaaaaatatccacatgtactgttcatgcttgtttatgtgctgttttggtgattttgctcttttctgtttagattccgacgtttccggagagtccgttttcgcaggagaagaatttaaagggttccaaggccagcaaggcaagtcacacagatcccaaacaaccctttgagcatgttgatcccgtttaaatctattgtttctattcaactattgcatttattttcgaatgtcattgggtggaattaacctattgtttgttatagccctttttgttcttgattactttattccttgataccttgggtcattataacttgactagttgggctatatatattggttcagctagatattagatatgattgcttagccatgcttaaaaacattagcacactattaggataacttatgactcactattatttaatgatggcttaatgatagttcacgatggtcaatcgtgaatggttaattaattacttgccaactaaaacttgataatggtgggttgtgagcacatggttttgagagtcgtgctcatgacaattaaggaccggttcacgagtttcggttgtgaaacattaacagtgccaaccacaagccagcgtgggcaacggctttaccttttgtatagcatggctcattgcagagcaccagactgagaagtggcggagataagcccacaggggtcgctggggagtccatgccttgtttataagggggtgattatgatccaggaatggtgcgctgtagtggattgtgttgtgcgaggggtattgtcacagctcctttccgaggtaccgtggtggtattgaggcacatggtgacatgatgtggggctgtgtattgtgggtacagtggtacacctctgatcagagtaaaactattcgaatagccgtgcccgcggttatgggcgggtctaacaatgtctttcgtgattagtctcacacctctcatcacaataaaagatgctataactggtaataatttgattagctcctggtttggaatggtatattcctggtttggagatagaactgtgcagccgggatggttgttcagaatggttgggcctatacaacagggtatgttgtatagcgttggattaatattgtttaattattacttaactgttgtcatgcccggaatttctatccaaaattccaaacgcttacatgtgtgtgaaccctcgtccaggaatcagccgaggcacacaataacaaattgataatagagtacaaatattactctaattaataagcgaataaaatgtcattacagaggtagatagttcctctcaaacaataaagatctaagcagcgaaaaataagataaacggcgcagacggctccactccacaggcagcttgaccaaggctacacctaatcctccacaccatcagcatcattgtagaactcttcctctgatgaatgattgcaaggtgagtatatgacatactcagcaagccacgcagcaaatatgcaagtgcacaaggataccaaaggatggcatagtagggtttcatttgcaaaagcagcatttagcaaatatttcagaatttaataaaacagttaagtattaaacaatattaatccaacgctacacagcataccctgttgtataggcccaaccattctgaacaaccatcccagctgcacagttctatctccaaaccaggaatataccattccaaaccaggagctaatcaaattattaccagttatagcatcatttactatggtgagaagggtgagactaatcgcgaaagacattgttagacccgcccataaccgcgggcatggctattcgaatagttttactctgatcagaggtgtaccactgtacccacaagacacaaccccacatcatgtcaccatgtgcctcaataccaccacggtacctcggaaaggagttgtgacaataccccttgcataacacaatccaccgcagcgcaccttcctggatcataatcacccccttataaacaaggcatggactccccagcgacccccgtgggcttatctccgccacttctcagtctggtgccccgcaatgaaccatgctatacaaaaaataaagccgttgcccacgctggcttgtggttggcacggttaatgtttcacaaccgaaactcgtgaaccggtccttaat

SEQ ID NO: 19177 - DNA, 6154 bp, Oryza sativa
atcagagccgaccttgaccgtaggacaagccaaatggaaaaacctaagagccctctgaatccttttcattgcatatgttctttgcaattggatttgttccgggaaaattgggatctgttcttgtggttcaagggaaaaatcttggtcgctcgtttaagtgagatttttcaaaacgagtcagtctagggttttagtaaaactattgggatttattcgtcagtcagttgggatttgatgggtgaaatgcattaggtcctagctcaggaacatgggttgcaaggtatttatgctttatttgttattattagtatgtatctaatttctcattattttatcgttatgtgagtctgtcttttttattcgctctcatgcaaaatgatctatgcataaaaatttcgctcttattcgattcccttatttgagtcttttattgctttatttaaatttggatttgagcatgcattgatcctacccctttgtcttctctagatggccggtcacccacccaaccaccgcggagaaggcatgatcaactttgtggcagagttggcacgcatgacactggtggtgggctaccccaacgcgccagagtacacgacgattccaccgctcagtggcgagcttcctcaccgtgttcgcttggaggtccacggctacgtgggtacctgcctagctaacatggtggttgaggcatccggaggctcaacagatcacgcctgtcaggaggcagcatacctgatgatggctagactacgggagcgccacaactacatcttccacgacacggcgtaccgatttcaccctcgtcgagccagtggtgatgatatcagtaccttccgtccgacagccggcgagaacgacaccacctttagtcacatgtgtgctgtgatgaggggattggataggatgcactcggacctgcacaaggcgaccaaggccttgaacgatgggaagctcatgaggatcgtcactctgaaggacgagatagcgcgcctgaagagggagaatgctcagttaaagggtcttcccgcgccaggaggagtccggatccgcactacgcccgcaagacgacgacggcacccgtgcgcatccagcttgcgcccaggaacccacctccatcagcagctcccgcagcacctccagttccgcccgcagttcctgcagctccagctccagctcccgcgtccgctctctccttcgctccagcatcagccgccagaggtccagccagtggcaccggaagttggttgtctgctactcccagtggcagccgcgatctcagtagcagcagctccagtggctcacagtcaggcagcggcgagacttacctgccaggctccgggagtcgctcagaggtaccgggtgacgagcaggaggacgccttcgactccaccgaccgaaggagccgttccgagcattaggctcgttttccattagtttatcgactgtctagcttctgcttgttagtttgtgtgtttaggttgcttgtttggggtcagtcgacggtcgatatcatgtgcctatgatatggctgtcttaataaggatttttgcttgctctttaagtgttttaattcagagcagaacaattgcagtttaaattcctatgtaataaagcttagtttctgagcatctgtttttcttcttctccccgtatgcttttcctccagatggtctacaccaggaatggtagccgcgcgacaggcgagggcagcaacggcgaagagcgcactgatggggcgcatccccacagcgattctggcaatggtccgccaccacttcccgagaatccgacgctagcccaagtaatggcacatcagacccagatgatggcagccatgatgcagcagatgcagcagcagcaccagcagatgcaccagcggatgctgcagcacgccgaacagcagcatcaacagtttggtccccctccccctcagtccaagttgcctgagttcctgcgtgtcaggccacccaccttttccagcaccaccaaccctatggaggcgaatgactggctccatgccatagagaagaagctgaatctcctgcagtgcaatgatcaggagaaggttgctttcgccacacaccagcttcaaggtcctgcgtcagcttggtgggacaatcacatggccacccgcccaccaggtactgaagtcacttgggcagagttctgccgtagcttcaggaaggcgtaggtgccagatggggtcgtggcacaaaagaagagggaattccgggcgctccatcagggcaacaggactgtgacagagtacctccatgagttcaatcgcctcgcgcgatatgcaccagaggatgtccgcaccgacgccgagaagcaggaaaagttcatggcgggtctggatgacgagctgaccaaccaactgatatctggggactacgctgattttgagaggctggtggacaaggcaatccgtcaggaggatcaacgcaacaagatggacaggaagaggaaggccgcacagttcagggcacctcagggaagtcaccagaggccgcgcttcactcccggacagcagggtggacctaccaccatgatcgtccgccagtaccgcccgttcaatcctagcaactttcctcagggcgccagtggcagtcagaaccaccatggaggtcagcccaaccgcggtgcagctccacgcccaccaatggcaccggcacagtcaggcccgcccgcgcaagccaagaaggagactggagcaaaaccagggtcctgcttcaactgtggtgagcttggccacttcgctgacaaatgcccgaagcctaggcgtgctgggccaaggtttatccaggctcgtgtcaaccacgcatctgcggaggaggcacaagcagcaccagaggttgtactgggtacgtttcctgttaactcaatccctgcaacagtactttttgattctggtgcaacgcattcgtttcatttcaaagaagtttgtcgggatgcatgggttaaggaaagaagagcttagcacaccaatgagggttcataccccgggaaatagttcaacctcagtcagttttagcccttcagtgctaatagaaatccaaagatcaccatttctagccaacctcattcttctcgaatccaaagacctagatgtcattcttgggatggattggctgaccaagtttaagggggtcatcgattgtgcgaatcacacagtcaccttgaccaacgagaagggagaaaccgtggtgtacaaatcactagtctcaccaaagcaaggggtctctttgaatcagattgagacggaaatcccagtcgacaccgtggagaaaaacttgaggaaattggaatatatacccatagtctgcgagtatccagaagtgttccccgaagacctcactaccatgccacccaagagagagattgaattccggattgacttggcaccgggaaccgctccaatttacaagagaccgtacagaatggcagccaacgaattagcagaggtcaagaagcaggttgatgagcagctgcagaaagggtacattcgaccaagtacttcaccttggggtgctccggtcatttttgtggagaaaaaggataagacgaagaggatgtgcgttgattattgcgcactcaacgaggtcaccatcaagaacaaatatcccttgctgcgaatcgatgatttgtttgatcaactgaaaggagctgaagtgttttctaagatagacctgcgatcaggctaccaccagttgagaattcaggaagaggatattccaaagacggccttcaccactcggtacgggctatatgagtgcacggttatgtctttcggacttaccaacgcacccgcattcttcatgaatctgatgaacaaagtattcatggaatttctggacaagtttgttgtggtgttcatcgacgacattcttatctactcaaaatccgaagaagaacatgagcaacatctccgtttggtactcgagaagttgaaggagcaccagctatacgccaagttcagcaagtgtgacttctggttgacggaagtcaaatttctgggccatgtcattacagctcagggtgtggcagttgatccgtcgaacgtagagtcagttaccaaaaggaccccaccgaagaccgtgtcgcagattcgaagttttcttggacttgcgggatattaccgccgattcattgaaaacttctccagaatcgcccgacccatgacttagttacttaagaaagatgagaagtttaaatggacagctgagtgcgataagagtattgaggagctcaagaagaaattagtatccgcaccagttttgattctgcccgaccagatgaaagacttccaagtctattgcgatgcatcccgccacggacttggatgtgtcctaatgcaagagggcagggtggttgcgtatgcctcgcggcagttgcgtccacacgaagggaattatccaactcatgacctggaattggcagcagtggttcatgctttgaagatctggaggcactatctgattggcaaccgctgcgaagtatatacggaccataagagtctgaaatacatcttcacccaaccggacctaaatctccgacaacgaagatggttggaactaatcaaagactatgacatgagtattcactaccacccgggtaaagccaatgtggtggcagacgcattaagccggaaaagttactgcactgccctatgcatcgagggcatgtgtgaggaattgcggcaggagtttgagcatctcaacgtgggaattgttgaacatggttttgtagccgctctggaggcacggcctacgctcgtggatcaagtcagagcagctcaagtaaatgattctgaaatagcagagctgaaaaagaacatgagagtcggaaaagcccgggatttccacgaagatgagcatggcacaatctggttgggagaaagattgtgtgtacctgacgacaaggaactgaaggatctgatactcaccgaggctcatcagacccagtactccattcatccaggcagcactaaaatgtatcaagacctcaaagaaaagttttggtgggtcagcatgaggagagaaatagctgaattcgtcgcactctgcgatgtttgccaatgagtgaaggcagagcaccaaagaccagcaggtttactccaacctcttcaaatcccggaatggaaatgggaggagattggaatggacattataacgggactgccccggacatcgtcaggtcacgattcgatctgggtagtcgtggatcgactcactaaggttgctcacttcataccagtacataccacatatacgggcaaaaggttggcggagctttacctttcgagaatcatgtgcctacatggagtacccaaaaagattgtatctgaccgagggagtcagttcacctcaaaattctggcagaagctgcaggaaaaattggggacccgtttaaatttcagcacggcctatcacccgcaaactgatggtcagaccgagcgggtcaatcaaatcttggaagatatgttgagagcttgcgctcttgattttggtggagcttgggacaaaaatttgccatatgcggaattctcgtacaacaacagctaccaggccagtctacagatggcaccgtttgaagctttatacggccggaagtgccgcacacctctcttctgggatcagacaggcgagcgtcaactgttcggaacagaggtattagcggaagcagaagagaaagtcagaatcatcagggaaaggttgaggattgcccagtctcgacagaagagctacgcggataaccgtcgaaggaagctcacttttgaggcaggagattacgtgtatcttcgtgtcactccgctccggggagtacaccgttttcagacgaaaggcaagttggcaccacgattcgtgggaccatacaaaatcctggaacgaaggggggaagttgcttatcagttagaacttccatccaacatgatcggcatccatgacgtgttccacgtgtcccaattaaagaagtgctaaagggtacctgaagaacaggctgattcggaacacattgatatccaggaggatctaacatacgtggaaaagccggttcgtatacttgataccagtgaaaggagaaccagaaacaaggtcacccgattttgccgagttcagtggagtcatcattcagaagaggaagcaacctg

SEQ ID NO: 19178 - DNA, 1475 bp, Oryza sativa
ccgataggtggggcccacctgtcgggcccttccccaacctccggccgcccgcccacgtcgccaccgccgccgaaaccgccgcaccccgcctcctccggtccacgtcggccacgcccgtgcgtgcgccgcgcctcccgcacccactccccctctctctctcgccgcgccctcaaccgagatggccgggattcaaatttgaatcccgccgctctctctctctctctccccacctccaacctcccacgtcgccggcgaaatcgggctcgcctcggccacgtccgtctctcccgagcccctataaagcatgcccgcactcccctccactttttttctttttccaccgctctctcccgtgccctccattgctcccgcgccatgcgcccatccgccgccgcctctcccgctactccggccgcctctagccgccgctacactcgccgccgcaccgcgccgtcgccgccgttgggttcgcgcggccaaggtccacctcgtccacccctcctccgtcgaggttcgccgccggagccccatccccgtcgtgcgccggtgagtgacgccatggccgccgccttcggccggcgccctcgtcctctcgcactctcctatctccctctaacccctctccttttgttcgttaggaggttccggagctcgtcccgccgtcgtcatcgtcctccgtcgctcgccgtcgtcgatcgttgtcggtgaggtctctcctcctctttctctctctctcccgcaccgtttagctctccaccgccgcttagccgcgtagctgccgcttcgccgcgacgccgccgctctccgccgccggtcggtcgccgccggccgccgtcttgtgccgctgccgcatgcgcgccgcgccgtcgcgcgccatggccgccgggccggtttgcgccgtgcccgcgcgcaccggccgcgagctcccgccgccgtccgatctacccttgggtagatcggggccatcggttcggctgacgcgtggccgccgcgtggtgcgccgctcctccccggtccgtggacccgatccgccgtggaccgccctccccgagtcactgccatgcgggtcccgcttgccggcgccgcgccccgccttgatgacgtcagccctggaatatattgcgcaataaatgatttaaggtttttcttttatagtaataaacacagtgaatcttctaaaattcataactaattcatccgagctccgtttaagcccattcaagtcttagtaaatcaagaaaaatgtgtagaatccattaaaaatggttttgttctctgtttcagtagtcttatagcttgtttgcaatgtttgccttgtatgtcgctagactccggcccctccgacgctccggtgtacttcgagatagtcgccgaggttcctccagcagcagagcaaggcaagtcatgcttgtcatttgaacatgttgatcctatattgcaaatgctctaatgttttctttcaaatattgcattgt

SEQ ID NO: 19179 - DNA, 580 bp, Oryza sativa
agccatagactaaagtcccgacccaaccctacctacggccgaaacccccgtgtcactccctaaaaatcctaaatgtataaattgtatgttaagtaggaatttatagaaatgattttaaaagtctagaacagaagatctaattttaattataaattccaatataaaatggggccagataaaatatcattaaatacattgctttattctataattcatagatgtttctgggattcatttgagctaaggaagtatttttaataaatggaattgcatttaatgaataatttaaattgaaaaatgtttttaaaagtctcttttggctttgggccgaaagtcggcccaaaaccttctctctctctcttcccggcccaagtcggcccagtccagtccgcagccgcgcgcgcgcgctcgctgtcgctgacaggtgggtcccacctgtcagtcttcgtattcctcgcgccgccgccgccgcccgaaaccctagcgtgcgccgccgctgtctctttccaaattcggccgcgtctttccttctccggtgaaatcaatagaggggaaatgtttcccgagatctcctctacct

SEQ ID NO: 19180 - DNA, 1130 bp, Oryza sativa
ttgcatagacccgacggtagcactggctcaatagaggggatttgcaattataacactgcaaacattaacttttgttataatgacactggacccatattttatagacacagatggacccatttatcatccactcgaagtgttaaaacagcgaagccctcatgtttacagtcccaatattacaattttctcctccatggacagatgaacgggacacgtgtacttggatgttaggaggaaccacatccacgtctcatcacgtggtaccccgtgtgttcctatatgtgcaagtggtggtccctaagtttaatgggaccacatgtcagtaagtacttcaagccatgcgtgcatggcacgtgaccatgcatgccattatgcctcgcatggtgcgcactcacgctccattagcagtgagccgttacactactgctaagctagcttaattagtggaaagaagtaaactaactaacaataggcaggcagcaagccagctataagtggatacagtactaatcgttcgtactttagagtaattaaactaaactaaacttagtaaaattaagtaggcactaatgaccaatcaaatggttaatcgagccatagctaatcaagagagaggatggtcggcttacacggtgacagcgtggcccccgaaggtgtagaggatgttggtggcccccgtgaagtagagcacgatgcttgtgggcccagagtgcgccacaccctccacctgcattattcccaatatatgcactattacaattactatctatcactattactatcattttgttatcataaataagtgacgtttgggactttgatcttatattaaaaaaagatgagtaattttacagttcttgaagatgtatcgtgaggtactattttttatattataaatttgatacattttggtacctaaatactatgaggtaccaaattttatattaaatttttggtacatcatgatacctcctcaagaactataaaactgctatgaatattatgtaagatatatatgtacctgtccgtggatgagggaggcgacggcgatgtaccaggcggtgtaggtggtcatgaggaggccgaggaaggaccaaatgcggtagttgtgtaaaaacaagggggatcca

SEQ ID NO: 19181 - DNA, 1804 bp, Oryza sativa
aattcctgcagccctattatgagattcagattctacatcaattttcgttagcacgtttttaaaacagctaaatggtgctaaacaactaaacttcctatatagaaaaattacttcgacaagtaaatccatttttcaagtttatactaattaaaacttaattaatcataagctaatttttttcgtgtgcacttacttcatcataaccatcatccatctcaaacgggacctataatatatattgatcaaatatatggtaaaaaaagaatcatctcctattcagaataaggtaaaaataatgggcatattccttgtgccataagaccatatagagctagtcaaatgtaatatagtgacatgcatgtttggccatttttagggagatatccggttgatgctcttatgctcctactaggggacaactttgtgctccccaccatgaggaactataggctctatatattatgcatcaatccaaaaccgcgaaagaaaatttttgccaaaacagaaagcccctggctcttgcaaccgataatttttttctccaaagccatgaaattccttagcatggataaatgtgtccccttttagttatctcgtggtgtaactcgttttaagaccgctatatttgatacatatcgtactataaaggctatgtttggaaggagtttttactatctactgttttttttcaaaatctttagctccttaaacgatgtttaagatttttactcaaattatgagaatatatggttgtatcacactaaaaagccataaccatggaaacccataatttccaaaatctcattggccacaccccagttattccttgttactagaatttatcagtttccagaacaggaccaaatacagttgtacattccccctggataactacaatccaaacccaaaaagaaaaaaaaaacaaacaactgtcaccagaaatattaaaaaaataaaaaagtactagctcatattcatggtcaacgagtcaacggtcgtaatccccctcgccgaagaaaacaatataataataaagaaataaaaaaaaaagaaggatcatactccaaagaaggggtactttgcaaccggcccgaatcggacggccaggataacgcccaccctatcttccgggaatctccagagaaaccacggcgaaaacaagaacagcaaacacacgcggccgacgacacggtcaccgcccgtgggccccacctcccctctcccctctctcttctccactcgactcgactcgacgacccacctctccaccaactcgcaactccaccaagcaaaccaaaaaccccaaatcccccaccccgaattcggaattcccccccaaatccctcgccgcccgccgattcagccccgcggagacgcgattctcgaaggaattctggttcccggaggcggagcaggcggagaatcgtttggtttttcttttgggatgggggagggggtgaaggcgatgctggcgcggccgatccagctggccgacgaggtcgccaagcagtgcggcgcggcgcggtgcttccgcgcggagtgcggcgagctcaaggcgcgggcggacaagctcgcggcgttgctccgacaggcggcgcgcgccgacctgtacgaccgccccgccgcgcgcatcatggccggggcgcagcaggcgctcctcaaggcctcctccctcgccgcgcgctgcgccagcggccacccgcgcctcaggcggctcttcacgctcagccccgccgcggggttcccccgcaccgtcgccctcctgacaccgcgctcgagacgtcgcgtggctgctgcgcatctc

SEQ ID NO: 19182 - DNA, 2176 bp, Oryza sativa
acgaaaaggaatcagatgcagtcggtcgtgcaatccgcgatggctgctaagactaagacgaatgggtcgttggttccacccttcaggccacagctgggcacgagtggttctagtggccgtggtgctgtccgggaggtggaggatccggagaccaaggcacggctaaaggccatggcagcgagagctctgtggaagcttgcccgcggtcatctaggtgtctgcaagagcattactgattcgcgtgcactgctctgcttcgcggtgcttcttgagaagggtgatggtggcatgggtactagcgtacagtacttctcagcaatggcaatcatggaaatttcccgtgtcgctgagcacagccttgccctgcgacagtcggctttcaagcctagctctccagcagccaaggctgtcgtcgaccagctgcttcacattgtcagcaagggagactacgatgatctcttgctcccttgcattactgctcttggctgccttgcacgcactttcacagcgagtgagaaccgcgtcatcgctccccttgtggagctgctcgatgagcgtgagccaccagtcattaaggaggccgtgcttgcgctcaccaagttcgcatgcaatgaaaaccacctgcatgtaaaccactgcaaggccatcgtggacagcggtggtgctcgccaccttgtccagctggtgtatctcggtgatgaggtgcagatagaggcactgatactgctctgtttcattgcattgcacgtgccagaaagtgaggagctggctcaagctggtgtgcttgctgtgcttctctgggcatcaaaacaggctcacatgatacaggacatgcgtgtcgatgcactacttccagatgccaagggaaggctggaactcttccagtccagagcctccaggtgattttggcagcaagaccagcagacatgggttagtaatttctttgctgcaatgtgtaattagagtagattttttttttctgttgttcatgattgttctatcggagttttgttctccgtaggttgtacaaatctctagcaatcaatctgtcagtaaaattggttgggattattgaattgtaattcaagaggcattttaaacagattatatgtgtacctgtaaagttggccaaaaatttagctgattgtttttcttgttacttctgtctagttggattgcaagagtgggattctgaagctttggttcctgaccaggctatttataacttttaagcaatttcacattattcagcttcaaaaacaaaagaaaactacacatttaataccaaatttatcacaaaactacacatttaaaatgaagtgtcacaaaactacatgtttagtaactaaattatcataaaactataggcttagaaccaatttaggaacaaaataataatgtgtatagctccaacataacaacggttctagggatttaaactctaaaagctgtagttttgtgataacttcaatattaaatattcagttttgtgatgttaaccttaaatctgtagttttgtgataaattttgtgctaaatatgtagttttgtgacagaacaccttaaatctatagtttcgcgatagtttggtcaaaatacctgtagttctgggaaatttactcaaaatcaaaacactagcatataagtcaactgctcatctacaatttttagaagcatgggaactccaagaaaattgttttaagaaggatcttgcatatcatggtgccctacatattgcgtatgaaaattaattttgattgttttgtattggcagatgcagattgctgaatatgtgattgattttaatgttgcagagcatccctagattgtttttatatattgctactttgttatttttcaaacttatcctactcatatttggagtttggacatttcttcatcgttcaccctgtccaatatgtctagatatttatttatgcttttagcaatgtgctatattagcatttatcagactaaggaacagggcacatcaacaaacagttgatagctgggtcaatactcaatacaacatgtgatttaaaaatactcttgcattttcagtgtatatagacaaccatcattgatacatattttgttatcacaacatgctgaaggttgacgtacaatccgtgtactctaaaagttgaccaacattatttacctatatcagccgtgca

SEQ ID NO: 19183 - DNA, 3962 bp, Oryza sativa
ttatttttgttttacattttttgaaaatgacagctgtacttttgatattgctggatagaacttctcttctgctattcaagcgtcatgtttgtcctattctctccttatctatataatgttgacaagagcaccaccacatgtacaaaacatcaaagtttcccataccagatgacaccaacttacccagctgacaccgacacctgggccccactggaagtcgcaatccagaggagccggcgtgttattgtcagttcttacccaggtgatcagtgtggccaatcaagtgaagcctgctcacctccgcagttcccggggatggcgatgccacactgcttggtgacatagaacaccttatccatgttgatgttgtccctgacgcctgggctgcccaggtaggtgcagacgcagggcacgttgacgcccttcatggaggtgcagcagtcaggtgatggctgcagcttcggcccgtccttctcaacgaacttgtagcaggttgtcttcagcacctcgacatcgttctggcattctgtacctgccgctgctgctgcagtggtgaacactgccaggaggaagatcagcagtgcagccaggctagaagacttgagctgagacatcctggtatgtgttgttctttctgatatcttgaacttctctgattaaaacttggaaacttttgatttgtgcaatgcaaatatttatagagcttttggtgcctgaggttgtcatgctccattcttgcttgggctagttgagcatttcgtcctgcactggtaaccatagaaatgcaatgcttgtgacttgtgaggtgaatggttcatggctacgtgtttgatttagcctgtgcagcagatgcaaatgcaatcggtgtgataatttgttgaaacgagagcatgcggtttagatcttgttgggctatgtgatctactgggccgggcccagttctgctttcctaaagcccatccgtgactgtttgatatgaaattgcattggtataagttcactttgggtccctctatttatcacctagtccgattttcgtccccggtcgcaaaaccgggtacgatgggtcccccaacttaacaaaaccgtttaaataaggtccttcggcggtactgtcttcggttttggctgaggtggtgcctacgtggctccttttgaccaggttttcgtccaacgtgtcgttgacgtggcgcttatgtggcaattagatgaaaaaataataaaacacgtgggacccacgtatcagtttcgcacacaaataataaaaaatgggtgggcccatgtggacccacacgtcatcctcaccaccatatctctatccccctctctctctatcctctctatccatctctctctccaaccgacggagtggagtgggcggcgggcggagtgggcgacggcagagcagaggggcagaggcagagaggggcggagacgaggggtgaagcggcgcgtcgtgggcggagcggccggccgacgggggagaagtcgcagcgcggcggtggccggaggggcgcggggcgccgaccgttgggagcagaggagccgcccgtggcctgtggccgtctgcgggtgcgtgccggcgtccaccttgatgttggtgttgccgttggcgacgaggccatcgaccagggtcttgaggttggcctgcgcgtcgccggcgacgtaagcggagcgggcagaggcgccgcgctcggcttcgacctccatgagcttagagaagacgccaaccatggccgccgtgttgtacgtgcaggcctccgtctgtaggtacgcgccccggtggtcggtgaacacgttgttgccgttgggcccgccgacgacggtgccgtcgaggtcgtgcgacttctccccccgccgcgctgtggaatgaaagcatactgctcggcaactactggactacctggtgaaatagctcttcaaatctacaaacaaaattacggaaaattacagacatgtgaatcaatgacaaattgttcattatacttttgcaaattgcaatgttttcacttgtcatttgtcaaatactcaacaaatgttacatttttatgatgccaaagcctttcctttcccctttctatccatttgtgctgaatcgggctagttgctttgctgccttgcccttgctgacttgttggtgttgctgcctgctcggcttagagctgggctgctacacgcaggcgcacagccgtgcaggccaggtggcaccgcggcactaggagcgggcaagcaccgccgcgccggcctgcagtctgcagaggctcgccacctagcctggacgctgcacccacactgttcatggcttcactcaattcgacgcgattgggattttggaatggggaattttcgaccaacggccggcgttgtgggccgcgccaccgggggcggggagcagcggcggtggtgaggacgggtgcagcttcaagatcctgctcatcagggacttcggtgtcggcaagagccgccctccctgcttcgccggctggagagagaaaagagggagagagagaggatagagagagaggggatagagagaagaggtagtgagcatgacgtgtggatccacatgggcccacaattttttttgttatttgtgtgtgaaactgacatgtgggtcccacgtgttttattattttttcgaatctaattgccacataaacaccccatcaacgacactttggataaagacctagtcaaaagaagccacgtaggtaccacctcagctaaaactggactaaataccgccgagggacctcatttaaacggtttcgtaagttgggggacccatcgtatccggttttgtgacgaggggatgaaaatcggactaggcagggacccaaagtgaacttatttcaattgcatttggaggaatgtaactggactcctttgttatctaatgctcaagtgcaactactggctgtccctctgcatgtgcatgttgtggctgaattgaacatttagcctgcaataaaattggattttctttttacgcatgtgttccttgattatatatatatggggcgtcagaatagcaaatgtatatctgctgataatctttcagttgtgaccacagaatggttaaaattgttgagaaacctgtcgattctactgatcagcacacaagcaaaccaaacacagagttgtggaacacagaaagtatgagcgagtggaagctttatttcttctggatttgagtacaagctacaagaggagaagcaggagaccgaagatcgattgtcctcgccttggaccttctgggccctatttataggcggaggagggtggaggcttacgtcgtaagccttggaccttctggcttgcgtcgtaagccggcttacgccgtaagctggcttctcctgtaagctggcttcctctgtaagctgacttgtgccgtaagctggcttcctctttaagctggcttctagcgtaagctttcttctgtagtaagcttcccacttataatttaattcgtccacaataagataggtttcataacactcccccttggacgaatttgaattatgcgcatgcctcataaaaactcatcccaaaaacctagtgggaaaaaatggtaggagaaaagagtacatggcactttgaatattgtgttgcacctgttgcctcgttaaaaaccttgcgtgagaaaaacccaatggaaaaaaaactcaccaagggaaaaagagtacaacagttgatcaagtcttcaggacttgtttgtgattcttcaggatcataatcatgggctattctcttaattgtttgctccccctgattcttgcaattcactaagtcgtctcatgccgatgccacgaacacatctatgaaaacttgatgctggcagagactttgtaaataaatctgcgagattttcgcatgacttagtttgcaggacatttatttccccgctcttctggagctcatggggataaaagaatttgagagtaatatgctttgtgaaattg

SEQ ID NO: 19184 - DNA, 8464 bp, Oryza sativa
aggatcataagatcccctcggccaccttttgccagcaatagcctgtatacgtcttgggttgcctgcgtagtatacatgggcctgcagattagaggattgcatcggagatatagagtaaacctagcccattagttccatctgtggggagggtaacagcctgctttgctggcttcttttcctcttccttttcgttcaattcttgagaaattgttcttcttaccatcgagtaagagagctgttttctccctaaaagttactacaaatctttatgattttctcattatatagaaaatccgctacaaaccctggcgtacgtgcacaaacatatagggaataagttcactttatgtccctcaatttatcacctgagtctgaaattcatccttaaaccgaaataccagatataacaagtatctcaatttataaaaccggaccacctgagatcctaggcagtattacgtctgattttagttgacgtggcaagttgaatcagcgtgggacacgcgaaccccacatgttagtgactagcattttcttcctcctttctctcatcctatctcttctcctctttctcctgtcctctcctctcttcccaatcccctcctcggcgacggatgacgggaagatggcgtacggtcatcgggtaagtcgtccctcctgaattgcagtgaccttacgccattgacaagcagcatcagccatgccgagaagaagacgagaggcggatgcagaggacgcctctccattgcatctcatccggatgcacagcacgttctatcttcttgtctccaaggtagatcaggggcagtatcaggatgtatcgatttcttattgttcgataggaagatcgaatcagggccggtcctgacattttggaggccctaggcagacttgacgctatgggccttggagttagcccttaaggagttatatctattttttttacttctaatacatacaatatactctataaagcacatataccatagagtgacacaaataaacatttttaacacggtaaataataaatcaagcagtttgcaagttgcgatagagcaatttaatctttaataaataatatcaatagtataattgacaactaaaaataccatagaaacaaattagtatgaacaccttaataggagaccacaaatatcccatgtcccttataaaaaagagctttttcgcgaccttatgagttatgtatagcacccgacaaatgtttctaggtaacattgtaacacctgaagcagtgaaattgcaaagtaaattgatagaggcatagctgcatagagcttctcaattgacttctaggtctgtgacctacctgcagcctgaagaagaggggtgaatgggaaatggccgatgagccgatgacaatcacagatcacgcgggcagggcagggaccagccaccatccaggcagccggcaggaagcatcgacagcgataccagcttgggggcttggccgatgggcgacggcgatcaggcgctataggctagtggcgccgatgcggtctcggcactcacggtggcctctcgcggactagggcatcggcgagacggcgacgaagcgacacggctcggcctgggcctgcgctgcggttctcgtggtgtggggccggtgggcagggcggcaggcgaagcgacgcgcacgcgcactgctccctggctgatcgctgattcgctgagcagttaagggcggcctgaggcgcgcgtctggggctctgggctgtggctaggcctgttggccgggctggggtgggagggggtaagtgatgggccccctctggcctgggccctaggcggtcgcacaacccgcctaggcccagggccggccctggatcgaaaaattcacgattttattgtactcttggacattaatttcttcgggacgtccttttcaagaaatgtcaagggaaaaacagctcagccgagccagccgatcaacatttcggctcctggcttggcccaccgttggaaactcatggagggaagcgaatcaggtttcattatgccgcccgtctctccgccgggcgctgccttcgtttcccaccggctgcagctcgtcgtgctgtccttcatgccactcgtcaccttggaggggattgggaagagaggaggggagagaggaagaatatagtgctagccactgacatatgggaccagcgttcctaccctgactcagcttgtcacgttagctaatactgatgatactactagatttcaggtgatgcggttttgtacattgagggacttcttgtgttggtattttggttagggatgactttcagacttggttaaaaattcagagacttaaagtgaacttattccaacatacgagttgggctgtaagtgtgtagggtgtggtagtcatggacaaaaggggaaaggaaaaagtccactttgactcccttaattgttcaccgaatctaattcgtgacccttaactacaaaaccgggcaggatgactcccccaattattaaaaccagtacaaattgaatccctcagcggttttggagggcggttttgctgacgtggcatgctgacttggcccattatgctgacgtgtcagcccagtcataaggcccacatgcaattgattagggaaaaatataagaaaacgtagggccagcttgtcagggccctcttctctctctatctttaaaaaaaaatagcagagcaactgccgtcggcggcgatggcgatggcggtggtgcggggcggcagcggtggatggcgatggcgatggctgtctgtagcgccgcttcgcctcgtcgccctcctcctcctctttcgtggccgactgctgcgtcgcgcacgccacccttgtggagcgcggcgccgctctagccaaccgcctggaggtggcgcgctcgctcctcggcgagaacgactacaccatcacgcgctgcagatgcgggcccgtgtggcaaatcctccggcgcaaccttgtcgccgagatgctgcacccgtcgcgcgtccgcctggtggggaggccgagggaggatacaacagatcaacagcaactcgtgtttcctggtaacaactgcagagctgagcaggacacaagccgccgcaagatttcatcagtgataatcttcttttgaaaattaatcatcagtgataatcgagcagggcaggcgtatccttgagatccatcccctggaaatgcacatcctgcatgcacatcacaagcaagcaaaaataattcagtcatcacaaacctacacaaagcacacatcaagcttgggaattcacacgcacgcacgtaccgattcgaaatggttgacgtcgcggtggtgcgcctcatcggcgcagacaacgacgacgacgtccttgagcgtggcgtcggcagggagccgccagtagtcgatggcgatcggtggcgtggggacgttctcaatcttgccggcctcgatgtccttgaggtactcggtgtaggagccactgctagaaaaatcatttgttgccacgaaaaaaatcgtgacatcaatactaaaattgtggcaatacatacatgttgccacaattgtaaaatcgttgctagccgtgataataggttattgcaatgatttttattttgtggtaataaatttagatgttgccacggaatggatgtggcaaaaagtcatattgcaacacttcacatcgttgtaataaaaattattgccaccactccatatgtggcattagctttacgtaccaaattaaaagttcaaatattaatctatcatgctatctatttatctacttattttttttgattttgtgtcttggctaggattcgaacccaagacctatccttcacgcgtgctctcctttaccaactcacctacgtatcaattctgttggaaaatgtatatcgttccatttgagcctagctaactgagatttgaatcatagatttgaatatctaaaagatttcaaatgaaaaagttatcacctacaaaattgtagatctcgtcgagagctataattttcatataaaatttgtctcaatccgtgtccatatgaaaaaattaagttaaattatgtgacgacaatttttttattgcaacgaatttgttgatcgtggcaacaaaaaatagtgaaaagtaccatgtactatataaattgccacaaaaattaaaattgtggcgatagaacatgttttttgcaacagtacgattttttgtggcgatatctcattttctatagcaacaaaagtactaaataaaacaacgattgcagatcgttgcaataaaaaataattatttgccacagaaaaattatcattgcaatatattgctacgaattattttttgttgtaataatttggtggcaatagctcaattatgttgtagtgagtggatggcctcctcttcgaggtagccgatgacgcggtccgcgagcttgggggagaggaggtagctgaggaagtaggcattgaagaagacgcgctggtcggcgagcacgagcgtgcgctcgtaccacctcagcttggccacctccatgaaggtcatgaggtgcatctgctcgttctcggcctcctctaacagcgcgcgtatccagccaccgctgtgctcgaagctggtggcgctggctcagtcccgggccttcctctccgactacctcatcaacgccaccaacggtcaccccttcatcttcgagggtgccttcttcctctccctcgccacccgcatcaacttcggcacccccaccaccgaccccgtccgctaccccgacgactgcgtctgggagtccgacatggcgcgcagcccaacttcctcgttgaggtcgcgcccgctaccgcctagacctgaccgaggctcgagagcgaagctcggcggccgtcgcccctcgcccgccgtcgccggcgtggccccccgcccgccgtcgccgccggcggcgccccccgcttgctgaattgggagggagagagagataagggggagattggggaggatgaggaagggatagactgacatgtgggccccacaaagtcttcttctatgtgaatgacgaatgggtcccacgcgtatgtttttagttataatgccacctaagcgtcacgtcaacagcagaccaagtcaacattgccaggtagacgccacatcaacgaaaccactcttcaaaaccgccgagggattcaatttgtactagttttagtaattgggggagtcattctacccggttttctagttaagggtcacgaattagattcgatgaacaattaagggagtctaagtggactttttccaaaggggaaaccaacagacaagttgggctgtaagtggttagcggcccatggaacagccttagttgtgcgtgtgttagctagaagctggttatattacagagtaaattttagaaaaccatgtgtattaagacatgtggcatctaacttaggtattatggttttaaagtttcacaaaatcccatccttatgcgttttgagtgtaaatttacttaaaattcaatagcaatgagagtacataaaaaatttagttattgagtttctattaagattggtaaaaatccaaaataaaatacaaatagtccgatcatcaaacgggtaaaaatttaaaaaggaaatgtgacccgagtcgatcatgtggccaaaaatagaaaatccgagttgatcgtgcgctgctccgaacatgcggttgattacgaattgacattattttcccacgtaacgcagatataggccacgcccacgacgattggatatgggaaaagtctaatttatccactaaactattgggtgagtacgaattaccctcatatcccgaaaatcaaacatatttcaccctccaccactaaaatcggatgaattacccccttgaccaaatccagagtggttttgtcctaccgcgtggtgtctgataaaccaatccaaaaataaataaataaagaaggctacctcacccctctcttttttctctctgtcgaggcagcctacattgtgggtgctcgtggtggtgtccatggcaacagccagccgtccacgccgaggtccatccccttctccctgttgcgcgtctgcaatgccctcctggcctccgccgagctcgatgcccctctcccctcttcctttcttcctcattttggcggtcgaccgacggcggcatggcgcgatgcgatggagtagacggcaggggcaaggcgtgtggcagcatcggtgatgacagagatgacgcggcaaacgcagatatgatgaggacatcacttcgtcggatacactcataacttcacacgttccaatgataattccaagtccaagttcaattcggcctccggagacagcactgacttcaaacggacctagcgccttcatgccaactccgatttgggtgatcttggacttagtggaaagattatctcgctacctttcaaacgcatcttgtctcatgtccaaattcatctcgagtcaacgggaatcgccaaaacaagacagtgctgttgctaaaaccgaacttgggccttgggccttgtaatagactaggcccatctcggaagtgtctccctccacctctacaaattagcacttaaccctagctttattttcctctacaaatagctttatacatcctaaaaaataactgggttttgtttagttgaattttgccaagtgccattcaccttgtctctagtcctcgttcgattagtcggcgactattgattcagagcccccaacagttggtgtgttgatttgccgagtcgattagatctaccacttcaatcgcaactattcctttgtgtttaatcacctattcgcaatatttagattgcatcttatcttgttcttgcagtgttctctcgtttgtattgcagggatcatcaaccgcacgtcacggttggtacgacatcgtttgtggtgtagcgattgcacgacgtcctggacttgttctggttggtagccacgtcgcaaacgtcgcactcgatcaaagcgagagttatcccctcaccagaaaatcaggccacgagagagagcgtcatcaagataggcgcaacaccgagcctccgccgccactctgagttgcctctcctgtccccacccattgccgccgtcctcggctccccctccgtcgtccctgccctacctccgtcgtcctcgctcgccgctgccgtccttagctccccctctgtcgtccccactcgccgccaccgatgcaagttgctccctatcctcgcccgccgccgatcttagttgcctatcccgtccccgccctgcctccgtcgtccccgcccgttgtcgttgttctcagttcaccctctgccatccccgctcgccgccaccgctccgagttgcatcctccatccccgcctaccgctgccatcctcggctcctcctctaccgtcccctcccgacaacgccgctacccactgccaccgtccttggctcccctaccgccatccccacctgctgcctccgctccgagcctcctcccccgccgccgccatcctcggctccctctccgacggctgctcggtgatatagagagagggggagccgagaagaggagagagagagaggattgggagagagagagagagagatagagaggtgaggggaaagagatagagaggatgagactaataggtgggaccttgctgactggattgccacgtaggaccaaaaccactctggtttaagtcagggaggttcttcatttggtattggtagttaagggtgaaaaatgtctggttttcaggtctgaggaggtaattcgtactcacctaatagttcaagggtgtaatcggactttcccttagattaaagtgatgggaagaaattaaaatgtaccattcatcctaaaatataagggattttaatatgatgtcatacggtaatttttttttattttaggacagagcgagtaagtccgatacatgaacattttgaccatcttaaagtgatggttcttaaggttagctgtacgctgttgctttaattttatgctgacacggcgatgatcagagcaagctcgatacatcgcgctagcgccgtgctgatcgtcaaaatccaaaaggctcgtaaaaagcatggccgatcgacatgataatgaaacatgtcattttccatatggataatatatagtactatgttcatatggataagtcgtcgctgtgctgcgaaacttcgtcttgattactactattccagctgcttaatttgcacaactttaattctctttatctagctaagctaggtccatctctctttcttatccttctagagatcaaccacacaaaagggctcgtacgtctccctttttaattccttgcatgcatcctgtcatcatccacctctttctgtcctccatcgattcgatatccaatatggtgtatatggtctttctcctaacacacgtttaattagtatcgtcatgccttacttcagtttcttacttaaattactttttggcacatgatcttctgtctgtccttgcaaaaaagatagcagttgaggggact

SEQ ID NO: 19185 - DNA, 639 bp, Oryza sativa
ctgcgcatggcaatggcattggagcgaacacgtcgaggtcaatgctcttgagaagcacccagctgctggtgcttgcgacgccatcggcgccgccagcctcccgcgcccacagctgcaggctgaacacgtccatcacggcgaggccgagtgcgccgtccggcgaggccatcagctggatgctgctcctcccgtacagagccagagcgtcgggcggcggcggctcgaccacggcgagggtctccttgcccatgtcgagctcgaggatgtcgccgtcggccgtcgtcgagcgcccagtagagcgcgtccccggcgagcgcgctgggcttcttgcccacgtcgccgcagcgcgctgtccccgcggtgatcagcctgccccacgcggcggtctccgacgagtagaggcaggcggacgcgcggccctcgccggtgaacacgaaggcgacgcggaaggagccgtgtcggcgggtgtcctggtcgccaagaaccgcggcgttgcaggcccggacgtggcccgcgaggcggccgaggcggacggagctgcggtggccagtgacggggtcccagacgaggagctggagccagccgggcccgctgcggaggagcacgcggccgtggcggcatcccaggaggctccagtcg

SEQ ID NO: 19186 - DNA, 1507 bp, Oryza sativa
tacggaaacaacctgcggatataggaggagttccggataagaaaagacaaccagagttctacatggaaacgataaggactactcggattgtatccatattggtttccctagttctacttggacaaggggacacctatgggtataaatacaaggccccctaaaaggagaggggatacagacgatcaacacacacccaccatagaagacacaaaacaatatatcaagacacaagatcaacatacaagccaacatacgccaagacaagatgccggatatcgatttcagggataagcacggctagtcccctacggtgtctccagatactgtcaggagagacgaaagcgctatctttgatctcgccgggcacgaactcgaggaggaaggctaccctgttgtcaactacgagtcagaccttcagaccgccatatcgacaacagttagatagactaccccaaatattgtactagtgtgattatgatgaataagagcaatgaccggcatcagccaacaggatgtagggttattacctgacaattcaggggcccgaacctgtataaaaatccctatctccatctcttttacctcagtctcgtgtatatcctagtaccaatgatccccataccatgcgaataccggaatcgcgacatcaaacgtcgacaggagggcaggagccagcgtgggtcaagctgtcaagttgtatgctctctcaccagcacgagtatctcgcttgtggtcaaggtggcctcgacatatcctcgctcatcaacgacctcaccgtcaaaaataccggaggcttgtgtcatccatccaactgcaactgtacctgggattcccacgccggagaggaagaagagaagatatgagaggggcagtgaggtcattttctgtttcttttagtatgttggccgtcaaaagtgataaaatagaaacaatttggtgaatcacgatgacaaacaatcaaatttactgggaaagatggatagcatttgagaatgtgccattcaatagagtggcaaatagtccaaaatctcgcatttgtatggcatgtcacatcaacgccacgtagcaagctaaaatggtccatagctatcttggaccagaatgacacacttttgctggaatggtccgaacagagtagaaaattggagagcaaatcgaatcaaaaaaataatatatgacaaaatgatcttgaatggctctcttggcacttaaagagaaatgttcagacttaattttcactcttaagcaaacggccggcgagcaggtgcctgcctttcactggatatttcggattgttgggccgggcattaccgggccaggatttggctagcttcattcgatgggctatagcccagtctaaaatgcctctcgttgagcactgagcccattgggtttgtacatcgctggcactttcgaagcgcgcgcacctgcgccaagagaggatcgatggtgtgcaccgccaacgcggcatctccgacgcgtgtaacgttaatcgcctcccagcatg

SEQ ID NO: 19187 - DNA, 1112 bp, Oryza sativa
tctagatgccttactccccctaatgttgggaaatggtcctcatcacagatacaatcaggcgtaccgagccgtatgaagatccccagtcataggctcaagatacttgattatggacagtctcataaccaacgtatatccccaacttccggtggggtcctatagaagtacgctgtggtggtggggattacgcagatgggaaatacttggttcttttccacgcactagctgaaggggggatgtactatgatatgcagttggcctgagttggattagtgttgctgcatgcaacacagcatggccccaacaactggttggcagcctacaatcttgcaacagtgtccgtgcaatcaacttgatcctcttgatcaaggactcagctaggccatttcgagtgtggacatgtggtactgaatattctaccttaatgcccatggctaaataataatcatcaaaagccttcgacctgaactcaccagcattatccattcgaatggattgtacgcagctatcagggaagctagcttttagcctgatgatttgggaaattagctttggaaaagcatggttccttgtggacaataggtccacatggctccacctggtagaagcatcaatcaataccatgaaatacctaaacgggcccgacagaggctggataggtccacatatgtcaccttgtattcttgccaggaaaacaggtgactcatccctaatcttcaggagggatggcctagtgatcaacttcccttttgcacaagcagggcaaataaaatcttcaggattagggaagtctttagtttcaacattgtgaccagcaaaattgttgatgattctcctcatcatacccaacccaggatgacccagtctgtcatgccaaactctaaatgactctgggtttctaaatatggatttcatcgcaacatattccttagtgggttttatgtacgtgtagtacaaacccgatggcgatgaagggagcctttccaccacttgcttttgatatccatctatttttgatatgagcagatattcagcatcttgctcaatctcagtttctatatggaaactgtttgcacggatatctctaaagtttaagagggtacgctttgaat

SEQ ID NO: 19188 - DNA, 1713 bp, Oryza sativa
aaggctggacagatggagaacgctaacatggcctgcgcagagatgaaggccatgggattaatgcctgactgctgcaccttcaacattctttcggctggagcatacaagtttgggaaggctgcgttgtttgtacttgatcagcagcagttgcatgaaatgtttggttcacagttgtcaacagatgggatagatatgttgatctgtagactttgttgggatgggcgattggatgatgcctgggagctcctgtgtagcgctattgagaagggtgttcaagtgagcgtttcaggatttaatgcgctgattgctgcatatagcaaggagggatttgatgaagaagcttttgagctatataaaactatgaacaaattaggtcttgcaccatcatcatcaactttgaattacttgataatgggactgtgtaatcgtgggagacttgatcaggcacggctgttcttagaatatatggttagaatgggatattgtgtgattgcatcttttaccatctacttggactcatccttcagagctggtgatgtattaggtgccttgaagtgttgggatgatatgaaaatagttggtttacagcctgattttgttgccttctcggcatatgtcaatggtctttgcagactagattttctagatgaggcttacaatggttttatcgagatgataagaagagggcttgttccaaataattttacttacaactccctcatatctgcattttgtagggctgggaatgtgtctgaagcattgaaattagagcagaagatgaggcagagtggccttgttcctgatatttttacgaggaacattttaattgatggcttttgcagagaagggggattgaacacagctaataaccttttctttggcatgtacagtattggtttaactccagatgttgtgacatataatacaatgctcaatgcatattgccgctctaaggatattaatggtgccatgattttcatgaataagatgcttgcagatggctgtgaacctgtatattttcacatataatatttggatgcacagcttgtgtagcaaccatctgctgaatcgagcaatgatgttactggatgaattagctgcaacggattgtgctcctaattctgttacatacaacacattgatggatgggatctgcagcgatgttctagatcgggccatgattctgactggcagactgattaagttggcttttcaacccaacactgtcacaattaacattttgttttctcatttctgcaagaatggttttggaaagcgggctcttgtgtgggctgagaagctgagagatgattccttcaattttgatgatgctacaaggaatatacttgactgggcatacagggatatggaggatgatcctcatgctagcagtgcagacattgataagtgcctatttctcgagttcttaatgctcatgacatgcacaactattcgcaacagcagatccttcaagtttacacatgtacctataaatacagtttttggtcattctggcagaaaaagtttggatactggatgatcattgaaatgttgaattcatatccgcgtgagctactggataattttcaggtcatggacagctctgctgcaggagtaacatattcactgttatgctttttcatgactgacagtgcgataagatgcaatggctactgttcacattgttactgtcaaatggaaagtcaaaggatt

SEQ ID NO: 19189 - DNA, 706 bp, Oryza sativa
cccccattttttgtggaactatggggctgagctaagaaggtctaatccaggcagttgcttctttttgaacttggtagacagttgtttcagcacatgttacatgtcctttgatgcatgtaagagagggtctttgagtggatgtaggcctttgatatgtttggatggttgccacatcaagactaaatttggtggacagatcctaacagcagtaggtattgaccctaatgattgcatatatccaattgcaatagttgtggttgagacagagtcattgaggtcttggagatggtttctacagaccctaaaggaagacctgggcattgacaatacctacccatggacaataatgactgataagcaaaaggtatacctgttctttatttttcttataggttacataacaagttttgttcttataatctgacatatttcaaattgttcttatgtttgtttttacataacacagggtcttataccagctgtccaacagattttccctgattcagaacacagattctgtgttagacatctgtactccaattttcaggtacatttcaaaggtgagaatctgaaaaaccagttatgggcatgtgctagatcaagttcagaggttgagtggaatgccaacatggaagaaatgaaatctcttaatcaggatgcatatgagtggcttcaaaagatgcctcctaaaacttgggtcaaagct

SEQ ID NO: 19190 - DNA, 2056 bp, Oryza sativa
cggtacacaattaccagtagtactagtataccatggcaaagagcgaccgaggaggctaggcccatcccacccatacggaccggactggacccgtcacgtccatctcctctctcgtcgtgggcccccaccgcatttgcgcctcgatgtccgcgccctcaacaatcacatcgcatgtgcccccctctcctcgacacccccatcgcttctgtacattcctactccactccggtagcattacgattagcatcaacattagttacttcagctaagtgatttagtcgtactattagcacgattttactgttaattggttaagtaaataattagtatgctgtagtagtgctaattaagtatagtagtagtagattagtagtataaaaataatgtaatagtgcgtgccgtgcccggctgcccgtgtgccgggtcgccctccctcgagcgacgaatctgccggcccttaaacaagaaacaaaaccacacgactaatggcatgtacaatgatttttattaacggtctctctttattatcatacaagcatattggttgatgtggactagagagaaaaaaaaaagagaaaaatgtttgctacgtataaaagatgattgctccgtatgagtatgagaacgatacagagtcgactcttagtatttattagaaatttttttattgcattgagtgtaataaaggaaagatgactactaagaaagtattttgttatattaatggttagataccgtattatcttaactattgtaacatgatggcctctaattaacatagaggccttactgagtctctcccttggtacttgccctaatctcatcgtgaaaagcctcaaaacctgcaattaactaacatcctaattaatcaagtaattaatcaacaatctacagcgtacaaccgatacagtctaccactaccccctacagtacaacaacaaagctcatcaaaaatacccccactcacactagtcaacacatcgtctcatgactaaaatgtttttgttactactacaatggcgccgacatggccgccgggcatcaccggagcacgagcagccgcagggcgtggaccaagaacagcgccagcgccgcggcgggcgacggccgggacagggacgccgccgccgtcagctcgccggtggccatgttggcgatccacgtctcgctgccgctcagcaccacgccctcttcgccgccgccgccggcgtcgccgcccatcggcatcggcatgctggtgtccgggacggcgtccgtgaacgtcgtccccggcatcgtcgtcgccgtcgccgtcccgggcatcgtcgccccaggcatcgccgtcgccgtcgttggcgtcgtcggcgtccccgtccccggcatcatcgccgccggcgtcggcgtcgccgtcgtcgacttctggctgccgctgcgcaccacgtgacatggaaagagaaagaacaagcgcacatggtcagctcacgagcaatgtgtgtatatgcatctggaatcaaatccatggctgcaagcaaaatcaacagtaaactaatcgcgcgaaacaaaacaaaagctcgggtttgcacttttcttttcaccctatctgcaactaattaactaaagataatgccaagatctcctccacctaattactactacactacaatccttgcactttctttccatttctagctcacaacatgaacagctcactaagcatccagatttgcagctcagatcactctctgacagtgacagtgagtgagtgacagtagctagcagacagcagtggaaagagcagatgaatggcgggagagaggtgaaccttggggaggaggcggggcagaaggtgagggtgtagtcggggccgccggagcaggtgaaggtggaggtggggtcgtcgaaggcgtagctgtaggagcgggggcacgccgacttgaacacctgcgagtacgccgtcggccggcacgtcgacgggttcgcgaacgcgccgctgcagcagaactccggccgcccgaacgcgtcgcacgcgctccggcacgccgcgccgccgcccgcccggagctccgcggggcacatc

SEQ ID NO: 19191 - DNA, 2012 bp, Oryza sativa
ccgcccgcgccacgcccggggggagctcgaaccccgtggtggccagccgcgcgctcccggcgttcgacagcacgcccggccacaccgtgtccgtgcaccggttgacgaacgtgaacgtcgccgcctccaccccccaatctgcgcacacacacacacacaaaacaaaccatgccgccattaccaaccatccacaacaacaacaacaagaacaagatcaaacatcacagatttacctacctctccataagaccaagaagagcacaagaacggcggtggcagatctcggcaaccaccccatcgccattttcttgatgcaatgcaaatgcaatgcaagaagcgtgcagttgtcagagattcaggcacagagcagagcagtggagttactccacttcacttcacttctgcagtgcactaatgcagagagagagagagaggtaggggacagccaccacaagagcacttgggagtcttggagatggagaggagagagtcacaaggatggaggagaggggaatctttgggatgggtacaaggttatacagggagagtgggggcaaatggctttcttttttttttttttaccttgcttttggggcaggagtgtacatatgcatgtatgatcatgtttcctgggtaaaagtgagcttgggaatgggccttggttgttgattgttcctggggcataggctttcttcttttttttttactttttattatcctccccatctgtgtatattttgttatgggattgacaagggttagggtagagtgagtggattttgaggtccccctcccccctagattgaatggggggaaatatataggattttgatactaagtagcaaatatataggattttgatactaagtagaagtataaaacagaagttgcaaaacacattagcttaagagtttaagaaggaaaagaagactagttggaattttctaatcccaccattttatattatggggttgttcagattatagtcaaaataaacctcactaaattttggcaatacaaaaaatttagtaagttgacaatattaccaaaattttggcattatttcttacgcatttatgaaagtttggcaaaaagattttggcattatttcttacgcatttatgaaagtttggcaaaaagttaaatgtatgtacattttggaaactttaccaaaaatgtatggtttaaaatgacatcatatgaactgcccctgtaagttgtttttgatttttttttctaatcaaatttctttaggttttaggtttgactaagtttatagaaaaaattgtaacatctacaacatcaaattagtttcattaaatataacatcaaatatgttttttatgttagaaatgttgttgtatttttttataaatttaatcaaacttgaaatagtttgactaataaaaaaaagttaatgtgacttatgtatttaaaacagagggagtaatactattaggttgaacctcaatactaatttttatccaaaatctcattgtcttgagccatttcaattgaattcgtaggagcggcgatcctttgctccaagtgaaaatggaataaggattattttttgtaagaaatgttatgtactgatcgatcgtgcatatagtgacagctctagttatcatccatgcgtgttctatttattagaacatgcggcttttattagttggtctaatgctgattataagccatataacttgttaaaaaaatatgatttgtggataaacttatgtatgttgtatgtatatttccttggcgattttaaaaaccaatgctaaaaaataaactttgataaaaaaatcaaaatcaagtttttaaattcaaaaattaacagctgaagggcaaatgacgaggtgatgagtttctcgaatgcaatgtaagtaagaaatgaagggttccatttgaaatatgcagaacttttttccatgactctacataaattgtactaacttatataaaagttcttcaaaatctccatttgaaaccatgaatttgataggacttct

SEQ ID NO: 19192 - DNA, 2310 bp, Oryza sativa
tggataccacaatttgttgaatgacctagctttttaaactgctaataggaccagtaaattgtggcgaatgatctagaagttcatttcttcttttgcttctgcaagtattttttttatacatgttttcttagatggcttcccccatatatgttccatatttggcacagtgtttcatagatttctagttatgattttaacttaatattggagtcaatcatctgctttattgtatgtatctgatggttagtttgtttctttatgctttgaatgcaaagtgcttcaagatcgtaagatgggtatgcactgatcttaggtttagaatttctacttgtggcataacaatatttgattgctgcatcctgatagttcctgtgattggctttgctcaaaccactgatcttatgtttaacattgttgtatgagtgcctttggtactattcatatctgtgctcagtattgatgttctcctcgatgtcacttcttttgcatatgactttcacaaacagtggaaagcctaaggactatgatgtctgtgaaggaaccaacggatggccatgcggtagatccggaaaaatcctctgaatcaagtgtaggagtttgttcaaaggagctatctgacagttccagtatttcctgttgtagagagaaccaacgggacttaaactgcaaagaagtcctacacgaatcatcaatcaatagctcccctaaccccaccgtttctctcatttttttggattatttttgggctccttgtttaatttacacgttgtcttttactgttttgggctcctcatgcagattagcttgacgctttgccttgttgtgtccggtaccatcaaccgggtgttggatgtttatgccgagcatgtatgctctatgcgttttttcaaaaaaagaaaaactctcaggaaacaacgaagtagtcctccttattctaatttttacgaaaaaggacttacctttatatgaaatacaatgtaatcccaaaaagtacgagggcattctcaaaaaaacagatcctaatccaatccctcctcttactctgctgccaacccatccccaacacgcaacatctctctgcccaatccgccatccccatccatcaggctaatccatgcggcctcctcccggccgggggcaaggacggcgccggcgtttacaaagacgacggagcaaggggacgacatgcctcctgtgctgacctcctctaccgtgatggcctcctcgaccttgtggttgcgtccacggggggagggaggaggcggcacccgcccgagctgccgccggtgctcccctcctccttctccatccacttgtggtgacggcggcggtggcggcggggggagggcagatccggcgcccgacgccggcggatccgccgtcgtgccccctcccttcccttgtggcggcagtggcgaaggtacctacgttggcggcagagccggccgcgcgtctgccgccgatgcccttccctcatggcggcgtcggaccggccgccggcgcaggactgccatacgtcttcccccgtcgccgcgttgcctctccgtcctctcctccgcagcttcccaactgttcccctctcaactctcgacctctcctctctacgcggaacaccatgaccgtcgccgccgaggtcgacgcatcccctgacggagaggagaggaggaggcaagcttgcaatcgcacaaccatctatcgatttctcccttccttctctttcttctttctttctttctttcgtttccccctctcacatgtcaggttattttttctcctcatcctctccggatgatttcacttttgctcgaaatctctcatgttgttgtgttgaaggcggcgaagggggaaactttggtggtggtggtggccggagaggaggatggcggcagcggcagtgacggcggcgggtacgacaaggccgggatggactccggcaagtacgtgcagtacacgccggatcaggtggaggcgctggagcgggtgtacgccgagtgccccaagcccagcttctgtcgccgccagcagtcgccaacatcgagcccaagcagaagatcaaggtctggttcccaaaacagaaggtgagcaaaagcatgcagggatatactatcaaactggtttgccttctgtgtgtctggctgtgaaatgttctggacaaattggttgacatggagcaatagcaatagtagtgttcaattgtttgccttggttgtgcatactctgcttcaactatatttaggaattgcaagtctatgtatttatttgttttgttcctttcttgcataatggaacaacctttatataatcaaggaa

SEQ ID NO: 19193 - DNA, 1528 bp, Oryza sativa
cagggtcttttgttttttactgaaccttatcccacataactagttatatatctagtttttaagcccaacagcacaattaccatacttctaagcaatataaaatatttcttgctgctagctacatgatgatgcatataattttgaactataactaatctttctacttgtcagctaaatcaaaatatttataccctattggttacacatgttctacaactgaaattattatatgttccttttactgattcagagatgctcttgttcatattctttttttttaataatggaaatgggctacatctccggcctctgcccgtaggcacacagccaaaaaattcagacgtgaacagaaaagttaaaaaaaggcgagatgggacaaacccctaacttctgccgatgatatgatctactaaaataatatttttttcaaaatcacgtgaattctatcacgaaattctgtaggtactacgccatccaaactggaataaaagttccttggctactaattctaagcgtgtagcaccattgcgcatagtatcctgttgttcctgtgaaagcatcatacaccaagagtggagccaattggaacacatgaagataacctgcatgatgttagacatttttttatggttaaaaactatatcattacggcaacgccaaattgaccaacataaagctccaaacaaaatcattttttttgtgggtctaggtactccccttagccagtcaccaaaaatatcttttgcattgtggggagggggatgttgaaggcaaagaagacacatcaccaagcaaaacgtgcaatatgacagtcaaagaaaagatgttggatggtctcttgtgtattacaaaaacaacattgcttgtttcccctctaatttctctttatgagattatctttcgtcaagattacttttttttgtgaagaaaccacataaatactttgatttttagtggtacctttacctcccataagatcctcttgtggattcttacattggaattgatgatcgcattatacatggatttgaccgaaaaatggccatttttatgtagcgaccaaataaagcaatcattttcatttgacagggttatgttagctagtcgagagatcaaattattccactcaactaactttggtcctacaattgatcgtcggaatgaaacattcaacggtgttgtgctcataacctctgccaaagtagaatgtcttttttggaccacattgtacagagaaggatattgatatttgagaggttgcaagcccaaccatgtgtcttcccaaaatcttatttccatcccattaccaggtttaaaagatccatactgaaaaaaatgatcttttactttcattaggcaagcccaaccatgtgtcttcccaaaatcttatttccatcccattaacaggtttaaaagatccatactgaaataattgatcttttactttcattaggccagcccaaaattgggatgttcctggtttgtgtgacatgtgggagaggggttcaccctttaagtacttgttgcg

SEQ ID NO: 19194 - DNA, 2882 bp, Oryza sativa
atcgtggattctgagtcgtcgccgccgctgctagggttccagatgagatggaatcctctctctctatatctcgcggtgatgttttagggtcaccataatccgaaattgctaattagcgcccagttgcgctcccccctccccgcgcgcgactgggcacgtggcgcgatgggggagggggagggctgagcgacgcgatgggggaggggtcacgtggcgctggttggttttttttcggttttttccgtttggtttttttccggttttggttttttttcttttccttttttgcggttttcctttcaggttttttctttctgatttttttatatatacgtatataaactttttatatgtacgtatacaaagtttgtatacatgtatacaaactttgtatatacacatacaaactttgtatatgcatgtatataaagtttatatacaaacttttgtatacgtacatatacaatgtttgtatatgtgatgttttttttttgttttttcaattttttaatacgtacatatacaaagtatacaaagtttgtacacatcgtatataaagtttgtacatgtatatatttcttttgatacattagaaatatatattttttatagtagtagtactaatagttatagtagtagtgtagtactagtagtgtactgtagtagtactagtactactagggggcaccgcacggcaggctgggcgtgcgtccagtcgcttgtggcatcatcaatgtttactacctactttatgaataagggtgggccctgcatcagtgggtattagttgttgttgtagccacaatggtgaaagaataaaagtgggtagtaagctggaccccacaatcactagccatgagagaaatcatttgtttattccttatgactaggtagtaagtatatgacctggtattagttacttactactcccacaatgtatacaacctggtagtagtagtattttattctttattatccactttagatgtacattgtagatgctctgagtggatgtaaatccggctcctctaactgctagtaaagagtatacaaaacagagttaaactaggaccactaggagggatatttcttgcaattgtctgtagcaggttcagtcacgttggcgacaaaaaaactaaaaaagtcacaaaagaataaaagcaaaacaagtaattcctccgttttacgatgtaagtcattttaacattttcattaatatgaatgtggaaaatggtagaacgatttatattgtgaaacggaggggtagatatttagatgtgaagcatttacacatcatccatattttgctcctcaattttgtactacttatcgtacttccttgtacgtgcgattccattcattacttcttgtttgggtaaagactatcttatcagcttaagtgattgcgatgtgttacccacaccatttaactcgaatggataaaagtcatgtgacaccaacatcattaaatcttaactaattaaaagattcatatttttccgttcgtcacatgattttcgtccgtatgcacgatttttcacccgtccgtgcgatccgtccctcccagagtccgagtctgtattaaaaaaaaatccccgagctagatccccaaatcaatcaatcaaccagacaaccaaaaacaacacgaaaataccaaatttaaccttaacctcatgaatttgatcaccacaagaaacctaatacccatgtatttcctccctcccaatccgatccgatccggcaatacagaaagtcaaacaaaggcaatcatgtatgaatttgctggcaaacaagaggcagcaggaggcacgtcgggttgcaggcgacgtgcggcggcggaagtgtttggcgcggtcgttgggcttgttgtaggatcgagatgtcgactagaggggggtgaataggcgatttaaaattaaatgacacctaatcaaaactaacctaagttactaggctcggtgagggacaagactaactaagcaactaagttatgttttgcaatcctggggtgaaagtggctcaagtatatcactaggaaagtaaatcacacttcctaagtctagtttagcaatcctagggtgaaatgatctctagtatgtctctagaaatataaattgcacaaatgtaaatgcaacaagtaaatgagacaaggagacgagatttttgaccgaggttcggaaactcgccggtttcctactccccattgaggcgatctcaactccaccgctcaaccacgaagccaccgtacgcccccttcgtcaaggggtgggcaaggcgggagccggcccacggagaggactacccaagcctcgatcactagggtagttcttccttcactccgaaggtggtgaacttcaaaccactcacaaaccggcaccgggcctcctccacaattttctcggagaggtcaccgggaaactcctccacaagccgtctaggaggcggcaacctccaagagtaacaagcaatgacccggcgtggagataatcaatcaagtgccacactagctctacaatggaagcaaatgcacttgactcttggctagaacaacctcaaccactacaatggatgaacactaagctcaaaggtgtgtgagagaggtgcaaggggtgtatgcaattgaattgggtgccaagagaatccccttgttgctagagggggagtatttatactcccaccaaccaaaactagccgttgggggcgaaatcccccaactcagtgctctgccggtctgaccggaggtatgtggccggtcagaccatactactctacaacagctagttttctagccgttgcagggctgtcattgggccccactgcctaggccggtcagaccgacttggggtggccggccaaacgggcctcggtaaagtagaccgcca

SEQ ID NO: 19195 - DNA, 3556 bp, Oryza sativa
caattagcgctgtcattaattaccaaaattaacaccgggggcctagatgcttcacttgtggacaagctcgacgcgggccggcggcagggatagcatcaaggcgaccggcgcatttggtggcggcgtggctctgaagcccttcctcctgctagatctggcggagggagggcgcctctgggcggccgccgctcctcccgccgcacaccgctgccgtggaggggagggcgcgaccatcactaccgatgccgcctcccgccgctgggccgcaccgtctccacctgccgccgccacctgtcgtccgccgcctcccctcttgcgccgcggcctgccgcctcggctccgagagagaggagagcaaaacgagagagaagaccgacagagaggagaggaaaacgagagagccttatttcctcggtgggccccgccgaggggagggcgccgtcagccgggcggagggcgccgtgcgagggggacgggaagcggcgcactggtgaggggagaggggagggcgtcgctggctgcgacggcagtgggggagagaacaccaagaaagaggaaaaagaatggaggagagagggaggataagggaagtcgggggaaaacgagaagatgaggagacaggaaggatcgagaggcgccgctcgctccgcttgctctctcggtgataagtatcagatctgacgggcctttctttttaaaaaaaagagcactctgtattttaaaaaaacaacacaagtataccatataatcggcacatatagggatttataggggttggtttttaatttttttcggtttaaagtctaatgggtctttcttttacaacttttttatttctataaggaatatttttttaagggctcatatcataaaaactaaatcctaatcatctactatttttatatttgttataattttagtttacccgtagcaacgcacgggtatctatttattaaaattgtttaaataataaaaaaattcttggcctgtccgtctgctctctttttcctatgtccttgtccttttattttgtcccctcattgtctaatcttctttcattttttatgtcaacttattaatatttgacctcaaatacaatttgtaaataaaaaaacaatactcactctcacaaaattaataagatttatttttaagatttgttaaactccacacatttttattaggtaacaatacacaggtacattcgcataaatgtaaagtgagtatagtttaacttgataggtttcttgtggtggaaccagtcaacctgcattcaaatatttgatttgacacgggtgctcgaggcgttcgtggtaacttcgtcaatctaaatactcgtgttgtgagtgcgtttgcactatgtgtttctaaaaatatatatattctcgcaattcaaagtacattgagtacaaaaattccactcgtgttctacataaaaaaaaatatttccgttcatgatacaaattttcatccgtcgccttttgggcaaagacagtcgcattattcgtccatccattttctctcatgctacaaatcatccaaactaaacatcatttctacaaatatagagcagattatttatctaaaagcaaacaatttttttagcagattagttgactaaaccaaacaacaccttttgtcactgtacacattccgtaatcacccggtgcaacgcacgggcacttttgctagttaaatggataaaatttagaaatttattcgtgtcgttttccgaacgcaaattgcagattgttgactccatctggtcttctcccccaatttcttgctcagttttttctacacccagttgtacgcaggttacttattggatcgatcatgcatatcaatgtgttgaccagttcttgatgcatatacaattgtgtgtcatctcctaccttacaataacaactaatctggcctgttgcattgcaatcagagcttccgaccttgcaaagaatgagctgctaaaagcatttcagtgacagctcgagagtgtgtccaaacatgggggtttctccatggattatcatcttcttgttgagtgttattgtgctggtttttgtcgcttcggccgacacgaacgcaagacagtaagtatagttcagttcctcttcagtatttgttgctgcagtgctaattttgatgttcttcttgtctatctctgcagctgctggcctcaatgggattgcaggtagctgggacacggacaccaaaccatcgaactgggggaatggcaacgatccatgtggagacaaatggatcgggataatttgcaccgggaaccgggtcacgtccatgttagtatatcagcatcagagatttgtatatgtccatggagtgatttttttttcttgcaattatgcagtaatatgagtaacaaagatcactcatgttgtcttcttgtttcatggtgtttttacagaagactgtcaagttttggattgtccgggacgctttccggggacattcagtccttatcagaattgcagtacctgtatgtattctcttctctctgtagtttgagcactttggattgcgaattaggcgtaaacatgtgcatagttggaaatttggaaatttatgcaaacttctgaaacgcttctgtttttgttgcagggacttatcctacaacaagaacttgcgtggaccccttccttcaaccattggaaccttgagcaagctccaaaacttgtgagtagtttaactttggagaagttcagttagtctgctaacttgagatttttcagtcagttcatggattcttgtttgacttgtcccctctcatttctctgcagaattcttgttggctgcagctttactggtgaaataccaaaagagataggccagctctcaaacctgatatttctgtagggaacttagacctgattcttgattatgtctaaaatcttaggcctgcggtcgcattccctgaacttctctagatcatatctaatctgaaaatagaatacatctaatagatttatagtctggttgaaaaatgttttaatataaactccatcatttgaaaaataaacaatttcgaactttattggttggacttttacctcagaatttaaagttcacctagtgatgtagattgacatgatggtaacattgtatattttaatcctaattttaaaatatggcaggtaagattatttcacttattagccaaccatgcttatacagagtatccattatctaaaaaaatgcttgtacagagtaaacagcaaggtaaaaattaattaatttcctcctgtgagagtattacctccattgggataataggaataacaaccaaatggatggcctaaaaagcttaactacaaaaaaaatcctataagcttgtaacaagttacgaacttgtatctggacatttagaaagataagtgtgatgcagttaaaccttttcccttttgggataatcaagtaccttaggtatggaggaggtggttatctggttttattagttggtaatattgaattctcaggcctggtgttcatctattatattattaaaacaacctttacagaagtcaccatattcaccgtgaaa

SEQ ID NO: 19196 - DNA, 2009 bp, Oryza sativa
gcatatatgacaactcgacgatttacataaataggattagagtatcatgaagatgtcagcactaatcacgagaacgcaagccgccataacaagttttacctcttgccggagatcgaacccgatgcagcccgacttgaaagcaagaattcgtcgaaacaaaaatagaaaaggtggcgatgcgccaaaagtgttattaaactgattgttcttcatttacaaggtcttgggtcatatttatacccaaaatacataatatgtccttgccggatacgactccaaatctgttacaactctaagatacgaacaagtcttttaggcaaacacttgccgacaaatatctctaaagaaactattcaaaatactctagttaatagatacaattgcccctttttcggatttatcccaatcgtggaaatacttgctcagcacatcaatcgatcccgaagatgattctagaaccaccttaccaagatcggctacatcggctgttctttgtccgatccaatgtcagccgatgcagacgttagccgacgtgcccccgtagccgacacgtactctgtttatgagaaacgatctcctatcaaatccgcttcgactttagctttgaatttgatgcatgatttaccaaatttggtcatcaacagggtcgagctatactacagatcaagcaattacccactcccgcttgtggtaagcgttgtatgtcttccagggtttcccgtgaactggtccttaattgctataggtgcgactagcaaaaccatgcacccacaaccaccattcagtcgcattttagttggataattacgaccaatgaaacattataacgccccaattttcggtcgggattaaaaatcaattaataatgcatttccagaaattatattaaaaattaaatcaatttaatcaagtgacatagtgagggaattaaaaatttcctttaaaaatcatggccgaaaatattttgtaatattctctgtgccctaatgtactctctggatttttccacgaattttcagagctcaagaaataattttaaagttacaaagttcatttaatcaattaaaataaaagcaaacaattttaaatctccatccttgtctttgggccgctatcggaccaatcctccatcccctccccgcggccttcctactcctctcccttaccaggctgtcggcccagcttggtccctccctcgcaagtccatgccgcctcccttctcctccctcctctccccgagttgcctacagatgggcccatattgccgggctctccttgaacctctagcctgggctggcagccgccacggccgcctgagccgcccacgtcgccgcctcctccagctccccctcgccctctcccgtgcgggcccgacgctgccccactccctccactctccttcccccactcccttcgcggaattcggcgccgtgccgccgcctctctctccccacgatgccgctccacgttgccgccacgcccggccacggttttccctccccgagcctataaaatccatccccgggatcccctcgtccgtttcctcctcctccccgagcttctcacgcccccttccgctctctccacgccgcctgccatttccgccgcactccggcgagcttcggccacgtgccaccgccgctcagccgtcctcgttccgtgccgcttgtaccaccagcatcgccactccttgccgcaccttggcctccgctccgcgccttcaatctgccgccgaagcaccacttccaccgccgacccgagctccaccaccgcccgccacacttcagccgcctattgccgccatccccgtctacctcaggttgtgccacctatttccctctctccaccgccgaatccccacctccattgcaaacccgaggctaccgccacattcgtcgcctccggtcaccgtttgccgccgctcccggccatcctgagccgcgccgtggccacctctggcgccgccgcatacatccgcaccttggccgtcgctcctcaccgctggaatc

SEQ ID NO: 19197 - DNA, 1804 bp, Oryza sativa
gtgtgcatgaaagtatatttaacaatgaatcaaatgatatgaaaagaataaataattacttaaatttttcgaataagacgaatggtcaaacacgtactaaaaagtcaacggtgtcaaacattttgaaacggatggagtattatttaaatcacaccaaatgtcacatgacactctaactaataccactagtaaatgtgttactaccccaacatagtgcgttcgtaatgatctttggtcagacacgaaatcgttagccgaatactagtagcttttgagaagaatatagaatggcgagttttgtggacaagaaaaacgtgcaagttgaacccatcattacacaatatgtgaagaatgccgccttttttatttatgcccaagtccactgaattggaactgtccttatctgcattagcgatgcgatcacgtcagagctagctccttgtacccttcgtactagcaacaatgatgctgtactagtactacaaatccctttcaaatcactagtaactaatctcatgcaaaatcaaaccctacatacataatctgattttggtgtaacaaagaatgaacgaatcatccgtctccgccccaacaaaatcacctaataaatacactaaaatccccccaaaaaaatcaaaaagaattactaaaactataatcatcgatatctaggtcaaccctgtaacagagctcggtcaacactgtcttcctccaggggcccactgcgcagtggagcgcagccaggaggcggccgccggcggccaacctgctccattgcgccgccgtgtgtgtacgtggacattttgacgccgacgccgacgtgccaggctgccagccaaggcggctcaaagcagagcggcgagagcgacggcggcgaccgagaatacggcggcggcaatggaggagtaagccgaagtggtcgtcgcgccgctggattgcgggcttccgccgccgccgccgaagtagaccatggtgtcgttgagctgctgcagcccggcggcctgcgggttctgccccgacgacttcacgctgttcacaacaaaaacaacacgattagcaatatgaccaaaccaagttactctcactgacaggtggggcacaccatcaaaccttactaaggttgggaccagccgtagtaaatgagctgagtactttgggtccagttgtcagtgacgtggaaatagcgtcaaaagttgaccacattggggcccactttgtcaattgttttgttagttaatgataaacgtgcagtgcggccacatgggccccacgtgtcagttctagccgttttttatccgttactagccgttagcaccatcaccacacctcctcgaaatggctcacctaacctctttctttttgtcagcttcccctctcgcacacccaaccaaggtcaaaaatccaactaaattaacgtgatcaaatccaggaataataataataataataacaacgttttctttctttaattgcgacttactagtactccgtaactgctaattactggagtagtaagaattttctttttttaactagcggggtcattatttactattgcaattgcggattttatttattttatttttacctggtgggagcggcggggcagaaggtgatggcgtagtctgtggcgccggcggcgcaggtgaaggtggaggtggagtcgtcgtaggcgtagctgtaggcgcgagggcacgccgccttgaagaactccgagtacgccgacggccggcacgtgttcgggttcccgtacgcgccgctgcagcagtactccgccgacccgaacgcctcgcacgcgctccgg

SEQ ID NO: 19198 - DNA, 814 bp, Oryza sativa
gtatatttaacgatgaatcaaatgataggaaaataattaattattacttatgtcagggttatggataccacatacctaatagtagttgactaaatctcggcagggcccaccacataccatgtcctatacggaaacaacctgcggatataggaggagttccggataaggaaagacaaccagagttctacatggaaacgataagaattactcggattgtatccatattagtttcccagttctacttggacaagggaacacctatgggtataaatacaaggccccctaggaggagaggggagacacgaccaacacaatcaacagacacccaccatagatcaagacacaagatcaacatacaagccaacatacgccaacacaagacgccggatatcgacatcagagacatacctagatcgaccctatccggtacctacagaggccggccgtagggatctagcgctgtctttgatctcgccgggcacggattcgaggacgaagactaccctgttgtcgactacaagtcagaccttcaaaccgccatgtcgacaacagttagataggctaccccaaatattgtactggtgtgattatggtgaataagagcaataccggcttcggccaacaggatgtagggttattacctgacaattcaggggcccgaacctgtataaaaatccctgtctccatctcttttacctcagtctcgcgtatactctagtaccaacgatccccataccatgcaaataccggaatcgcgacatcaaacgtcgacaatttattttttaatattgacttaattagttaacggtgtcaa

SEQ ID NO: 19199 - DNA, 1319 bp, Oryza sativa
aagagatcgatttgacaatcagagagctatatagaaagtagtttaaatccatgaatttggctatctaatacagtactactaatctaggggggcaaagtatcttggaccagtagctagccagccatgacagaaaaaagccataaggcattcatgcacatatatacatagttaggggcggatccagtatgggggcggcggggtctcgagcttccactactgacgtgaagattattagagccctacgaagaccccactaattttttttaccatatatagatgggaggggactgtaactctatctagtttgctcagacccaccgttatttctttctagatccgccactgtacatagtcatatgtactgttgccaaaccatttccttcacgtcggtatatataaacggcatgatcgagtgaaacgaatcagggcatatcaatcactttccttaccactttacgacggctgctgtaattaagctcaggttccagtttgactagctagcagccgtgtgattgatcagtctaatcaataaggaatcatcttaactactgttacagtacgattcgttacagtatcatacatgcatgcacctgccgcgtaactactgttgttgactaattaagcagccgcgaaaattactccgaaattaaaatgagttcgatatatagagaggatactactccctatgactaaaaaactttctttgaaggtttttcttgcaaaaactgtctttttaaataagatctattagaactcgttaatattattttaacatgtttcttctcgttttctctatcaaaccagcaataccctatcatgttctcctttttccttattctctttcatattaatgaagggtataatagaatgttagtcatcctcttactttaataaccaattaaaacatcaattaaaggctagtaattaactatattaatcctagctaactggactttcaagccagttagcttttttttattattctattccattatattaaaaaaaggaaaaagtacgaattaccctcccccgaactatcgcggttgtctgaattaccccctgaaccacaaaaccggacattcttcatcatgaactatacaaaccggacgaattacccccctcgacccaatccgcggtggttttggtctacgtggcatatgcgtggcagtctagtcagcattctatataaaaaaaatatggggcctacatgtcatacgcttctctctgtttctctcactctcctccctcttgaggccgccgccctcagccgctgcccctgcctgccgctgaccgtgagagagagaggggaagaatgagaa

SEQ ID NO: 19200 - DNA, 995 bp, Oryza sativa
gcctaatgctgcatcggttaggttcgatctattaagtaatatttagaaccataatttagcttgttctatgattatcggtagagataatattggagtttcagccgatcttacctggtttagttgtcttgttccttatatttaatcgatatgctaaatctgccctttatattaagatcttgctgcgttgaaacatattaagcttgttgtttagtatattttgtctgtattaacatcttagtataaagtagtatcggagtagccgatacatcttagatttacttcatcggctatgctatgaatatatataatctctatcttgaagtacttttaaacataagtgatttatactgtcttggcaaactgttcgatctatcccaatcactttggtttaaacatatttttagaaatagattatatatcattgatatctacagccgatcgggtagatttaattttatcctgcttcattcttcattgccgatctggttcacatcacatcggcctaatattgaacgatacgtcatcggcagtacaaccgatcggctatcgtttgaagacttaactgtgtttctgttatttcttgttggttgcaagatcaaaccaactggcacgatcagaaaccgaaagcaattctttagacctgcactagagtaaagcaaatctcttaggcctgtgtgtttttcgcatcaacagaccctttcctaggcaccagtggcgagggtgggcatgatggagttgggtcggccgagtgtccggttgtccagctgctggatttaccgcggtgcatggggggactgcccactctcggggtaggggtgggggtgaaacctcagcgtggtgtggatggttagaggagagttatgcgaagggtcttgtcacaatcactcgacatggtcacgtgtctacgcaggcatggtgacatgccggtggattgtgtcttgtgggtacagttgtgcacctctggccagagtaaaactattcgaatagccttgctc

SEQ ID NO: 19201 - DNA, 736 bp, Oryza sativa
cagatgttttagttcgctaagtttgaaaagtccaaagagcgcagactagccacggagcttggatacggtttcccgatcggagatccatggatcacggatgctctctctccccatggcctttcacctctgaaagcgtccttccttctaaatgcccgggcatccatccaatgcatgattttcgatagcgtcgaacatgagcggtagactgaacacccacacaatctcaatttgacacagcaacactttccacctctcttccttcccttggatcagataggaaatcctcacttttccaagacagaagagaagcaagcaacggattgagcaactagcgtgaaagaacaagggatgagcgctttgttgctaaagcgcatacgttttcttgcttgatttttatacgattttttgagcaactagccgatcacgaaataggctcatgctcactcgtggtccctactgcttatgggactgtgatcgaatccgatctggaaaacagtgctttttgataactaatcactggaagcacctgattctctctactctgtttcacctctctttcttttggcttcttcttgagaatattttcacgttggatgaagggatgggctttcttttgagttggctttgatcgattgcttggtgtcatgctatttactacaacggttagctaaattcgtttatgacaccgattcatttctagttgatccattcgtaaggtcgttcagaagcaaatgct

SEQ ID NO: 19202 - DNA, 668 bp, Oryza sativa
atcccccaatttttaaagatggccttcatgttttttgcttgttcaaaatcatgttcaagaaatattattgtatcatcggcatattggagaatggacaaaccatcatccactaagtgtggaattacccctctaatttggccatcggctttggctctttcaataagaatggctaacatgtcagccactatgttaaaaagaattgaggacattggatccccttgtcttaagcctttgcatgtccggaaattttttcctacattatcatcttgttcatattctaatggatgagaatgcaacacacaactcctacacagctctgattgtccatcctgtggagaatcatgccatcctcaatccgcaatcagcaatccacaatattcaaagcatacatactaatgtgaattgtctggatcttacaatctggatcggaggttctcacaatgcaaaagcatcagtggtccaggttccaactaaaggcattgcctcgttggtatgcatctcttgtttttaatctgtctgttgcaaggttattaaggcggtatggcgagctaaggcgctgcatacccgcctcaacgctattgcgatatggcggtaaggcgtggcgatgccctaagaaggtaccctgctagcgattagaggggaaataaggaataatttggtatggaaaa

SEQ ID NO: 19203 - DNA, 1543 bp, Oryza sativa
ccaccttcttgagtttgcctttacctctgggtttacccttgctcttgcccttgaatatgatacttcccttacctttccctttcttttcaccatggcctcttttacggccatgtgagtttccaacaacattggcgtgtgcttcaggcactgccatagatgtcacgcccagaaatttagcccaaatttccagactattttgtgtattaaatccctgtccaggaccagccagggtacacaaaacgacaagtaatatacagttccaaacgtaaataaagcgtaaaatacttacaaaagaggcacttagtcctcacaccgaaacaaaagcggcagcagcggaaaaaggcgatcctagcggggcttcagctccactccacaggcaaaactcaactggggtctgagccttggtcctctaacttcgtcttcagctcagaagcactacacttctgaaaagggggaataatagcaagactgagtacaaccaccgtactcagcaagccacaccaacgatgcagacgtgcaaggggaacacaaggacggtttgtggctatttgcataaaggcggttgtaaaacattttattgagcaaaacagtaaaactgttgagtaattaaagtaacattaaatctccactgatcaacgctacaccacgttgaacaggcccaaccaacccacctaaactacagtgtattaggtcgatttattaagtgtgagactaatcacggtgaatctggtcgaccgcccataaccgcgggcacagctattcgaatagttttactctgatcagaggtgtacaactgtacccacaagacagccccacgacacgttcccgtgcgccgacatgccaccacgacataccggaaagaggccgtgacaggacccttcgcataaccccctctaaccgatcgcaccacaccttagggttcgcccccgtccccagcaggcaacgggcagcccccctttcgtgccgcggtgaatccggaagccgatcaaccggacaccccggccgacccaactccatcacgcccaccctcgcctgggtacgtcggctagagaaaagctacactacaagcccagccgttgcccacgctggcttgtggtaagtacgataagttcttccagggcatcccgcgaaccggtccttaactgccatgggtgcgaccagcaaaaccatgcacccacagcccaccattcagtcgcattttagttggataattacgaccatgaagcatggccaggtgtctcgagcacgcagctcactctgatactaaaaaggtctaatactgcaattatcccatcaactgagctagtggtaattaagcatggctaagcatatagttctagctaggtcacataagtaacatgagctagtcgattcattacccaaggttgacaaagaacagatatcaagtaaacatggcacaagcgagcagataggtaaaaccctgaccccatgtaattagcaaaacatgcatatttgtttgcaaacagtaaaacatttgtaaattgggatcaacatgctcaaggggaatgtgtgacttgccttg

SEQ ID NO: 19204 - DNA, 2535 bp, Oryza sativa
gatctccctgaactcttatccttgcgaacgcgatcttccgaaacgacgggaactacacgctggcatgcaaaacgaggaaaaactctaataaaaaccaagaaaacagtacataaaaagtaaaccaacatgtagagctcaattttagatgaattttgcaagttgaatggctcaattcgtagttcgaatgaattagatatgaattttagaagttttgggccatttaaatgaatttctagaattaaacacgatttattgcgcaattattaaatattttctcaaaggaaatggcattcgctgacgtcagcaaggggcgccgacgccgacaggtgggcccaacacgtcagcgggtcaaggaggtgcgggcttggaccgggtccaccaaatgagcgggccccacgcgtcagcgggcaaaaggatctagcccaccgtggaccgagtccacggtagaggtgcaaggcggaggggtgggttggctcgccgaccaacccgaccagacggcggcgcgcggccggacggccaccggcggcggcgcggcgcggcgcgacggcgacacgcatgcggcggccggcgggcaaagagagaaaaagaaagggaggggaggaggagggagatgctcaccgacgcgggaaggacgacgacgacaacggtgatggcggcgtcggcccgacgagcgagggggcggccggggagcggcgaaaacgagcggaggaggcgaaaagggaggcggcggagctcaccgaggggcatggcggcgaaggaggcggctgatgaggctcgagcagagggaggcggcagcactccacggggcgaagacgacggcggtgattcggcggtctccaacgaaggtggaagagcggccggggtaccacgcgatgcagcgaagccgacggtggtagggcgcggcttggcagtggctggagcggcgaggagcggcggccggagctcgtcggtgagtggtggagagagggagcgcggtggggaggtggttccggcgatgaaatgggaaaacggagtggggccgaggtgcggcaaggcacggcgaagccggtggtgcaagcggcgcggcgcggggacgtcgacagtggcggcagcggccggctggagggtcgccggcgatcggcggcgcttgggctcgtgtggggagagcgggagagagcgcggggagtgcgggaaagttggggaaaagggagaggatggccgggggattgtttttataggggaggggaggcgggatcgagcccgggagaggcggagtcggggcggcaaccgccggtggcgtgggcggcatcgtggggtgtgggtggcggttttggaggggagaggtggggggaaacggcgcggacgtgggcggcgaggtcccacggacgagcgcgcgcgcgcggggtggaggaggtgggcggaaacggccgcgtcgtggggcggctcgggcggccatggcagcaacggcagctgccggcctgaggttggggatgacaggtggggtccacgggtcccatctgtcggagagggagggagggagaggccggctggggaggcaaaacagacttgagggagagagagagaggcgagcgggctgagggagaaggccggcccgagagggagagagggggggaattgggccgaaaggggcccaaagagaggagggaggattttatttttttttctttttattttaattgatgcaatgatctttgtgctattaaaactatttctcgagctccgaaaattcacggaaaattccggagagtacattagggcacaaagaatattacaaaatattcccggccaatgatttttaaaggaaaatttcaaattctcccattatttcacttgattaaattgatttaacttttatttaatttctagaaaatgtattattaattgatttttattcccgaacgaaaatcggggcgttacaatagacccagtgggtcgggcagaatgattctttagaagaacctaattctgcctttctgcaactaacaggactgagataagatcagagtacttcgggtactttgagttcctgtattgctgttgcagcactatgttgttgggatgaaaggtagataaggttttctcgatcatctcagcgtcagtgatcttcaggccacataaacgcaactgagaaatgatcctatggagggcagagttatacgtcaccacagacttgtagtcttggaagcgtagggtgatccagtcatgttgtgcctgtgggagcacaattgacccttgctggtcaaagcgatccttcagggattgccataataccagtggatctttctcggtcatatactcagacttcagatttgggtggagatggtggcgcaagaaatgcaatgcctttgctttctcggccttcgtagactccacagtgccaacttcgggcaacacaatagtatgatcgagacccatggagtcgagtttaatctcaacgtccaatgcccaagtgaggtagttactaccatccaaggcaagctcggtgaattccttctttgctatgtccgacatgttctgcaacatcattagtattta

SEQ ID NO: 19205 - DNA, 1513 bp, Oryza sativa
taaaacatgtgctaaaaaatcaacggtgtcaaatatttcgaaacggagggagtatgatgtagtatgtcgcccttgcttgataaacgaaatgaaaaatataaaatcatatgcagactccaattaataaacataaatttgtcagatacgtgtattattgtttcacgtagtacaaaaatcgcaagctcatcgaatggggcttgtcactcacctcatccttccagttgtgttgcatcgcagcaccagcacacaggcagcagtagcacctcgatccatctaccattttatttgctgaaaagttgaattttttttttcttagatttgtacactactttatgtctcacactaggctctatctctctccctggcatgaatgccccaggttgcaggcctcttctttccccaggatttcgttagaaaagccccagtagcacacggattaacaatctccgatttaaagtcagaagagacttggtcactgatatgcgagcccactacttctagacccacatgtcaatgaccacgttagaggtacgtaaaatgacacatgtgcctcttcatacgctctcttctctcctctttctctcgcattgttttgttttgtttttaattttgaagcgaaaagagggagggaggtgcaaagaaaggttaggaaaagggacaggaaaagagggtcactgatttctttatgccccagctgctggagccctgccggcctctaccatctccatatataccacctcactcctccccttagcttaacacaccacacacacccacactggcagcagctcatacacatagctagctcagctgagacacacacacacacagtgagtagttcagctcaaagctagcatcagcagcagagctaattaacaaacatggcgtccgggagcagcggcggcggctacgcggacgagaaggggccgggggcggcgacgatgcaggcgctggggctgcagcagcagcacggcggcggcggagaggtggaagaggagtcgtcggagatgggggagaagacggcggcgaggacgcggctgtcggggctgctgtggcacggggggtcggcgtacgacgcgtggttcagctgcgcgtcgaaccaggtggcgcaggtgctgctgacgctgccctactcgttcgcgcagctgggcatggccagcggcctcctcttccagctcttctacggcctcctcggcagctggaccgcctacctcatcagcatcctctacctcgagtaccgcacccgcaaggagcgcgacaaggtcgacttccgcaaccacgtcatccaggtacctacttaccttctcaaggactataaaatcgatctctcacatatataaatcaatatgtgatatgatgatacatgtctctctttttttttatcttcttaaagtatgtttatggctggctttatatagcctactattatacctgctctaatatcgttaacgatatataaatcagtacgtgatatggtgatacatgtttttgtaccaaaaagtttgggggatcc

SEQ ID NO: 19206 - DNA, 3435 bp, Oryza sativa
aatataagagattttaagtttttgcttttaacgtttgaccactcgtcttatttaaattttttttgcaaatataaaaaacgaaaagtcatgcttaaagtattgtagataataaagaaagtcaaaaataaaataattaataattttaaaaaaatttaaataagacgagtggtcaaacgttacaaacaaaaactcaaaattccttaatattatgggacggagggagtatagtttgtgtctttatgtaccaaaccaagacaagacaagaccacactgtatacatgctactacaggaaaatcactttggtacaggttagaaaaccaatatttaacttcgatcggtcacctataactaaaaaagatgttatgaacctagaacaaacacctataaactcttataggtgccatattttaaaccgtccggtcacacgtggcatgacatgcgcaatgcccaccaacatctgggccctgcatcgtcgtttctcttgcacgaatctgaaagcacacacatgtactccctccgttttagattataagttattttgattttggtcgaaatcaaactgctttaagtttgactaaatttgtaagaaaaaaataatatttttaaccaaaataaacatttaattatagatttgattgaactgatttggtgttgtaaatattactacatttatatctataaaacttgggagtagattgattttaaccaaagtcaaaataacttatagtagtagtaattaagaaagtaattaagggatgaaatgcaaatgcagggagataatgcacgcgatgtggcggccgcagaagttcaaggcgatctacctgctggcgacggtgtacgtgctgacgctgacgctgccgtcggcgtcggcggcgtactgggcgttcggggacgcgctgctgacgcactcgaacgcgctggcgctgctgccgcggacgccgtggcgcgacgccgcggtggtgctcatgctcatccaccagttcatcaccttcggcttcgcctgcaccccgctctacttcgtctgggagaagctcgtcggcctccacggctgcccctccctctgcaagcgcgccgccgcccgcctccccgtcgtcctccccatctggttcctcgccatcatcttccccttcttcggccccatcaactccgccgtcggctccctcctcgtcagcttcaccgtctacatcatcccctccctcgcctacatggtcaccttccgctccccgcaatcccgccaggtaccttcttacttttcttcttactccatccgtttcaggttataagacgttttaactttgttcaaacttaaattgttttaagtttgactaagtttgtagaaaaaagtagtaatatttttaacctcaagacaaatttattatgaaaatatattcaattattgatttgatgaaactatatttagtattataaatattactatatttgtctataaacgtagtcaaatttgaaacagtttgactttgagcaaaaccaaaacattttataacctaacacggaaggagtactaattttctttatctttctaattctcatcatcaaaatgcattttacatatatacatgcttgaatttatttgtctttgagtgcctacattgggggtccattgcaaccatatttgctgaggctttaggtagagatgatatagtttcagtgctgttcctatgtatacatagttgccaaatgctagctatctagatacagaagcaaatgtttggtgattgatggaacagctggttgttgcaatgcagcctagacagcatgagcccaccatgcttccccatcacaccttgcttgcttcttctagtgcttactgataattagaacagatcaattaattaattaattgtttgtcttaattaatcaaagctagcgctagccattaacaagactagctagttggcgtctatttgattgatctgctgctgggacgtggcaaattccaatgaactcaacgtaacactggtaattaaacactattattattgtttctgctgctgctgagtgttgcaagtgtgtcattctcggtgaagaagagactgaatgcaagacaaatctgagcagcgacagcatgcaattcctttgagctgagctagaaaccagagcaagtggcgatatgatatgatatgataaaagaaaagctatatgtaccataaagctactgaaagtggtgtagagattaatcaggacgcttgctgctgctgctgtgctgcatgcttgcctgctgcaatgtttttgtaccatctgctgtccgggagccattggcaccgagcagacagactgcattgcaatattgcattgtatttgcattagagagagagctaggtcgacacccatgataccatgtctagaaagcaacaaaaataaagctttcagcaacagcatcatcacagtatactagtagcagtagaataccatcattcacctaatgacctacttgtgacatcatcccaatgcaagcttaacttatctttgcataatctttaatttcttcctgatctgcatccatatactgttctgtttgattctgaaacagtacatacaatacatacagttgcatgttctgtttcgtataattcggtaacagtagtataataactcaaacatatataattaagtaaaggtgcaatattattagacttttgcataatcttttctttctgatccctgcattcatatatactgctctctgttggattcttgaacagtaatctaactgaaaattataattagagcaagtttaatagtatagctaactgctgactctaaattatctatagttaacttaatagccaattaatagccaattcatacaatagttacctataaacatatactacataatcaatatttggtcccacctgtcatacacatatgcattttacagtctgtgctgtagctggcttacaaatctgtagcccgctactcttacctctactcttttatcttcttgaaatatgcttatagctgacttatagtcagctattgtacctgctatcacgagatgatagtaattaataactgattggattggattggattgcagaacgcggtggagcggccgccgaggttcgccggaggatggacgggggcgtacgtgataaactcgttcgtggtggcgtgggtgctggtggtcggcttcggcttcggcgggtgggcgagcatcaccaacttcgtccaccaggtcgacaccttcggcctcttcgccaagtgctaccagtgcccgcctcaccccgccgccgccgccctctcgccgccgggtgccatcgctccggcgccggcctcgatgctgccgccgttcaactccaccgccgccggcatctttgccgctccggtgccgtctcctgctccggctccggcaccgatgcatttcgtccttggtcaccaccaccatcaccggcaccaccgccacggcctct

SEQ ID NO: 19207 - DNA, 570 bp, Oryza sativa
taaaggatataccagtaatatccctgcatgaattttgtgggatggagttttgggctgcacaggcatgtgatcctggatttgatccacacctacgcccgtgtaagggtgaaagttgaaacacctttttctaaaacaaagaggcaacagtagatgcttacaaaacatggctttatagtttcaatagaacggacaatactctgaagttttcctataagattccctaaagttgatgcttagagatttgtttttatgtaagaaatttcaagtttatcatcttatgtactcatgtgcattattatttaatactgaaactttgttgcttttatattttctgaacaggtgaatatcatgcaaataatcctgagatgtcaaagctgctgcacaaagcagttcgtgaaaaaagtgacaatgcatacaccgtctaccaacaacatcttgcaagccgtcctgtcaatgttagtgatgcttactccttactttgcagttggccaatccacagatccttttggtgttgcatttggttcaccactatatcttttacactgcaggttcttcgagatcttctagagt

SEQ ID NO: 19208 - DNA, 1385 bp, Oryza sativa
tggagagatcgttgatcaacatagtgaatcatataagcaatcacgtaagtgccttatagcttctaccttgtttataacctgatgtatgtaaaatcgaagcagctgtcttctgcaattacattctcagggttactctgattaacgttgggtacaaaaccttcgtgtatatcttgatctttaaaagatagtgtaaataattgtggtgtttgcaggtatggcaatgaggttgtggaactatgtggcaaacttttcaagtatgtccggggagcaattgcacgacctctatttaaaacttagtcaggaccaaatggaagctggagtaggtccgtcacatggtgggaattttgcatcagtccctcccaacagggggcctaaatcaaatcagctccatccttccagaaaccaaaggtcaacaaggtctgtccagtacgtctctgagtctttcaacaatggtgaaaacactgggaattctgaagcctggaagcgacggagaagatctgagcctgataatcaatttgataaccaacctttgtatcaggctcctccaatcatgacaaatggaaacaggttacaggaatctagcagttctgctggtattcttggttgggctccggttgaaatgagacgatacggcaatgaaagaccaaaaagaggtgttcatcccagtcgttttccacccgggcatgggcctttgctgtagttgttcaagtgaacaatgttgtcacttaaagcagcatcgctccaaggaaatatcagcttctagcatgccgcacatgtaaaaatgggggaagaccgttcaattgaaattctttttgaagaaaaaaaaataatgaagtgctggaacctgatgtggaccacagttttgaatccgagtctaaaagaaatgccaggggttgctgaggagatgctggcacctttagcagatgtacacacacaagattcttctgacattgaaaaaaaaacttgaggcaagaggaagagtctagaaaattttgtcggtcagttttgtgatctaatagaagaatatttcagttgggatgttttaagaaagttcatctcagcaatgatctatatagttcaacatcaatacatgtatgatctttttaagttgcaatataatgaattatggtttagttgcccatttttactacccgcctctctcatctgtgcaacatatattgtcttgatgtaacaaagcaaatgaaatgtaactcagcagcaggatgccgtgggcataggacagtattgaaacacttgtttgacatgatttttctgtaaatagaggtggaatcataacttggcgattgggccacagatgggtgatggttgtgtgcttgtgtggtaaccttcccccccccccccccccctagtgctttttggtgagt

SEQ ID NO: 19209 - DNA, 3707 bp, Oryza sativa
tgatcaaatttaaagcagtcaaaacgtcttataacctgaaatggaggtagtatcatggtgtaattgaggatttcggcacaacaatgacatgtatgctgagattcagacgagattccctgtgatgtttttatacacgtgttcttatgaccagttcagaattcgttgtagaattatctgatctaatctaattctgaaatcgaagcaatcacatcaatactaccagcgataaaaacgaaaactagagggctttacgtttgacttcaacatatggcagagatacaaaaactcgtaaaggataagaattcagaagtgccaaattccttgatggttaacgttataatcacattaaaacagcacggaactcggcgagatatttttgctcactgattgaaaggtgaaagggatgtatgatgtttgataggtttataactttgtacctttgctacaactatcttcaacccctgcaattccttatccccccttctgcttagagctatgtgagatccaaatttccaggtactccataaaaatggccaaagttctacactactaaagcaacaagagcaagggcacttcccaattatccccaacgtaaggctctctaccctgttgaattctctgctttattttgcttagtctgttagtttttctgtttcattttgctgcaaaataaattttttttaaaaaaactctcgcttagaatttggagcactgtatatcagcttctcctagcttgtgctggtatcagatggaaatgatcataagctaacgattttctgttcttccctagttcgtttctagctctttttggtgtgatttgatggtgctttggagggtggaggtgttcgtgttggagatggtgtgggtgatgctcagcggctggctctcctcctgcctcgccgtcgccgactacgtcgccacggcgctcaggcagagtggtgacgacgtctccggctagaatttctttggacgaactggatataaatcatcttccatgcctgcatttgttgtttggtttctttgtgtgtttgtgagcatttatacacattgcaattgtgtatatatccgaatgttattttaatttttttttgtacgacatgatttgaggcaaattaaaatagattgcaatggatatttctcaaattatctcaactggtcggtcagtagaagactagattacttccaaagagctaagaatatagatatgtcatcgtcttcttgatttcttcaaggaccttgatctactggaaacaggagcctcctccacctcttcctcatcatcttccatccttctacgcatcctcttgtggtaaccactctcgttcattgtctaacagaatcaaagattcaaaaaatgatactccagttaatatcaatccagggaagaaaaacataatataaacaaatgagagttgtcgattaaaacaaggaaactgatactgttgaacggtgaacatccgtacagaattttatatcaccaaaagtgatcagaagcctaacaaagtagcagctacaatttggggtgaggtagaaaattagtacttcctccgtctcataatataagactttctagcattgtccatattcatatataatatgagcaatgctagaaagtcttatattataaaacggaggaagtatgtaccttcaatgcgattctctttgagtcgtatatgcgctcatgaagtatcattatttcatctgcatcaaccttgcgagccgggatttcttcacctgcccaaatacagaaagtatgtttcgaaatggccttatttacgtgctggcactggcagtatgcagtaaaagtactcaaaaagaaaaattgttacccccaaggaactgctcggttagcttgaaaaattcgccctcaaattgattcaccaaagacacagcatatcctgattgccctgcacgtgcagtcctgcccacccgatgaatgtaatcctgcattttggtgcagcattaggatttaaaccacaacaagtatgaaaaaggaaatcctaaatgcatcatctcggtgcagcatatgggaaaaatattcgcgttttgcaatgatcaggtaagaacactgaaattataaagttggaaccttagagttcagtgggaaatcgtaattgatgaccacatcaactccttgaatatcgagaccacggcttgctacatccgtgcaaacaaggatattgcaatctctggtcctaaacctgtttaaagcacctagtctcttatcctggccacaaagttatgacttagaaaaataaatttaagggatcatttctgcctcctaaaccaactaaaatgaaagaatcaagcacttttgaatatctgagtgagtaaacctgactcatttggccgctgatagaaatagctttaaatcgaaggtttctgagcataagagcaaggagccttgttgactcgcaggtccggacaaagaccatgatcatgctccctggcatcttgttcagaacatgaataagataacaatcctgaaatttgcatacaacagaaaaggtgaaacagcaatgaaagataaaatgatttgaacaatgaaacataatttgtgacattatttattaaagttgcatggactgtaaaatcatgtatgcagcatgtaatagcaacatcaaacatataggcacagtatagatcaaataagaggtgcaagtgaccttgtactttgcaggaacaacatataagtcctgtctaagtgtgtccaccaaggaatatttggaggctacttcaacctgattaaaaaaaaagctcaaggcccattaataaataataagatagcactttcctttaatattatttcaaataaatgctcttgagacaaagaaggaaccaccttaacaggattctttaggcaagcacgtcgcagttttttcacctgcaggaccgaaaaaaatttgtcacacgaccagtagtagctaaaagggttatatagatatgacatttaagtagtcctagaaaatttataagagcacaaaatcaatccaatatggtattctcactatctcaggaatgtctaagtacgtgtgattaataatcactccaagcagtgacccacgtcattctgataaatgatggacaaccagcaatgtttaatcttttggttcacattcagaggaagcataaaatcagtatttccatcacaaacgtccataacttttttatatggtcttaacagaaaagcagagctcctgctaataacataaataaataaagctcctatctgccaaccttttcagtcatcgtggctgaaaagaggaaagttctccgttctttaggaataacattaaggatatcatcgacggctttctgaaagtccactttaagtaaatcatcagcttcatccagtacctagcaaaaccaaaagatatgcataaaggtgataaaaaatagtgggttatattgcgatggcccaacaggcatatgtgttacatatatagtacaaggattggacacatccaaatcctcgattacaaatattaataccaggaatactactgcaccgtctcaacaaaatattcctaactataaatatccaacagaaaagaccaaattctgaaaaatacttaccaagtacttcaatttattaaaactgaaaccttttgtattggtcaaatggtccaaaaggcgcccaggagttccaacctaggaaacataatcaagcttagttgagatgaagaaatattacatgatatcagatt

SEQ ID NO: 19210 - DNA, 2892 bp, Oryza sativa
ggaccaaggggaaaaaaaaaggaaacaaactaaaactaaaatgaaacgttactcctatattgaaggagggtggtggcggagtccccactacactcccaacaggcccccaaaaagcgccgcgctagcggctgactacatacagccttccagcaaaatgggctacagaaccactgaaaccgacaagagagagtaatcgaacaccctcgagttccgctccttccagagctgccaagagtcgaagcccttgcgaagatgctcaggcaggcaggccctagaagaccgccaccaaacctgaagtgattggtaaatttgttaaactatactcaccacaacatgtggacgttttgcaagggatatggtttggcttgtccgaggaattccaccaatcagctgaggaaagaaaaatcatcaatagaaaagtgattatagcaagaagtaatagatactctctttgaagagagtaagagactctctttgatcagcactagcatgtctgttgatcaccaaaggaacatcatataatgcatctaataactgaaattctttgaacttttactgagcaagacaacctgctgctgcgctaagtgttttttttccacaacatttaaacacgttgtcaaaaaaacactagtaagtcagagaagcaagagcatccataaatttacaatgctgggttagctacgggaactaaaaattagtagtgattagacgatacggcaatataccactgaacattgcaagctgatcgctgatccgagcgcctcaaactgcttcgcaatctgaatcgccagctccctgaagaaccaccaaagccgcagtccagaatcacacacacattcacaataacagagcaatcaaatcgtcccaggaaagggaaaaaaaaaagaagcagagatagaaaaatttagcaaacctcgtgggcgcaagcacgcaggcgaagaagcacgggcggtgctcgtgctcgagcagcgcctggatgatcggcagcgcgaacgccgccgtcttccccgaccccgtctgccccacgccgatcacgtccctccctacacatccaatcaatcaaccagtaaggatttagccagcaaactagtactcaccgtcgatctccattgcccaattcgctgcaaaccttggagggcgaaggggatgacctccgcctggatcctcgtgggcgccttccaccccatggcgtcgcacgcctcaccagcaccgggcaaaccccgagctccgcgaacgtcgtcggcgcctccgactccacctccacctcctctcccatggcttcacgacgctcctccacctcttcccccatggcttcgcgcgaggcaatctccacctccacgcgcgcgcgggcggcgaagcggctgggtttagggcgagaaaaaaaaaagagaaaaaaagaagaagaagaaagtagtaattgagaaagatctcgctgcagcctgcagggttgcatgatgaacttggaagatggaggcccacttcacaggaaggctcatcaagtaatgggcctcaagagaaacaaagctgataatttttttagattgttttacagatttttaattttttttctaatataaaaagagtgttaattggatccataccattacaaatttgcccatctaaaaaaataccattactatttgttgctctactattttaaaattggaactgtgtcattctgtcacagtttctgtcaacacatgacggagtggtacagttccaattttataagagtagagtggcatccgactgatttgacgaatagaaatattatttttctaaataagtgaatttgtaatggcatgtgtctaattaaccctaaaaagaaataagccaatcttgagatatattttaatgtttaaataactaccaatgattatgttggggttttttttagaaaatacaaaaaattatcaaattatgatttccctattttagaatttttgtgttgaaatgtttttatatgccatgctcatgagctaatcatgttattatcggagatggatatctggtatctacctcaacttcacatatcacaagtacaatggaccataatctcttcaagatccagcttatccaagtcctaatccttcttgtatcattgctgctgtctacttgccttccatgaatgatcctttgttgctgtgaacgagctagatagctacataccatctttctggttagttatcgtctacttgtcttagaatatcgcaacaccaatcatacctctgctcctgttgcttacttcttggatcatcatgttgtccccgtttaaaatctccatctcacaattgcagtaatgaaaaccgagagtagtttacggatcagaacaaggagaagtgtatggattaagggtcgctgaagcagcatcaagcagagaaatcggtatcaggtaacataatgacactgatgacagatgagctgaatgaagttcatgttgctactaaacgaataatgagaaggcatggaacaccatgatgttgtgtacagtttgatgagagctatgtgaaaattagcctagttcagttgattgattgatcatttgatgcgcctggctaattaacattcagaaagttggactgaactgaactctgaacaagctggctgacttcagccatgcatgcatttcttggcaaattttctctgcaatttatccccgttatgtgagctgtaattagatcatggccagagaccggacaatgataacagatagctcatctttctctgaagaaccagcagcagattggatctccttatcagactgtctttcagaattggttagccttgcagatgtactaaatgacttgctgggacatgttgaattgtttatgagcagcatatttatatgcatgattgcattgcatcagagacctcacatcacttggtagttgg

SEQ ID NO: 19211 - DNA, 4474 bp, Oryza sativa
cttagctgcatctttcggttcctgtggctttacttacaaggcatgactctggtttgttccaaacctgtggcttactcttttcacaagtcaaaatgtttttccccctgtaagatgtatgttttgccttcttacattgatcacttctgggttagatggatatgttatattcagagaaaacatgtgctccctctggtttttaattttgacaatgtttacttttaaacatatgtttgacaattcgtcttattcaaaaatattgtgcaagtatataaatcatgcttaaaatactttcaataataacataaatgataattacatatttttttaataagatgaatgtaactatgtatgtccaaaaatcaacgacgtcaaacatttaaaaccagagggagtacaaggtttccacaaaagtatctaagggattttcctttcttattgacaaatatgtttgtgctatacgttgttcaacatagtacttttagtcttttagataagggtaattttattatcttgaagaaggtaccaagatgtaccacattttctagtgtaaaaatttgataacttcaggtactaaagttttagcgtaaaatttaggtaattcaaggtactttctcaagaactataaaatttctctttagataatggaagagttgttctttctagtgtttttgagcttggtaaaatggatcattttttaacgacttctattctatctctataatttataagaaattgccaataaagatcacaatgttaaatatatttgatgtttccaatctaaaaatgaattgttctaatctccagggagataatactaagataatggttgaagaatactctcaactctcaacgccacaaaacctgaaacggacagttaacattagcttacgtcatgggatataatatgctcttgttccggcttttggaaaaaagtctaacgaacgcaaccgcgtgaaatgaccaaataaacttgttcaacagaaacaacaaaacagcaggcgaggcatttgctgcagtttttctcttgtttttattttaggtgtagtagtatcagtttggtaggcatcgttgacgcctttagatcttccagctatttctgaatcatcacaccctgcacgttaaaagttcagatattttctttctccctttcatatattctttggagctcctgcaactgaactcaacgaatttcaaaaaccataaattcagtttggatcaaactctagtaattaaacgaaataccaaatcagaaagttgtccggcgaaaaaaaaacaaatcaagaaagttctctgaatttgaatttgcccgaagaacaaagagtaccattctcaaattatatccgtactccagctgccatgtgccaactattcaccatcgatcttaatacaaaagatacgcgctttgcaaattcgcgaaaaaaactattcaccgttaaatctataaaatgataaaattagcaactcatcaattcgatcgatctatcatcattcagtagcatttataaagaccagctcagatgccagtaagataaggggcccaaaaagaagaattatgggagtttgatgctatccttctttggtccatgtccatagttcagtaaaccaaactgcatgatttgcattcagttcttcagctttccatgtcccctacttgagctcattttcctccattctttgccactgtgtgggatctcatgttcctcaaactgcagacatgaagtacttcgaaactttatgcacgtgatctgaacagtgttctgccatggataattcagggtttcagaacatagatttccatgccctgtctgtacaattctacagtctttcagtgaagttataattgtccttgattggaaatggaacagtttttttttcgcgaagaaatggagcagtagtcgtgctatgcttttactccctccgtcctataatataacaatctagaaccggatgagagatatgtccagattcgttgtactataaaatgtcttatccgattctagattaccatattatgggtcagagggagtatgttgtttaacaaagattatggataaaaagaaagaatcattttcagtcatctattggtcaaatattaaattgcttggattctccttcgaagcatctgattggttgaaaatactaaaattctcaagcataaaattagtgtctagaaatgcttatattgcgtataaaatttgaatcctaaatgtttgagagtggagatagcaccgtttgcttagcaacctatgaatagaatatggttcacataaaaaagaaagataaaaagcggaggaaatatggtagaggaggaaaatgacagcctctcgttcaggttgaccatgacacgttcaggaaccttctttccggttgtacaaaccagtctattcacagccaacaaaactaacaaaatgaacaaacaaattcttcagaattaagaaaagaaacggcaaaaatgttactattccagctcaaaacaggctaaacagaattgagtacctactccctctgaacctgtaataactgattaactgagaattgttaattaccaagaattaccagtcctaaagctactatacaactcaacatcaagcaggaaaaaaaataacaacctctgaaaaaggaaaaaagaaacaagaacaagaaaactgtcaaaagttcagcttaatcagaagaaaatatatatacgcatccactaaacccccacgttcacggctaattccattctcgctttcccccaattcgctttcttttccccctttcctcgcctctccgcaaccgccattgccaagaacctcacctcgtcttctcctccttcttcttcttcggcggcggcgatggaggacggctgcagcaaggttgtgagcggtggtgggagcgggagctgcggcggcggcgccaagaagccgttccacttcgcgcggtcgctgacataccaccaccaccaggggcaccgggtgctgccgccggcggcgaagtggaggcggcaccagctcgccgacgagccgcgagcgcggcccaaggacgtggtgctgtacacgacgtcgctgcgcggggtgcggcgcacgttcgcggactgctcctcggtgcgcgccatcctgcgggggttccgcgtcgccgtcgacgagcgcgacgtgtccatggacgccgcgttccgccgcgagctgcggtccctgctcgacgcgcgcggccgcgccttctcgctcccgcagctgctggtcggcggccggctcgtgggcggcgccgacgaggtcaagcagctccacgagagcggccagctgcggcgcctcctcgacggcgccgccggccaggacccggcctacgtctgcgacggctgcggcggcgtccgcttcgtcccctgcaccgcctgcggcggcggccgcaaggtgttcgtcgaggaggaggatcgcgtgcagcgctgcggcgattgcaacgagaacggattggtacgctgccctaattgctgttcttgatcgccaaaaaacacatgatctttccaattcaattcgagctgctaattactaaaggattagaggctttagaatcaagaacagaggcgcctttcggtttctgggtgtgatttgtgttcatccgattcatttggggaatctggatttgctgctcatggatgagagaacgaatcgttcttgactccttgatgcaaaaattgccatgaggtgtggcgattgaaaaaaaattaataagagccgatggctgcatgtatgtattgtatgtaatatatatgggagattgtcactgatattaacatgtaaatacatgagtttgggttgtgtatagttcttgattatcctcatctttttccttgcctgaactcatcctatgacctgtgagttgtgacttgttcttattgaatttcttactgaatagatgactctacaattcaaaacaatgcgttatggaaatgatccaactgtactaacttaaagctccttagttgtaatcatgttctcctttggctattctctaaattggagtttaacttttcgactttttgtttctttattgaagtgcactgtatttgaatttggctttgaaccagtagaccccactcccatccccacatagtttttgagaagttttggggagttcttttatctattcatcgattgcattcagaagaactttttagtgatgcaactagaagctctttggggtcaatacattggtgttactcgccaattgaaatcttaagcctaattgtagagcagataatgcttggactacagaattaggtagtagcaagatgcatacatgttggtttgtttctgtttctgcactcgcacatggatggaagaaggatcaaagccaaaaataaatgcacgaagagatacttcttgtttttctcactgcataaaatttcctcttttttgtccattcatttattgatgaagtgtattacctgagtagttcttgggtcaagttatttgactagcaaggatgttttatgttggagcat

SEQ ID NO: 19212 - DNA, 3806 bp, Oryza sativa
attcatcgatagtgtggttttgtgaaattaaactaccaaaatatatgtacttaagtgccaagtgtcaaaatatgtgtggttttctgcaacttaaaccataaaatatgtagttttgtgaaatttactcaataaaaaatcagaataactgtcactagcaagaaaatgtagaaatgctgctctcagtatcactgtgtttgtcagtctcatgagatatcatccaccctccatcactgtgatctgttaccaatttcctggacgaatctgtccagtgatttggaatctgaatctgaatctgaattgctcggggattctgctgacatcaccggcaaacaatggtagcctgacatagattggagtctcataccgaggtggtagctgcaccatggacatcagatcaaaggtttcccttgccatttggggagggattaccgctacctgaaggtatcatagttatcgcggtaacctcccaattatctaaaaatcaagagggttaacgtgcgaggttaccactaaccaacgagttcagagcaaagcaaacaagagatttgtctggaactgtacaatctaccactgcgtacaccagtacaggggctttcagcgagatgatcatccatacaaaaattacaggaagagtggcaggctggcagctgctagctagattagtgtcagagcaattcgtttatgaatgcattacaatcatttcgtactggagagattcatacagcgttcatgggtactgaaactgaaacaagcagccgcactgagatgtttgctccttccaaatctcaaaacatttccttcgttgaaataatccaactgaactaacttaaagctccttaactgtaatcaaagtgcactaaacctgcaaatgtagctctgtaaccaacagtcatcacaaaagtgcactagtaaatatgttctttataacaattattcaagggcatgaacgaattaattatatattagaaagttgatttaaaaggttctttaagaaatgtcaatggaaaaaatttacaaaaaaaaaacatacatttaggagcttaggaagcatgcagttccactagactgcaagataaggactgcacatgatgttggtcatctatttttcctatggagggtttagatttaaagctacagtcagtaaaagtgaagattttttttggcttggataataacttggatgatctgaccgttgaattttcatcggatggtcctagtgtgcactagggactgcaggtgaaccgaatccatgcccgtgacaatccataatccataagcagaaaaggatgacttctcgttcagaaaaaaaaaaagatggatgaaactattatatgttccttgcattgatcatccagcacgtcgtcgtcctgagcaagctgccttcattttccaggacatgggtgcggaagctcggcgattctgctggcatccgagctcgcacggttgcacaaataaactcttcattgttcacgtgcccctcttgctgtacatgttgacaatttggcatggcgcacaagttgaccaatttgctcgccattgtcaggctcgatgcaatctcgaattcaaatgttcatcaaatccctcctcaaccagtttacggcatatgcagtgtccacaaatcaacatacatgcacgaatttcagagaaaaggtgttcaaatttacagctgaacatgtagtagtaggagcaaatgcaggtttggcaggggtacatttccggcaaaacaatggtggcctgacatagatttgaatcatacaaaggggagagctacatcatttacatttggcagagtcaccatcagaagattcgccagattggctaattcttggagaagttaagagcaaagaagagatttgccttcaattctactacatcagtgccacgagacaatcatccatacaaaatgttcctgaaccactagaagaagaatggcagctggtagctaagacagtctacaatcttacaaggtcctgcctagctagttccgggagcaattcgcttacgcattatcccatttcaccctggaattcaagaatcaagatccatgtcgcaatcaaactaacagtcgcaacgagaagttagagatgttgtgattcactgctccttccaaatccttccggtgacacgcagtttgagctccttcttgtcgccaccggagaagaacaaggccatgttccgctggatgataaggccgtcgtagctgtcccgaactttcctgtgactgtctctgatgcttcgggggacgccttgccaggtcatcttccgaccactgcctccgacctccaggctgtagctatagttcttggcttctgcatcatctcccatgaaccgtaggaaggcgatgtagacaggtgccatgcccaactggaatgcctcaaagtgcaggcaaaagtactggccgaaacagctgaaaacctggatagagaatccacatttagttatagcatacttatcaccgtggagaataaaagagaagttaaaagattcaaaacagttgtacaatcatgttctaaccaggaaatgatgaattgaagatagcaacttggcagtttgccagtgttgcaatatccaatttaaccaagctagtaagcatgcacttatcgaacaaacagaaattcatattttacgtttacgaaaaaaatatctaacacgagaactttgcagaattcatggagtgtaaacaacagttggaaagcattgacatactaactagtatacatgtcaatcaaatttgtatgtgcaacctagtaacatgaacattgtgaggtgttcttttcataaattacagagcactgagaaaattaccgtgagcatccaggtagcattctcaacttcatgaggatttgatttgacataacggtgattgaaggtgcttccgttgtgcatgtcaaccttatgatcatctttcaagtgacttactagatactgaatgtcaccagcaacagtgcattcagatccagcatatgggcaagtatagggcctgtattggcactgtgactcatgcttcagcttgcagtaataaggatatatgcccaagcacccaaagttctgatatttgcatggaagctctagtgatgcagctaccttttccagagcaaggcatcttatgttacccaattcatgtctgcaagttgggcagcggttgtgaaccctgggcttgcatccggaacatagagtatgaccattggagcactacacacagtgatggaaatattgttaaggaatgtgcttacatattcaatttgctcttcagggttaatgaatgtacagttttcagaacacttgggcttcataaaaatatcgaactgaaacctatgttagctcaacctaaattaaagctaaaataacatttttactccaagtccctaggcagtgtttggcaaatgtctaatggaaatgatttcccacccatctttaaatcctaaccattcattctcccccatccatttaatcctaacccttcattcatttcccaatcccaatcccacctctcatttcccattatccaaacacacccctactgtataccagatacaagcatgccaaaagcctataactatgctagcataatgtcactggatggttcagataaatgtaatgtaagtgtagttaagagtttggtaacaaggtgtacctgatgaattggaggatacatggcatttagacacacagggcattccagtagctcacgcacattgccagagaccatcgcattcggttttggtgaatgctgggtgtgatcatcaacaagttcagtaacatccagcatctcctcgttctttggaggatcgataacttcagaatgg

SEQ ID NO: 19213 - DNA, 9442 bp, Oryza sativa
actaccctcgtccacaaatatagtcgtcaaaaatattatatttgtagacgaatgtagtaaattgcaattgcttcagacattgaaaaaaagagtgatctgtatcattttccttcccaagaaaaactgagaaaatcaccaccaaatagacaagttcagaactgcaagatcaatacaaactccatcgaacgcatgattaacagaatgtcagtcatccaaatggaaaaatagcagtccaaatgcatccttgtctgattgctcgcttccacaagaacaatcacgtttacaacaggtagaagttaatttagcagtcagtgtcagatagggtccccgccttgtcctttgttcaaattaacgacaataggacgtgaagatcactacaaacggccaatcaataacctgtgctgccgatccaagaattagggtaaatttgatctgtgacagctaagtttatgaaattatcaaactttatgcagttaacttgtaactagtgtccctgttgatccaaatagaaaatatttatcatatgttacaacaaacaggaggcagacaatgccaagagttgatactggataggatacatggccatggccttacaggtttacatgaattcctacctttctcctacttcgaaccagaagaaaacagaactgcgagaatagatagcccgcacatgttgcagcgccagtgttccattagtcctgacggccttcgcacccccctcaatgcgggtgcgaacaacagttacaccatgtccttgctccttgagtgatgagaacgaatcatactcaatcgctgtgctaattatagggaaggacaaataatccagaggattttgctcgcactggagcaagcactcctcaatagttaatctaccacttcgatgaagcaaacaacacccaagctctgctctaatagtgagatttgcaatcttgcaggtggaatggaactccaacgcactgctcagacaggcaagtggaaggtattaaaatcattgccgctttgacgaaacattagaaagaacaaaaaaccattgccacagaagaaaaatgcatacttgtcagagccacgcgaacatgttaacactgtgtcgtcaggaagctcacccccgccaatctgacagtaagcaaatgacaagcgtaagctcaaagttgcatcaacaacaaaaaagaattgctgtgtaatgcaagaagcatttcatcagaataccagatcaaactttcactcttgagatataacaaacatgaatggaaaaacttacaatgcagagaggcttctttatttggatattacgtgcaacatgtgtgccaccagcagcaattagaatagtatccccaggcctttaaaacaacgcaaataaaggtcatccataagaccataaccccctctataacataatgaacattgaacagtcagatagaacacggacctagctgcagaaacagcagactcaagatttggatagactcctggctctattgtatttctgattggcctctcaacacgcaaccacagtcgaggatggcatgcaaggaagcgccatctgtggcaaacgagggcggtgttatacctatctgcaggttcaaaaatgaaatgctaaaaaaagctcatttaaagtacataaacagcgtcacattatcaggcaataaatggtagcagggacaaaatcaagcacgccaacagtgagctaaaggtttgatatacctagaaatagggacaagattgaacatccaaacttaccaggtggagtgttgctaactctaggggtctaccgatcccacagtgaaggcagatatacaacaaaattatttgttttcatataaaacctatttcatcaatagagatgtaaatagcaatatttagcatgaaatttcggtcgaataaagcttctaaaactcaaaagatgcaccttgtagcgacgttcatgcaatttatatgatttgttcacccattttggcaattgttgctattgtagcgatgttcaccagttcatgtgatttgttgtctactggatgagatggcaataactcacatgaacatttgctccaatagcagcaatgccgaaatggatcaaccatcagtttctcaccctagaacctagaacaacacatcagctggaccattatggtattgcggttccacgatctcactgtgtaaagttgtaaatccaagagtaatcaaaccatgaattcgcaattgcgagcacttaagcaaaccctacgaatcatcccctggagaaggtgcttagtgacatcttcatctattagacaaaattaaatttcactacaattacataatagaccccatactagaacaatccagcaaaactccaatcgagctaaagcctaaagcaggtctaaacccccaattttggcccgttcccatttcccctccgtcccaaatcctcgaacattttacattccccaaagcctacgccaccaaccgttcgcagcaatttaccaatcggcctcaaattctcccataacaagattagggtaatcgtaagactacgaacgaatcgaacctgggattgggctgaggaagctgaagatgtgcatgaggcagccgtcgtccaggctgttgaccggcgcctcccccgacggccccgccgccgaccgctgccgcttcggaggcatctctccgaatccctctcccccccagtacggcgtgcggcgccggcggcgagcggcggcgcggtggcctgcggcgagcgcgaggtcggcaacggcagctgcacgcgcggcacgggggatatctcgccgcctcgacggatccacgattttttccgccatcgcgggccccacctgtcagatggcggttggtcgggcctgtccacgtggctgcctccgctgcgtcggatgggcttggactagaattaagccaggcccatattgggccataaaagtggacgaattacagtctttaggcccagttaactgtttgggtttttaatccttttctttttttggctgattaaaatgcagatttcacatagatttctgtcggtatattttttaaattgttgaattttctgcaaaagtattttttataaaaaaatttattcgcacgtgtcaaacaaacgcatgtgaatgcacggtgttttcgactgaaaaacatacttcttccgtttcacaatgtaagtcattctagcatttctcacattcatattgatgttaatgaatctagatgtagattcattaatatcaatataaatatggaaaatgctataatgacttacattgtgaaacggagggagtatatagtatacttcgtacgattgtgtgtgagtgcgaaaaatgtggttacggaaagctttactccccttttgtgttgctcccccacttgcatttgttgtgatccgattatttgtaattaatcatgcttgtgagatgcttgtgcaaagtgcaaataccatctttgcggactaatgtgataatcagcatatgtgcattggtgcgattattctactgcccttgctttacaaactcgatacacgtacaggttgattctttgctattgtcgcgaagaattagagtatgttttatatataaaagctttgctaaagcttgggacaaaacaatagtaatgcagatcacgagttcttgaatgaaattttgtaggaaagcttaatgcctaaggaagttagctgtgcagcacatatattcatcagtgatttgtcatttgtgcaaagtgctgcaaatgtgcccataactttgcaagtttttctccagctctttcgaaaaatccctgctctttataattcctagtactagcttgactgtccatttgtccgtgtaatctcgtgtcgtgtgttcgccaccattgccactcagagcgcagagaagagatcgatcgatcatgtccatcaatgccgtcccgagccccgtcccgtccgcctccgacgacgccgagagcctcaggaaggcgcttcaaggtgcgtgctctcacatcgccattcatccatggcagctgcgttgcgtgtcgtcatctagagtcaatggtttatagctatacagctgttcgtgaactttggttgaaaattagaattcaataatttttatgatcttattataccgtgggagtttttattagtttttgtgtgtttttttgtttattcgtatgtgaggtttttattgaattgatgtaataattggctgtggatatttgagtaaaggccagaactatattccattatatgaaaaaatccatggcaacttcctctctggattcttcgactcttcgtgttgttcttgctgttgtcgtacagtgcgacatggacgcatggtgacgacgcgtgttgcatccgcaggatggagagcggacaagggcgccctgacccggatcctgtgccggcgaacggcggcgcagcgggcggcgatacgccgcgcctacgccttcctctaccgggagcccctcctcaactgcttccgctacaagctctcccgccattgcctcctctccctcgatttctgggtactactaagctttgcctgatcttccataaacttctctcttctgaattctccaaatgctgtatatatttttttttctcaatcttgagatttcttggttcagaaagccatgatcctgtggacgatggacccggcagaacgggacgcgaacctagtgcacgaagcactgaagaagaagcagagagacgagacctactacatgtccgtgctgatcgaggtgtcgtgcgcttgcaccccggatcacctcgtcgccgtcaggcgcgcctacctcgccctcttcggctgctccgtcgaggaggacgtcgcggcgtcgccggcgatccaagaacctctgaagaaggcaagccaagatcacactgcaactcacaatctcatatcatgttcagataagttcagagaattcagacaaggagacttctttttttttccctaatcgatcgttgctggtgtgtttctgatctgcagatgctggtgaggctggtgagctcgtaccgctacgagggagatgagtgcgtcgtcgacatggacgtggtgaggatggaggcgtctcagctggcagaagccatcaagaagaagaagcagccgcgcggggaagacgaggtcgttcggattgtgaccactcggagcaagtcccagctcagggcaacgtttcagagatacagagaggatcatggttcagacatagctgaggtatatgataactttgataagattaccaagcaaatcaacagcatcatcatgccaaacttgataagattaccaagcaaatcaacagcatcatcatgccacaagataagcaaaaaaagatgaagaaaacgtgtgatcttcattgctgtcttgttctttcaggatattgacagccattgcatcggccagtttggcaggatgctgaagaccgccgtgtggtgcttaacatcacctgaaaaacactttgcagaggtgaattaacacctaaaaacccaactcagattagcatcgggccatctttgtaatcacagtgataattaacctgttctgttcttgcacatgctggttcaggtgatcaggcactcgatcttgggattggggacgtacgaggacatgctcaccagagtaatcgtgtcgcgtgctgagatcgacatgagacacatcagggaggagtacaaggtcaggtacaagaccaccgtcactcgcgacgtcgtcggcgacacatcgttcggttacaagggcttcttgctggcgttggtcgggagggaggactgaagaacaacgaaagaagtgttccaatgcattggtatatgggaatgacatgtggggtccagacccacatgtcaatgtgacatacgatggtatttcgactttgtgatttttgagatgtaccaggcaaattgggacaaataaaggttgtgatttaataagttgttggtcactgatttgcaaaaaagacagagaatggatttcacaaaaaccttttaagacactcaaaacgcaaaacctaaagtttcaaaaaacctcagggtttgggggtgaaatgttacaagaaacccaaatgtttaagcttacaatgtcatttttgctagtatatttatgcgtaataattaaaaagaatatatgagatattcctagcctcattttaacgagcattattacggtattatgattaatgtttgtccatataagtaaccggtcaatatgtcattattagtatgattgtgttgtatttttttcaatcatataatgcaaaagtaagaaaaaaagacgaagtaaatgtgatgggtatgtattttgagcctactaatgtaaacatatccaaaaatattatatttaataatggaattatgagtacgtgacataaacatgcgtttcttgaaacactatgatacctcaaaacctggggttctttgaatcaaatcataatatgtgttgttttgtgttacatgtgcttcaaaccctggggttttctgaaatttaaggatcagtaaaatttagctagaaagattttgcaaatagtaacaagggatccatttgcaaagaaaatatatgggagtaaagtggtacagtgaaaattcatgagttttcgttctgtaagctcgtctggatgggcctatacatcagtggcccggcaatgaggcccatccaatgcaggcccaccatcgagtgtcaggagtcaggaccgctgctgggtcccacattaaacaagcggctccaaactggcatctccgccatgagtccatgacacgtgggccccaccctttaccgacagagagcagcaaagctcacgaaattttacgcctcccgctctccgtttcgaaacgctccccattcccccatccttctctctctccacctaaggctcgaatcgaagccgacctcctcctccgctcgccgccgccgccggcgtcgtccgcggcgagatggcgccgcccttcgtcttcccctcgaccctccgggacctggagcgggacggagacggcggcggcgacgacgagccggccctccgcccgcagaaccccgtcgccgtcggcgcactccgcgccgccgacctcgaggagttcgtcaaaggtataaaacccgctccccaccacctccgcttcctctcgaaatcactccatcgcttgccgtaaatcgatggtttggttgtggcgtgcggtggagctgagattgtttctcctgtatcgttcgcttcgtattggtggttgtaaagtgtaaaccctagttcccgttaatttggcctcccgcgctctactcctagtttggttcttgcatgtatttaagacccaattaaagtcaaatccctgtgattctgtggaataagagttgtggactgttgatagacatttttggcgcaagattttgctgcatttagcctgtagagtcatttcaaagctaactattgcaaggcatatcctttttagaattttttttcatcttgctccttggccattttcatcgaagtggattgtttatttgttttgcttttagaatctgcagctttggatatgacagggtttagctagctcatgtgtagtaatggaactaacaattgagtgttcttgcttttgacaaaaggttcggcctctatttgtgtcccacaaaaaaaagttttttcttctacatgttaaaattcgttagaccagggagctttgtggcatgtagggaaattaatgcacatgtttgtaagaaaaacatgcacattcatctgtgcatctgtaaatatttcaaactgtgaaatgataccatccttacctagctctgggctatgaatgccttttgtaagtttcatctccattcctcttcctggaaaagtttgtttttattttaggcattcacatcaccaaaactgacgattcattcaaggacatcagacaaaaagttttagtcccattcatctattcatccaaacttacaaagcttttactgggctaaaatttctcaatgtgcattttgtcacaaactagtgcatattaagcttaatgtaagctgcatgtggtttgttcagcaaagtattcaatttatctcacaatcaaagtactaactcttattgaatcaattttgtaatattccaccctgtttgaatgagcgtgcagctgtgcattttacatcgtgtatcttttgaaccaaaggttttctctgaacgagctaattctttctttcattttttttcttaaattataggcacatcgtttgacctgtctgacaaggaactcttctgcatcgaggagcaggacgtgtttgaccgcgtctattccctcgtgcgtgacttcacttgcttgccccctgccctcaagttcaaccttgttgagaccttgcgctccaatcttagtgttctcctcccaaacatagactccctttcacgagcttccatgtcatccccttctgatgggatcccagtaactgatcgcattgcttcgcatcggaatgcccttaagatctactccttcttcctcctctccattgttgttgctgaagaatcgggagctgatagttgcaatggccctaaggtaatacctgtgcaaaagttacaatttatttggactctttgtacccttctaattttaactgaacttattatgccatgtggacttaggtggcagtacatggtcggaagaagaatgctgtatatgcttggaattgggaagcacaaagaggccgcatcatgaatcttattgctaattcacttgaagttgacctatcactattgtttggtccaggcggtgctgatgaacaatatctctcttttgtttcaaagtaaattcaagaaactagctgtgttatgctttctgtattcattccttatagagttatagtgatgttgctttggatgaatatgtgtaggtgtacttttgttctctgtgagaaccagaacgtgctgaaagatgaggaaataagaaatggcttgtgccgaataattggtgcaattgctacgaagcatcaaagagtatctcaaacaagtgcatctgtcttgcatttgattcataaatttgatttcactgtcgtgcttctagcggaatcagttgctgctgcagagaaaaggtttggtgatggaagccttgcgattttgctgataagggaaataggtcggactgacccaaaagattatgtaagagatagtgccggtgctgacaatgccgggagattcctagtagaacttgcagatcgcttgccaaagctcatgtcaaccaatattggtgttctgatacctcattttggtggggaatcatacaagattagaaattctcttgttggggtcttgggcaagctggctgcaaaggccttcaaagatgttgaaggcgatagtgacgcccattctttaaggctccgaagtaagcatgctatgctggaaattttgcttgaacgttgtcgagatgtgtctgcatacacgaggagtcgtgtgcttcaggtatgggcagagctgtgtgaagaaaatgctatttcaattggcctgtggaatgaagtggcatcagttgcttcgggcagatggaggacaagagtgc

SEQ ID NO: 19214 - DNA, 1223 bp, Oryza sativa
taatgccaactcttgtccagttgttggcatcgtcttcagccactgatgttgagaacacaattcttctattaatgagatgcagacaatttcagattgaaggttcggaagaagccctccggaaaatgttacctctggtaatgcctccctggaagtgtaggttgtttgtgaatatgagttagaatgtacacttcgtcacttccttatcttcataaattttgcaggtattttctcaggataagtcaatatatgaagctgtggagagtgcattcatcactatatacacaaagaaaagtcccacggaaacagccaaaagtttattaaaccttaccattgaatgcagcattggtgaccttgctgcccttgaaagcttagttagttcattggtatcaaaaggagaaatttcatccaacacggtgcactcttgtttcccttcaaagtttgctcatagcaacctttcaaatgctattttttacagtttagttacagtaatgctaagtactccccccattccaaaatatagggcacaacgattttttcccctaatgttgcataatacgaggttcgcatgcatgcgtgcatgctattgactagcacctccccctcctctaagttctatttttaaagcctctaccctcaagatctctgatctctaatcccattgggtgcatgcattttatttattgggatgatccaaattagaaggtgataataattttttcttggtttttgcgtaagagatagttgctcattatattttggaatgtaggggagtactcatttattctagcacaccaatctcctgtgcaccaaaagtgattctgcacatagattgagaatgcaaggtagtactaacttgcaattaagtgagtgcattaattgctgaatatgcataaattaagaacttaagatgcatgcaaagaatattgctcccagtttctccactttctgatgtgaacttcccttatctagatcctacagtgggaacttttttctgttcatcttgaagtatcttttgttagctgctcatcaaaataatttatattgcctataacataacttataccattttgtcgaatgttatttatctaacttcagtgacacctattatcttttgttggggaagttcacacttgttaaatcccattgtcttttgcagataacagccctgtgggattatttttgctttcacatcaatggtgtgaaaccagtgcaaagccgtggag

SEQ ID NO: 19215 - DNA, 3066 bp, Oryza sativa
ttcatcaatgtccatgctttcaagcttcttcttggtctcttcatcagtcttatcttctttgaataactcttctgctccaaatctcaatatcgctgaaagttcattctggcaaaatgtatagctcacatcagaagagcaaaacagaaaatacaagtgaggtgacaagccagattctatttaatgcatttctctcagaattttaattatcagtaaatgctcttgtgttgtagagagaattatagcttgggtatcttgaaagaaggctggtctagtcacatgagcatatatataccacactagacttacagcctgtatcactaacaatcgcttagttgataagttactggtagttttaacaatcttttgtaatacaattatacaatagatagatttcaaatatacaaatctatcttatatacaaaagattgttaaaactacctaagtaatattgttgtaccaaaccaatatgacatccaaatcaacccaaatacctaagtaaactaaataactggtgcagaaacttaccttgtcaaacatggaaccacctttttttgattctttcttctcgagcctgccctcagcatttagcttctgaatcactaggtgatcaagaacctgacatatatagaaaaagaacaagtcagaggttattcgtttatatttattaaaacaatatatgaaacaaatcaggctcatcaccatttttttctttgcacgttccaatatatccttcttcaacacttttgcatgtcacgaaacgatatatgttaacagtttcttgttgcccaatcctgtgtgccctactcattgcctagcatgacatcacacattcaaaaacccgaaatatgagaaactctttcaagacaaaaattgaaaacccatatatgagagagagagagagagaggggaacctgtaaatcattttgcggattccagtctgaatcaaaaatgatcacggtatctgctgttgcaagattaataccaagcccaccagcacgtgtagacagaagaaaacagaagtcatcacttccaggagcattaaaatgctccatggcctggtgacgaagatctgctctcgtactgccatcaagcctctgaaactggaatcctcggagggatagatactcagcaaggatgtccaacatcctaaccatctgcaacaatttgattcagaaagcacttatataagttatctaaggtgcaaatgctttcaagcgacatataatatattcgttgtccgatatattgatgttggtgtaaaatacaaatgtggctctagtaacacaattgctttcaaaatgcagggaaaccataattgtgttgtaaaaaatataaatacatttaccaactaacaaaagcaaccaattgaataagcttgttctgtcagattaaatatcataaaaaacactgtaaagtgggaaaacaaatacactgagccagctcttcctatcatccctgaagagaagtttcattctgcaaacaaaacactaaccaactatgcaaccaactaaccacgttgttaacttgactcaccatactaatttctcaaattgaagcaaatttctgcacgtatgcaacatattgctaatggattgtagaaaataagtttagacaatgtattggatactattagttcgactaatatagactgcaacacaatgggcatcaaatggcaagtaaaccaaacatacaaacctgagagaagataagcacacgatgattagtctcccgcagtcttaccaacagcttgtccaataacactaatttcccactactcataacaatgcgttcaactttattgcgatcaccaatgctatctccaccataaccatgatcagcactttcaaataaaaatgggtggttgcagcactttttcaactcaacaacgatatttaaaagcgagacctgcatatgcaataatcaagttagctagaataatttaaataaccagacatttaaatgtgcctgcagaagaatctgtgttttgttaatgctattttctttgtgtgtatattatgaagaatcacctagaaaaaacaaaatggaatcataaaaaattgaaaacacgaagaactgcagattagctcaggaaaaatagccctcgattggaaaaagaactgctacatatgcactgctcatttctcaaatacaatatacaggatattccatgaaggacaatcagcattacacaagcattgtgaacagcctaattataaatagttgtgaagttaaagataagtggtggttgtcaaaaaataataatgcatcgagtaaatcaggcaataaaggtttgcatatataaaagtagtacaccgtcatagcgactacgtaggaacagaagaatagaagaaatcattactaaaataaaatagtgctcaagatttatcaacacctgattcccacgaactcctttgttgagattctggaaattccgctccaaaatccatttgtaatacctaataattaattaggaaaaatgattttatctcaatgatgaataaaaggaacataaacttacattagtacaaagtatttactgcttctgtagaggagacatatcaacacgaagaatccgctcaattttcggaggtaaagatttctccacatcttttataactcgtcttagaatatgaggcctcaattccttgtgaagatttgcaagctataaaaataaatcaagcaaagttatggatgtccaatgctgacagaatagtctaggtcaagagaaaagtacattttgaaagagaaaaatatttacctcagtttcattgaaggaactcaaatttttgtatctctcaacaaatatatccttgctgttgaatttagatggatcaaggaaatgaagtaacgccctgcagattttaaaatacactcagcaaaaatgggacaaagaataataaaggtaaaacaaaaatatatatagaggcaaaatgcaacagctatgaacatgttgcagtctctagtcacctattcacaataagaatatgaacttccaaccataaatctacataaaatcgcataccagagctcttcaacgctgttttgcaatggggtcccggtgatgag

SEQ ID NO: 19216 - DNA, 7493 bp, Oryza sativa
ctttgcccctgtcactctcacacgctcacttactccttaagcctgagcattctggtgcatttgcatatttgcattgcaccatccagctagcttccttgggctagtttagaaaatctttctgatcgctagcgcagcttcttccaaaatcaaaaactttcttaaacagttcagtattttctaaattcaaaaaaatattgtagaattcataaagtaaactaaaagtcagaattttgctttcttagcttattcgaaattatcactagatggatttccatcaggcgtttctcagaatctaaagcgactgacccaaagaaactcttggtctctatctaccctgcttggtgtgtgttgatggcctaaccatcaagacatgaaccaaccccgtgacactaaccaaccctggtctttgataatccctacattgattaacaacaattgattgatcaccttaggtgacatgacgacgaaaaatgatgtttatttgtatgggttagtaagcatcaactgctcctggggtttaactaatcaaggtgatcgcttcaccggcactctggtgacatcacaatatcgcatgatatgattttcagtgaaaagaagtcgtttttatgtcatctctatctatactttgcatttttttccaataaaaatcagttgttttccgttaagattgtactctgtacgactctatagaaattttgtgcgctagggcccatatggattatggcaatggagattttcatgattttatttgtccaaaatgaaccacaagtacgaagaagatgtatcgtgaacacgtggatatttatattgagtcttgtagtataagtggcttgtatttgctcccttctcaaataaatgtagttagtcaaatctcaaaaccttaaataattaactaatataaaaatattaggattttacatggtaaaatgatttgcatagatttattatgaaaacgattttaatatagtaatattcttaatagtttttatctaaaaaaataaatatatagttataaaaggtaataatgaaacacttgtattggatactatgtcaatgtctaaatcgacaagtaaaacggaacgggtagtagtagcagttatggtgaaatcacgtcacttgcttagataatccagaatttgactcctacttttatttctacgcgtttgtatttaattttgaatttgaactcatgacctgtgaactgtaaacctcaataggaatataggatgacctagtaggcagaactaagtcagcatttttgtttttttaaccacaaatactgactaacattaaccggcgttttttttttgtgaagctatatagggatcataactttaagatcgcccaaagcttaaattagttggatctgacaaaagtggcacggattgctacttcgtttgtcagcttcgtaggatccattgattaattagcctgcgtcagaaagttagctcacgaaaagtgtactccattagctaactttcctttctccaaaagctcgcattacaggacacttaccaagtgctcacaaagtagacaaaaaatttgttggtgtttcgttttttttcctctctcctttttggtgtacctagtttcaaacaggagtaacataattaatttcaaacagaaggaacatattattcagcatacgtgtacacggcatttagtagatacagtcatacagagtactacttggttgagattagtctagttggtatcgtacctgaagaatttggtaccggcaaaacttggattgaactgatgtgtatcttccatccttctgaaagtgtattatcttcaagaagagaattaagattgcttagtggtactgattaagctcgttcttaaagcattatgctgtccaggtacaatgtgttttattatagggatgctaatgtgatgttacataggatccgacttctgcattactgctagctgtgcatgcatgcagctcaaaccatggtctgaaagtctgaaagactgaaactattcaacgagtgaatgcatccatcgtatctcctcttatttcttctgtttttgaatggaccctagttctttttgccgtcatggtgttggttttgagaagatgcaattggtgggttgcttggtcaaatcgaactgagatggcttggaaacccctcaaaaaataatgtacacatggacccatccccaatgctgaaaccaccttccagcctagcattgccaactcaaactaggaactccccaacctcacaaaccaaaggctatgcccacacaacactagtactagaatgcaacaaacaatactagctcaaggatagactaacatattcctcttttccatttttttttgcgaggaattgataaactgacttcactctcattatatttcgtcaatattattggtattcaaaccagcctttacaaaaccacgtggttacctcatgatttaccgtggtaaccatgcacgaccggttttttaaaacctcacattttttttcttggttatctcccgataaacacatggttaccgcattaactgggataccatcaattagcggtgaccctactaaatttgcaagaaaacttgatacaaacttataaaaagtgtatttcgtcaataaccatcatatgcgtggcttgaaactaaatggtcttcaatcagttacacaatataatttcttaccaaccgatatagatagggacatgaatgtaaattaggcttctccagaaacacggagatgataacacacgatatatgattccgaccgctaaaaagacatatagcactaaacagttatataacaaaaccatatggacagatttttcacattttgatgctctctaccgatcgatggtcccaccaaatatgctggaagatgttccatcatcagtgatgcttcttgctggccgggttgctctagcatagctcaacctctaaccgccactagttttttatactcttctctatagccatttaagctctctccctgcagcttctcacaatccaaaaccccaaaaccttctcattttttttgtagaccaagccaagctacagccaaagccaagcatggtgcaacaacagcagcagcagcagcacagaatctacatcctacagttcaggaagggcgagcaggatcaggaggtcgcatgcaaggtctcgacgccgcccaaggccggcaccggccgccgtgtcatgtactactaccacgactacggcggcggcggcgccggcaagaacggcaaggcggcgcagcctagggcgttcagcatgcgccgcttctttgggctgctgctgctgtcgttcgtctcggttgggacgctgttcgtggcgcccgtgtcgttcttctccttcgtgcactccgacgagggtggcggtggcgcggccgcggcggcgcggcgtgcggtggaggtcgccgcggcgccgtgctctggcatggggaatgatagcctttgctgtgaccggacgtcgacgcgggcggacatctgcttcgcgcgcggcgacgtgcggatgcactcggcgagcgcgtcgttccagctcgtgtcgtcgtcgtccgggaacgcgacggcggcggcggtggaggaggagaggatacggccgtacacgcgcaagtgggaggcgaacgtcatggcgacgatcgacgaggtgcggctccgtcgcgtgcccgccggcggcgcggcgcggtgcgacgtcgtgcacgacgtgcccgccgtggtgttctccacgggcgggtacacgggcaacgtgtaccacgagttcaacgacgggatcctgccgctgttcgtgacgtcgaaccacctccgccgccgcgtggtgttcgtcatcctcgagtaccacgactggtggatgaccaagtacggcgacgtcgtgtcccgcctctcggcgttcccgccgatcgacttcaccgccgaccgccgcgtgcactgcttcccggaggtgatcgccggcctgcgcatccacggcgagctcaccgtcgatcccgagaagacgccggagggcaagagcatccgccacttccggacgctcctcgacgacgcctaccgcggccgcatccagtacctcgagcggctcgagcgccgcgccgctcgcagccgcaagcgccgcgccgccgcggccaagcccaccaccacctccatcgccctgccgatcatggcgcctccggcgaagcaggcctcgccgtcgccgccggacaggcctcgtctggtgatcgtgtcgcgcacggggtcccgcgtgatcgagaacgaggcggacgtcgccgcgctcgccgcggacgtcggcttcgacgtgcgcgtggtccgccccgagcgcaccaccgagctgtgcaagatataccgggagctcaacgccagcgacgccatggtgggcgtgcacggcgccgccatgacccacttcctcttcatgcgcccgggcaaggtgttcgtccaggtcgtgccgctcggcaccgactgggccgccggcgcctactacggcgagccggcggcgcgcctcggcctccgctacgtcggctacaagatcctccccgaggagagctccctctcccgcgagtaccccaccggcgaccccgtgctcaccgaccccgccggcgtcggcaagcgcggctgggacgtcaccaagaaggtctacctcgatcgccagaacgtccgcctcgacctgccacgcttcagggaggtgctcgtcggagctcaccggcacttggtcgccggcaagcggcggcgccggcaaagagagagccagtgatcgagcaatcaatcgattgatcgtttgcttgatttgacccggtttggttaaccaaattaactactcccatatgctgctctagctctctctctctctctctctacacaatttttttttgctttttttttcttttcttgttgttactcaaacactgacttgacctgacaattctttgcattagattgtgaattgatgtactttgtggttttacacgtttcagttctatgaacttgatgtgaatatatactcaataaagatatcaaattacactgcatctgtacttaacaatatctgaggtgtgcaaattttttttgcaatcttctgtggtgatatctcagatggtttttagcatgcaaattgcagagacaagttgatgcttgcaggacaagaactttgaacagcttgctgacataggaggatctatctgaaactcatgcacggatcactacaaatttttggaactttggcaggttcaggcgcgctgggatagagatggatgctaatccccgtgtttcttatcctaatttccagcctggattgggtttccggttggttgaaacatactaatcagcttttgtttagcgtcaataaagactgctaattagtggccataaagctatctacctctacctaagtacccatcacacacttggacagctgcaacacgacgccactacacagtgagatttagtgatcgatagatatatccatcgatgcatgatgaacaccttcacctacaagttctactccaagaaacggctagctttgatctaattgcgaatacactcatcaaccaccaatgttttttcaactctggatgcaaagttgaacggaatatttttcttttttttacttgcaagttagcaacaaccatacctagaattctacaaagctaataataaattaaaagaagtgagatgggatatagatagtggtggcaacggtcagtggaatctcaccatcagatagataattccaagttgcaggcttgcagttggcgatcactgttccttatcctcctcgttctggaggcgaaaaaaggctatcatgcgtgctcaattaccttaccactatctagttcaaatacactagcactagtgaaaatttagctgaaatgataattccaaagtgtgaggttgcccaaatgacatggacgtcgagacagggaatatggtcactttgggggtacacgcacgtacgctgagccgctgacttgaggttgaaggtagcatctgctacgtctgattcgagccttcggttgtgtggctcgatttgttgctgtgaagacgacgacgtacgtgcggtatgtgcagtttcactttcagttaccctcgcaagaatgcctttacttctactgtaccactacttgtgctacgtttgttgtgaaaccttaactagggccgtgtttagtttttaaaattgaagagaagtttgaggaaagttggtagtttggaaaaaaaagttgggagtttacgtgagtaggaaagttttggatgtgatataatgtgatggaaagttgggagtttgggggaagtttggtgttaactaaacatggcctaggaagagtattactccctacgtcccataatataagggattttgagtttttgcttacacactttgaccactcgtcttattcaaaaaatttatgcaaatataaaaaacgaaaagttgtgcttaaagtactttgaaaagtaagtcacaaaaaataaacagtaattccaaaattttttgaataagacgagtagtcaaacagtgcaaacaaaaactcaaaatcccttatattatggaacggagggagtactacatactccttccgtcccataaaaaaccaaactaatatcagatgtgacatattctagtactaaaatcctggatatacctatgttcaaatttattatactagaatgtgtcatatcagtcctggtttttttttttggacggaggaagtaggtttaagatgtctaaaaatttattaatttgtagtcgcctaaaattgaagtgctgtgtgatgtggaattttagttcattctatatggttttacattattttatgtaagttctatttttttaatgcaagtttgtaaatttctatgaggcataaatttcatttaatgtacttttgaaaatttttacatgttagaagaatttattttcaacaaccgggaagtggtatttaatactcctactaggggaatgatgaaaaccattagattgatatcaatcttttaaaaattaggtgcttttttttttgaaacaaggtgcctaaaatgtaaacagacaataaacgtgtgaaaactggaaaagaaaagaaaaggaagaaaaagataatgggctaaaagcccacgagcgctcacttgtagagacggatggaagacccagtgcattaggcccacaatgctcgcaaagtattttcccctcccgctccgctcgtcaagcacctcgcaatacgggaaaaatatgtagagtaaaatacattttaaattttaatggtagtttttagattttatttttgactagaaaaaatgctcgtgtgttgctcactggcgctattgacgatggtggtgatttcaactcttggagggtgttgacggcttcggtgcaagaaagaagaccacctcagcttgttgtgatgactaacatgcctgtgagcggacgcaatgttgacagtgggaatgccttcacattggtagatcggtagagaccatggcgaaatccgggacggcgacacctgtgggcgccgttctcttcttggagacgtcttattgcgctttcccgt

SEQ ID NO: 19217 - DNA, 10744 bp, Oryza sativa
ttaatctatactgtcatattatgaatgcagatgatttgctcactttgccaaaaaactgtacaacgtgagctatgggatcttcataaaggcttacaatgcccacaaaggatgcttgcatgccaatattgtgactttgaactacctgcagctgatatttatgagcatcaggtatagttgtgtttcgcatcagaagttactattctgcaaaccaaacaaccatccatcttctttagaacatcactttctaattatactagtcacttggtacaggacgtgtgtgggaatcgaacagaatattgtcagccttgcaggaagtatgtcagactgcgggaacagattggacacgacatccagttccattcccaacccattgttgcttcagaatcttcaaggtaaaagcatgcttctaaattatgcattctattcatttaagttgacatggttcaatataactttcagttagattagcattctttaccagcaaaattagtcactgatacttcgtttgtagaaactggtagatatagtaaggaagtttagcttaccttgtgatagtttaaatttcagtgacagaagcacgctggaagaagaagagagttatccagcagaagaacaaccagtacgacccaagcacactcatggcttacaacgcaagcaatttcttgtcacaattgtgatagctggaatttcaattctggttggatcagttctgctaaaaaaggggtggttatcatgatatttccaacataaacatgaatttgccttcttaatgtgcaaattccttcgtagcctatgggcagggcagagatccttgaactacagtttgaagtcattgtaggaatgacctgactgatatgtttttttttaccagaaggtatttctacatgctggcagctggtaatctatgtaaaaatgttatttacaagtacgaggcttacttttacaagggatcaatgccatctgttttgttgttgtcttgttgatatgtttgttacagagatgctagttatttgattgtggattgtaacaacttacctttcaactgctataatatttgaacgtctccaatggaaggggtagtgcatggaagcgaaacaagtgcttattgcacatatgatttttattcaataagcgtagcaaaatatacggtgcccatgctagaatgggatgctatgtcatcctacaaacagagctaatttaggggagatacaaaccaagttttctggatgtatctagcagttaacgttaaataatgtcaatcctaatatagtagagacaagtggcagctataaacaaccacaatatatatttatctttcttgttggaatgaaacatgtttgcctgcattttcagctattgacagttgcttttcttcaatttacttgcggtgaatagtctgtagttgattggttccatatcactgattataccgaactgcttgttgtagaagccccatagctcgcacctgtttcatcaaggaattttgtcagcatatcagacacatgtcaacctaaataccacggtgtatcagaaaggacgtaccagtatgccaagaactgaaacggggcatacttgccgtagatattatccaattccttctgaacagaactgatggtgcttgctctcttgtgaaactgcagcaaatttcaggcaatacatgaacatgacatattgaaacctatcaaccttagaaatctcaaagcaagatactaggagaaaatatacctgctttaaatgcctaattgtctcagtgtcagctgggatcatgtggaaaaatcccatacacatgagcacattggcacgagtgaaagggccaaatccggatattgtggataactcttcattcagtctatcataggtggatggggtagttgataggccttctacagttggtacagacattttgcgtatttcttcaagcttttgtaggcatatctttccttctacaatgcttcgtgcaagcattacaattcgtctggctcgatatccaagattacaacgcttcgccaaaaagtcctcatcaaggtttgccaattcttccggtgtaggaaaatctccaccacaatcttccaagcaaagttcatatcgcaatttaagctctgaatgatccaatgagacctcagatgtgttgcctgtttcatttgcagatgaaggcaagctaaataagttttcgtttgctgtgttagttgctagatttggatcctccaggcataccatcttatcctcgttaaattttgtttctagcttcacacggacattccgcttattgctgcgcttccttttacattccctgattggaggcgtccttgactgaaaattttcggtgctagatgaagatcttagctccaactgaagctcacacagtgcagtagacattgacaaggtccttgtccatctgcagttgaacagcacggttgaatgcagctacaaatactagaaaacaatgcacttctgatgcatcaaatttcatcaatgttctttacaattcttaaacagtccagctatacccactcattcatttgcacagcacttatttcggaactcttcttatcctatcttctttttatctaagaaatgtttcaggcaaatagtagtagcaaatattcctagcgaagcaaaacatgaggctgataaccagttcttatcaactgtgaacacgatataaattagtgactgcattgcaacaataccaccgtataggatctgttaatttttaatctaattgtcagcacacatgaaagatagcaatccctaaatatcgcgacatgtttgtatcagaatttcgcatagatgtactagcaagggaaggcaaggggagaggaagactgaactggcaattgcagaggaggatgcacttgatcatgtcctcgaagagcgtgggcgagcggaagatgcgcccgaaccccacctccctcgccacggcgtgcatcgcctggaactccgccacggccctcccgtcctcctcatccagccgcagcatccgccgcacttgctcctgccaaccaaaccaacgaatcaatcaatcacaatcagcagggcgcgaacacgaaaaacggatgctaaacccataccaaacacttacgaggatggaggtctggtcgagcggggagagggcgtcgtcgtcgggcgcgccgaggacggagacgaggagggcgtcggaggggcgcgcggggtggcgggagacgcggacggcgacggaggcggcgcggtcggaggcgaggcggagcgggcgcaccagcgcgcgcgacgcggggtcccagcggttgggcgccatcatgaacagcccgtggctgcacaccgccgcctccaggtcgaacggggcggcgccggggtagggcggcgcgccgcctagcgggagctccagctccagctccacggccacgcggcgcgcggcggcggggtcgccgccttccggggacggcatgggcggtgattggggaggtggggatcggggcgtggtcgagtgatcgaggcagcaacgggggttcgcatcgtctgactactgtagcgatcaatcctgtgcattcgcgtttgatccaacggctggaaatgaagaatggcggagagtgctgtagctctctgccattctagttgccatggcagagtatacgttcccagcaacgggcgggtcgctgtttcgctcttgtgaagaagctaatgggaaaccattttatgagcagtagcaggattgattgggcaatgtgcagtgcggttgaaggcggtttgggcttttggtttttggatatacatctatttgtgtctagttctgtagttcacgctaaaattagaagtttggttgaaattggaacgatgtgatagaaaagttgaaagtttatgtgtataggaaagttttgatgtgatggaaaagttggaagtttgaaaaaaaagtttggaactaaacaaaggcttagagatttggctgagctttcttgaatatgttgaattggagatatttgggttgaaatgtactactaagtagtttgtatgtgaaattaaagtaaactagtgttgtgtttagttccatccaaagtttggattttggttgaaattggaaatgatgtgactgaaaagttgtgtgtgtatgacaggttgatgtgatgggaaaatgcaaagtttggaggcaaactttggatctaaacacaccctagattgagttattttgaaataaataatgaaactgatgtcatctgatatttaacttatacatccgtttgtaaaattcttatagtatcgtcttgtaacttaaacaagtctgttttgtatagttttaactttatcttcatctctcctagagttggagtttaaccaaatagttttggtttcactcaaaaagggagtagagcaggtcgaagttttctcatagaataaattatgaatgtgaagtgaggttcacggtactctataattttactctagattcaactcttggcattaaatttagaaactatattctatatcgttattggagttaaatttagaagttaaagcatgctaaacaggccatagaaagcaccaatgcttttataattagaagattcataataatagaatttcctacacatataatgtttacggaatcgttatacttctgttgacagaaaatacatccccaaatcttgcagattttggaccactagatgtgcttcacgattcgtgctccagttgcatcttctccaactccggcgacttcttcttcttcggcgatggcgacaacccaaactccggcaaagggccgacgaattagggtcccggggtgggggtgggaggaagagggaggagttcgccggctttagagggatggccgtgggaggcggtggatcgggcaggcggcaaggcggctgtaccgctgccgaagcgcggggtcgagagcgggcggtgggcaggggcaagcggaaagagtgttagaaggaggcagccggtggtggcgccccaccgctggcgacggggaagacggcggcacgggatagctcgtcgccaccggcttgtggaaaaggagaggagagggagagggggccggctgggggggcctcgccggcgccgttgacacctttcagccagtcggcgaggccgggtggcggcacggtggggcggcagcggcggcggtgtaggaggcgcgcggtgctgagaggaggggagcgctcgagtgacttgtgtggtggcagggaggaaaaaggaaaactggttagggttttgtggacattgcacgaatctcaaatcaatccaatgttctgaaattcacaagatattaggagggattttctgtcaaatgaggaatagacagttggtttattattccaaacacaaaaaagaaatttacagttactagtagggtgcccgtgcgttgctacaggaaattttgatcacgggaaaaaaaaatctggcaatccaaaagaaactacgagttgcggcggccggttgtgtgcgggccggcgggtgggcggcgattttcgcgtattttttaaattttttttgctcttcgattaaatcttcattgcccaatcatttttcaaagaaatccagtgatgggatgcaatcttcgaacttacattttttagcacagcagatcaatattgacaaggcaggaagaaagtgactcaaattttgagctatcattgtgttgttatattttgatagtatctgtccagccagatggtttatatcgggaacaaagatcttcctattaaactttgaggaaaaactttttaagaaattttgcgattaacaactaacaaacgctcaaattctattattttgcagaatctgcctctagttgagctggtctccggcagacatacaatctcaaggcaataagtatacatgttgtaaattaaaattaaaatttctaggtgtaacaaaattatcacccttttgtatcctgaggtttattcacatgcaaagcaccggagttcaataaaccatgaagatgcttctttttttactttagaagttgtttctaacctagctattaagttcaatatgtcactatggtcctaaactgatcagtcctgaagttgttctttacactccagcaatgcttatagatgtctagttgattacaacttgatttttactccacaaatttggcatccatgaaaatgtcctctctaattgagctatattaattgatcatttgtagttggggatagaaactttagaaaagttgattgaatacccagaatttgtggggactacacccacatgctttgcaaatcaattctatctgctatagtgtttccaaacatgtattgtatatttccaaagtaccaatagaacagtaccaatcagaccaaatgacaaaatgaaccgtgaaaaaactgatactaaaactaatttacatagaaaggcttcttagttttcaatcacagaaaatgaatgcctgtcttagtaatgcaaactccctaatcatctaatttcactgaaaggtagttggcattgaagtggcatatggcacaaaaggccaatcaggatcatcagaggatggcctcctgattaccttgtttgcatcccaacagtataccaaaggcatagaacatatggatctctgtctataggcaaatccccctatgttatccctgtcagctgcttcaaataaaacagctatatcagtcctgtattatgtgccatttttgcacatgatttagctgattttggagttctccagacagtaaaatttataaacttgacaaagtaagaaaccccaggcatctgaaactaaaactaaattatataccattattaagaaaggaggaatgtgatcacaaaacaaaacacagaacaaggaggaatgcgatcagtttacctagagcagcaggctaagttagtgtcagatgcgatgcaaagggcaaagttgagaatttttttttaaaagtaaaacagcaagagcactttatgtgtcaccttgctttatatggcttcgtctgaactttggttacctaaattgcaccgcatatgcacttttctacacaattaggttgagcaaaagctttcagacctaaacaaatcagaaactacacaagtattcacaagcagagttcagttgttcagtaatctatctccaagagtcagttgttcaggtgttgcagtccaaaccttttgcaatgatgagaaatttgattagttgcatacattatgatatagttattgtacttaaagtcaaccattctcctcaaatttcatgcactttcacagctattacctggcaacttgacagtccttctgagagagaagctcgcaacctgcaatctataataagcatcagaaaatgggattgcaatttggcatttcaaagttcacacttatagtatatatatactccccccatctatctttgatcagaatataactttgtgaccagttgtattgcctgtgatttctgaaggatgcaacagagcactatatcaccctcaatggaatttttggagcagagaatacagtctgccaaaaagagaagaacaaagacaaattagaagaaaggatgcaacagagcactatatcaccttcaatgggattttaggataatacagtctgccaaaaagagaagaacaaagacaaattagaagaaaggatgcaacagagcactatatcaccttcaatgggatttttggagcagagaatacagtctgccaaaaagaaaagaacaaagacaaattagaacaagattgaatccccaagccaacacaatacacgtgaactcttggtagatgaagaaaccgctaaaagtggaaattgtatctcgtcgatgcagccatatccagggggagctcacgaatcctacggtggcggcgtcgagaggcgaggcggcaggatgaggaggcgacacaatgggggagtgatggctgaacaaatgcataatagccattgataatttaatatcaggattatttacattatgctggagacggcaatcgaatgagaagtccatttatataataaattttgcgtcacacatgcacataatctgatttcaattatctcactgatgtatgctattagtgggagagaggaaaattaagctgcaagtatatataagcaaaaagaaaactgctcaccgagtccaggcagacttgtcgtaggccatgtgtgtaggcagatcgagtagtcgatcaggggaaagggcggcgaggccttcccggcgttcggctgtggaggctgaatgttttgcctctagcttcttatcaaaaattacaacgaagatcccgatcgaccggcgtaggggaaggcgatgtgggaggagaccgatggctggtgatttgggaagtcgcccagaagctggcgtcggcgatctggaggcggaaatcggcggccgcacgatgacgacctcaatggcgatacgaggcggcgcgatgacaggtcgccgccggcgtcgcgagtcgatctagtggcggagatcgaaggcggcgtcgacggcgttgcgagccgcgggcgacgatggcgatctcgaggagtagtagtcgccgacggaggtgggtgggcagcgcgcgtggcaggtgtgcagaggagtcggcgtcggcggcggggaggagaaggagtaggagtagacccgtcggcgtgatctggagcggagtcgacggcggcggcgttggcggcggttgcgggtgggcagcggcagcgtcgccggctggggcgattgggcgaggtgaggaggcgacgtagggaggagggcgaaggacgcggatccgagagaggagcgagcgtgggaggagatcggtcgttggatacttgatatgcaaattggatggttgagattacgcgtgtctgtcagatgcgtctgctatgtcaggaatcaagaccaccactacggattttttaagtagtagagatatattaaactctatcacatatcgggagatacgacaagttatggcagatcataggtataacaagttactagtccatacatcaggattcctaaaattatatgaatttatgagaaattacgtaatgctattctcaaccatgcaacctggaaattcttgaccgaagaatgagacaggtcgatgaaagctcaacgcctgaagggacaacggtgaggtgggggcacaaccaaagggttggaaacgggagaaccaaccacctctcgcccagccgcgacaccgcaccccgctcgcactcgcacgtacgcgaaggaaggaagaacccacactacccaccccctatccacccacccatcctctccctctcctctactccacaccctccgcttctccactcctccctcgcgatggcggtcacgcgcctcgccgtggccgccgccctctcggccgcgccgccgtcctcccgccgccgcagggccttcttccatcactcctgccgcccgctcccttcgtcggcggcggcggcggccaaggcgttgcgcgcgtcggctgcccccgccgtcgacgaggaggcccccgcatccccgcctccatcaggtgctcgcgccctcgctctctattgctccagatttttttttagattggactgttccgagtgttcagtccgcgccgtgcgagctcgcttgcatttgatctgatgctgtccatggagctgaagacgatgatttgctgttcgtgcagatcttggcaagggagtggagaacttggtgatcataggctctggcccggcggggtacactgccgcgatttacgccgctcgggcgaacctcaagcccgtcgtgttcgaaggctaccaggttggtggcgttcctggtgggcagctgatgaccaccaccgaggtggagaatttccctgggtttccggatggcgtcactgggcctgatctcatggacaagtaaacattgctcatttcttcgcatgtttttgagtttatctgttgttaatgttgtgttcacttgctcatatcgggccatggattaaatcagaatgcggaagcaagcggagcggtggggtgctgagcttcaccaggaggatgttgagtttgtgaatgtgaagagcagaccgtttgttattcgtagcagtgatcgtgaggttagcatcattgtgctcttcctccttttcgagttatgaactttccacttttcacaaggtgtcattgttggtttatggtaatacaatgttcttgacaatagcgattttcacaatgttcttgacaaaagtattagtatgatttaaacaaaactatcatccatttaattaagaatataacaaaggagagctggtcaagttgtgtcgggaaagcatatcagtatacaatttttatatggtttacttaattagctcttacaatatttgcctagtcatgtgctttagttctttagttgtgctgtaacttctctttctataagtataatgaccagtttgatatagcatatagcagtcgtctgttataattaatagtgcacagaactactttggacaaatgtttttgctgcgctcatcccagtgagtgtcctatacaggtgaaatgccatagtgtaatcattgctactggtgctgctgctaagcgccttcgattacctcgtgaagatgaattttggagtagaggtatcagtgcatgtgcaatatgtgatggagcatccccactatttaagggtcaagttcttgcagttgttggaggtggtgatacagctacagaggaagctatatatttgaccaaatatgcacgtcacgttcatttacttgttcgaaaggatcagctacgagcatccaaagctatgcaggaccggtaaggaactttcaagtcctatccctagtaaatgtatatatttaccttcaagtgactactctgttcatgtaaatatcttgcc

SEQ ID NO: 19218 - DNA, 19632 bp, Oryza sativa
  unsure (1)..(19632): unsure at all n locations
cagcaatcccaaaggccagatgtctggtattcaactgaagagaaccgacacgggagaggaatcagttcttgaggtgaaaggtctattctatggcataggacacactccaaacagtcagttgttacaaggtcaaattgatcttgacgatgctggttatattttggttgaagaaggcacagcaaaaacatcagttgatggtgtatttgctgctggtgatgtgcaggtaactccatccttcacttcatgtatataacttctacatggctgtaatgtgtttcattcttgaaatttgaatataaccctgccacagttcatatgtgccataatcattagcatgtcatgtcttggtggtcttgtagcacaccagcacatcacgtcttcttttattgaacactagctggattggaatacaaatatgagtattctagttttaatgccttttcaatgtttatctgcaggatcatgaatggaggcaagccgttactgcagctggatccggatgtgtagccgctttgtcggtggaaagatacttagttgccaacgaccttcttgttgaatttcaccaggtactatcttgtctgcagcatatatttctttatggtgactgatgcttctgcgaacattatctagctcaatatttgttgttccatggaggctagctgttccactgtcaaattttgtgcctatgattactggtacaccagacactgcagcaatttctgctgttgatctttttcctctaattttagggtttctagttgccatatacagcaattctgtgcagaccatgttgtgcttttatttcatgtataaaatttgaggttggaccttgtcagcatgtattggtattgttatgtgtaatcgagaatatatttattctagaaatgtgaaaggatgaaactaaatctatttgtcattgtatatgtatcgatcaatgcacatttagcatttttaattgaccatctctagcaaccggtcaggcttacaagatacacttcatctttttattaaattacagcctgttcgcgaagaaaaggagaaggagattacagatagagatgtcgagatgggctttgacatttctcacacaaagcataggggacaggtacctaacacatttgcttgtactgtggcttcatattggtgcaaacatttatgtgaaaactgatttgagcttgcttcctttgcagtatgcactccgcaaagtatatcatgaaagtccaaggcttgtctgtgttctatatacttctccaacatgtggtccttgcagaaccttaaagccaattctaagcaaggtttgttcttgaaattgaaattgggctctagtcgtcacaagtcatcactctagacaaataaaatgccttgatatacagctatctgattggccctccagtccatcgatcattatgcattcatattgacaggccatgttaacgttcatttctctgatctaccaatatgaccaatcaagttcatttctctgatctacaatatcgaatcattaaagaaaatccatttcaaggtgctaactttgtgatgttcttgtggtctggacaacacaggttttcagtgcttcttgataaaccttgtagaactgatatttatagttgcttgactaacatttgattgccgcaccattctacagaagttccgttctgttagtcatgcttgtgttagttttgttgttaacgttgctagttgctacttggcacttgctaatattgatatctttttcaggttatagatgagtacaacgaacacgttcattttgtcgaaattgacatcgaggaggatcctgaaatagcagaagctgcaggcatcatgggaacaccatgtgttcaattttttaaaaataaagaaatgctcaggttggctatcttggatttgtttatctgctactagtctatataaacatcagtcacttcattgctgcctaattaatatgatgcaatggaatcccttctgatcgtttttaaccttggactatgcaggactgtctctggtgttaaaatgaagaaggaatatagggagtttatcgagtcaaacaaatgagctgaacccaacatacgattcaaattttaaagtgtaatagtcttcttttgcccatactgactatttctagctgccaccgtggtggccaatttttggtcaaaaattttcagatgggccgggtgtagtgcggttcaagaggaaattagccggtcgctcctattgaattcaatcaatgtaacagaatatattcttttgctgtacaacaacgtattggtcgttgtcttgacaccgtgcaaactcctccctgacaatatatacgtcttaaagattttggacagtgtgtgatctatatgctgaacataatattcatatgcttatagtgagcttgctggaaagataccctgacataaaactattaaggcattgtttttggaacagggaaattttacattaaatttatagaaaatggataggttcatgtgaaaatccaatgaaattaatatgtttgaaacgagccttttctttgcgtagcagagcagaggatggttgtttgggaaagcttctgtggcattgcagtttctttcaaaatctataactcttcttaaacagtcactgttcactatattctcagaatcagaatctactacagaatctaaaaatgaccagctcaaaaaactataatttgaagataaagctaaagactccagaaaataagtccgcagggccggccgaacactcaggagaacaccacgtttttccagtctcatctcatccttacgcgccgaccgggcggccgactccgccgccgccgccgctccaaaccggcaaccaaaaacgagcggcgcacggcaaaagcaatcacaaattcacaattcacagctcacctcggcgaggcgccaagccaagacgagacgacgagtcacgccaccacgcgtcacccttccgccgcgccggtgcctcctccagaatcctcctccgttttatccccacccaaaaccggcgaaccacccgcccgcccaatccccgcctcaaataaccccccctcgccgtggcccccatccccaacaaactaccaaaaacgaaaaaaaacgtaacaaatccgcacagccacacgccacgccacgccacggccaccgccgccgcgcgacgcgacgcgaacccggagaaaacgggggcgaaggaatccgccaccgcaatggaggccgcggcctccccgtcgccgcccccttccagggcgtcgccgctgcggctcaacccggccgcgttcctcctccgcaccaccaccaccaccaccaccgtccagccgaccacatctgccgacgcgcccccgcccccgccgccgacgcggcagacggccggggtcgaccggctcatctcgttcctctcctccctaatcccccgccgcgggcagcgggcgaagcagccgaccagcccccctcccaccgcggcggcggcggcggcgatgcggagggcggcggagagggaggcagaggcggagcggcagctggtgggtgcgcggtgccgctgttccggccgtacgtggcgcagctgccgtggcacggcggcgcgcgggcgtggctgtcgcggatgttcccgcggtacgggcactactgcggccccaactggtcgagcgggaaggaggccgggtccgtgctctgggaccgccgccccgccgaccacctcgacttctgctgctactgccacgacatggcctacgacacccacgaccaggcccagctcctccgcgccgacctcgccttcctccgctgcctccagagcagtcgccagacccccgcccgcgacggcatcgccgccgccgccatctaccgctccatgtgcatcttcggtcagtcaccaatccaatccaccccttcttgtttttcttccccatttctctgttgttcttcgcccaaatcatgcgaagaatgcatcgcattgcgtttacgaatgtgagatggatcgatggatgattgtgcagggctcaagacgatactgataccgtaccgtacgaacctggtgcggctgcaaaccgggccgaattacgccgacgccttcgccgatttcgtcaagagggtcgcctcgtcgtcggggaggccgaccggtggcaacaagcagagaatgtgagagcatttgtgatcacaatggcgcaggatgaatccaactaattggaattggatattcagccattcaggtcgtcgtagtagttgtgtatagctcaagttttgattcgaacccggcgaggcggcgtcgcggcgaggggattgtttgtatcctgttctaatgggtattagttgatgagaatcttgggatcttcactgtgaatatagcttagcacatgatttattatatcaaaatgtagcctcccttgatatcaaaattcagaatcaatggatgcaagtttctatttctgaaccaaaatggatgcaagttctatttctgaaccaaaatggatgcaagtatgcaacagcaaagatggtggtatgttaaggatttagcctaaattagagagcatataggcataggaatgttgtactagtatctgccaaggaaagacatccaggcatccagcattccggaagatctaactaactttagagaattagagttttgtcccgatgggcttcagaaatttacatcatttcagtttcagtcctacatatgacatcctgaatcatcgtaagttcgtaactaagaaggctttcagcgatgtataaatatgcttgctgctatgcgaagaacgcatgttggttacagaacaaaggctatgttaaagctcttcgtatttcatttgatcgaagcattgttccgatgggcttcataactcagcccaatttccagggatcgctaatctatcagactatacatgaagacatttcgtactagtaagggtatatataaatggcatgcacttattcatacagtttgcacgtatgagttaggatctaatttctcacataagcatgtggaaacaatctggggaagtaagtttgctttgccttgacaatcgaccaatacagaaagaagcaagggatatgaacaatggccatggcgaggtacctgcagaaaaattaatggtgttgtcaggacagcaaagttccatggatggtatggatgaacagatgagaaaacataccatagaggagcccctgacgatgaaaggtcaagaaatgggtatggccacctgaagaatatggaaacatgattacaacgtttagaggtaaactcaaaaaacattttcttgtggcgtgcaacaacacacgagcggcactaaatcttaatacaaagatacgcaagtaagtattccccaaaaaaacaacacatgagccgttgtttcaaactcgcactcaatatgcacatatcagtatgctagaatagaaatataagggttctttttgttatgactcaactttaccaattagagcacaacagctttcatctctttaataaaaattacccctaaacttgatcagaaggtggttcatatatgtacaaaatgtcccaagagatgcaataaatttcgctgagaagtaggcagggtcggtgcagtctatagatatcctgggttaattgccacatggtcacatgttcagaatgcacatgtccatactccatatctcttggataaactatgtcatatgggcatgctcatgtacagctcattgcagcattctataaaaacctctccactttttgttgtattttttgtaaacgaatattatagtgtgagttcccccttttcttaaagtaaagtatcaaataggatttgaatacataaatgacgctctaacttttgtatttttcttagtgtatacttaataaaatggcacaatgaaggggaccaagacattccattacattgctttagtgtaaacggcaggggagaacctaccaggatatagctccacaagcatgaaggacccattggaaggttacataggagcagctccaaaatacaaagaaagccaggcggtaccaggggaagggctgaaaagagtgaaagcaaccaggtgtaaaataatcacaccaaggtaaaagaaagaacagagtgattttgtcttaccatattgttgagaaatgtgtctatcagtaaaagaacagcattaagagaatgcatgccatcagtgatctgcatgaaattttaaagaacaagatcagccaaaaataagattacatcaccaattctttatttgaccagctacaaacacctgtgctgtttattactgttagattgcctatgcttactactactatcatcttaaatgtttagcacatactagatttggatttacactatgattcttacagctcagtataacaagtaattgtttatatgccactagaatataataggggagaaaagccaaggtaggagttatttcttttattgaatagaattgatttgccaacgataggcatttggttggggggatgaacagctgaggctatacacatcctgaaatttttacataccaaggaaagtccaaacttatcacggtaaaagaatggcacaagtagtccccaaaatgtgatatcagtcagcattgttgcacctgcactagtctgtaaaatagattacaattagttggcgatagaatcacacaatttgatagcaggcatgaactcagtatccgtggtacaggtgaggagattatttttttactaggccaaagaaattgatgctagtttgtgttgagtgctaaataacatggagaacataaaatgtagctatggtagtagtttgagttgcatagccccaagcaatcagctgatgaacttgctctaacttagcacatgcactgaatatcaatatgacgtagtaagaaaacataagtgttagtattgtatctatattccttaaagcagtatcatttggatttagatttgacagtattgagtatcgtaaataaagcacatagcatgtccataattacaattctagaatgacaggtgagttcaaacctggtaaatgatttgcatgcaacgtccccataatccagctcttttctcatttgctatttgttcatgatagtttgttatcttctcctcatcccttttcatctcgccagaagaagtggaaaactcacgattttccacatcgtcactaagaaattcatgggattcatcagctttcttcaagtttttctttgagtaaacccaacatccgtgagctgatatagcagttgcaaactaagaataacacactcaattagtgaaggcatcaaatgataggcaagctagaaaagaaagaaacgataaaatagcacatatgcagattcaaaaagataaaaggtggacagacaacttgggaacaaagaacataccgcaaaatatatggtgactaataaaaaggtccacctgcaaagataattcaggagagaattaattaaagtcaaaagagcagttaggttcatctaaggaaaagggaggaaataataaaatcaagagtcaagactgcaaacaactacaagggggctgatcagctgcatgccttctaaagcaacaactaccagaatatttaaaacatttgccagatccatctatctgacacggggcaattagttcagtgtggccaaactaaaagcagaaagctccaaatctacatagcagtacagagatactgtaaacagccaaaagtcaatggatcaatgtgtggatcacttcgaatgctactatccagctatgtcaaatcactccgaacaattctcgctggtaaacgctaatttctacaccacattatagaacagctagacgctcgcgtatgcttgtatggacgatgtgtacgatgtttgtcttagattattcgaggcaatcaagcttgctcagatagtggaggaggaggacggaggaggccgtactgggtgtagaagaagaagacgtcgatgccatggccgacgaggaggcggacgaggagggcgacggcggcggcgagggcgaaggcgcggtagccgaggagccagccggggtggagacgcgcccagcaggggacccacaggtcggtcccgcggaggggcgcggccgccctgcgcagccgcgggagcagcgccgccgcggcggccgtcggcagcacgatgagggcgccgcagacgaacacctgccaccgcagccagtacgccgcctcgccgtcctccgccgccgccgacgacgacatcacccccccggcgacgcgcggttgacctttgcttgagcctcgcgtcgcgtagcggcaatggaggtgcggcgcgggggaattttggggtagttggggttgggttgttgacggtgtgcgacgctgcgactgcgagtccgaccgcgactcggcgagcgaggcggtgaagttgcggaagtagacgcggagacggagattggagggaaaggttagcattcggccacggattggctcgctttccgggcccgggtgcggttggaacgcgttaaaacggcaccgagccgtggtcgttttctcctcactcgctgctcccctgctctgcttcagttgcttcgcgcgctacgccgatggatcgggattgatcgggtggggcgtttgagtttggtggtgtgacttggggctagataactttgctaccattttttttcgataaagttacttaaaaaagtagttatatttagtttgttgctaaattttagtaagtatatatgaaatcttgccaaaattttgacaaacttatcaaaatttgacaatgacaaaacttgataaggttgaaaatggtagcaaagtgaacgagcccttgatttacgtagaaatttcataaaattcaaatcttactaaaaattttttctttaaccatttgatataaaatattggagcttttcaaatcatatgaaataactcattgcatctagattttagaggaaacttcgcaagattttcttcctacaattttcttcatgtctttctatttcattcgatttctatgtttttcccttcaggccaattaaacgatcatttttgtgttttgtcctccatttttcaattcctttgtcctgtttttctttctccgttttttcattccatcggccttgtctcgtctatgaaacttatcatgccaagcttaaccagcgtttttttggcaatttcatgctgttggtttgaagagcaaatcaggcgccaatttctattgggagaattcaaacagcaaatcaggcgccaatttctattgggagaattcaaatctaaaggtatgtttggtagagctccaactcctagatttaactctatgagttgagtctagagtggagttgtggagctgcccaaacccagctccacctctctagttcattttgtaagagagctccactcccgctttaggtggagctgaaactgtttggctgagctctagctccaaaaaagatggagctgtaccaaacagaccataactttgatgcaagtttagagtagtctcaagtctaaacaaatgactggatgaacttgcgtagatttgctgttcatctggattgagcttatgtgttctgctccaatttggagatcaccataatcaaccatgcaatgctaatccagtagatcgatgataaatacgataacatcaaggcatcgactatcgagaagctcgagggtttgtaatattgataacttacagtctcgcccatagctttcatgaacaaggtggtggattgctcagagagaagcacaatgacatctcacgtttggaaaatattccatttggtcttattactgcttacagagttggacgcataacttctcatttaccatagtcagagagcatgcacagacatacatggaggaaaaatgtggcagcagctgatatacaggcatacagccatgccatcccagcaaaacagaaataacttctgggagctagacaacgaattccatcggtagcccagcccattttaatgacagcttataacaatgtatcttctgcatcttaattaggtcaaatgatttttttttccctgggatcagtttgctgtgtcaattgtcaacattaaagaaaaccagaatgcttgtgtctcattatgcccattatcggtaaaggctggaatatatgagtatagagctcaaaaggaccttccgaaaatatcagtccaactgcaaatacagaacgccatgaccagaaaaaaaacaagagcaggtacctgccaaaaaaaagtaattttatacttactgaagagaagatgataaaaaggatacatcttcccataaaatagaaaaatatacccctattccttaatattggctcagtttaatttccatctctcaactacaaaaccgaatgaaaaacatccattaactctcatgttaagagtgaggctacaagttgaacatacaacaaacagtaggcctacatgacgaacggtgacaactataccaatagttaatcttagatgaccaaccatgactcactaggacacaagcagacacattgtctgcgggtccaaaccacctaaaacagggtaggttggaggaacaggttttaccaggttttgagaatagaggggcagattttacttgattttgtaaatgccagacaaaaactaagccgagtcaagaatcgaacgccaggaatagatattttcattaagaaaaaagaggcccaagaaaaagcagaacttacctgttaccgtttgacccattggaagctctttcttgcttttgcctttccaggctttttcctttcaacaacccgtgagtctcttgtcaaatatccagctgtttggtttaagtatgaagacataattagaagtgttggaagataatatagaaatgagaaagaatagcaaggcaacaagacaacaacattcgctgaaatagaagtcattttggatggttgctcatagggaaaataatgctcaaacaatctcaatgttcaaatgtgaactgccaatcatcatctagaggagtaagagtcatctcctttacctgctttgagatttgggcgtagtcctggttcccaattctgcaaggccctgctgatccctagccggatagctccaacttgtcctgcacttgcaaaaaagaaattcaatcagggagaatgtttttgtagcctatctaaaaatcaactagtagaaacgtgcagcgtctaatagcaaatgtgtatgagttagaaaattacactgaataaaacatattaactaaagactcaatgaatccaggcactggcattgaggtatgatactaaagctggaatccgtggagcattgaaagataaagcgtgcaaaattatgcgtgaatgaatgcctcatgtgaacgtgaaatatgacatatattccatatctcataatttacaatacagaacccaagaatttatatgtgcatagttaatgcaaaacactttcgtatagaaccagaagcaatttatcatgtctatctccagaaaattatttatcatgtcaaaagaaataaatactaacctgagacaccaccacctttcacagtacaagtaacatcccaacgccccaaagttttggtcacggtaaatgggcgaagaagatcagcccgatgatccagaattgggaagtaagaatcaaattgtttgtcattgacaatgaacttcccatcaccaggctgaatccaaacacgggcaatgctgcatttccttttccctgttccataagcccttcctttctcatcgacttgtcttacacgtgctttagcaatttcctcttgcttttggcgttctacatcagctctgcttgatgttgcattcattttttcgatagtttcatcttctatttctcttaggggaggtaatccaggaacacccctaacatcctttaagaggatcaaactagcaatcatatcctctgtaatcccagaggcctcaatgagatcaccaaatgcacgatttggacctgcaaccacaaaaaaactactttacgacatgctacaaacatatgtatgcactatggattattcctgcataagatcctacttaatagcagaaagaaaaactttgtatattattagaatcaactagggcataataaataattaaatcagtcatgaggttgcagaagcacgcagaacaaaaatcacaatgatcatgagtgaaattatctacccgattcaatgataccttattgcaattgatggtaaatgacatgaatgagtggcatcacatgaaacaaatgctggtggtgagtggagaccaacaggcacattccaacttctgcattgaagcaaattgctcctaaaacacctaccggatatttgtgatacctcaaaataattagctactgatcaagtatacaaacctggcaagctcgtcctgatacagcattgtaagtaaacaacatctaacacttacttggaataccatttcagagatttattatgtctgcgggtatgatcctatagctccaaactacgccaattcaatcagttgcataatactaattatacacacataacagcaaccgtactatgacaaattatgttactgcataaagatagatttacctttgagtgtctccattagttcttgctccctcgcccttctctctagccgttttcgctcttcctcctcctcgtcttcccccgcatcggcctcatcaatcgcagcgccatcacctccgatcccctcaagcccacccccgagcacggcctccgcgaaaggatccttctcatcctccccactcagcgtccacagctcgtcggcgcctgcccccggagccttctctccagaagcgacggcggcggtggcagcctcttccttgaagatctcctcgaacacgtcccccttctcgctgccctccgcgcggaaatccttcgcccacgggtcctcgccggcggcgctcaatcctagtggatcctcgccggcgggagcttcgacgccctcaccggcggcgaagggatccggatcgccggattccggcgtgaacgcccatggcttgttggggtcgtcgtcgcggccggacgtggagaggagccgcggccagaggaggctggaggcggggaggggacgacgaaatggaaggggagcggagacgggagaggacgaggcagcggcggcggtggctgcgctcgccggagttagggtttggaggcggtggccgaggcggcgggaggagtggaggaggcggcggagcagcatggtggcggccggaggagggaggcgaccactccgtggaatgctagggttttagcggcttaactcgtctcggtttcctctttccgcttcctccgctaattttacgtgttgcgaacgggaaagcgtattaaccagttgcttggtttcagctggagaggcgtatttcttaaaattccgtatcctagcttcgaacacgtattttgtacaatcagcttggattttgtactaatctcgacttctcgagtacgaagatctgtgtactggtatatggccgtgcgatccaaatccacgcgatacactggcttagttaattactgatctcaccgtagaaaatgcagtgagtaagacagtaagtatatattgcaaatctaaggtcaagtccgtcctgttctacccgattaatggcttgcattgatgactttaactaaccatttcgccgtcactaaagcccttacccgtactacgagtgtactacaaatatcataaattgaagattcagcaaaccaaactcggcagctttgatgtcagtatacttgtgtgtattattgtctttaaaacatggtcttaacgtgcattttgcaatggaagaggtgtaaataagatgtgagcagggttcatgttaggacagaaacgggtaaaaaagaaacgctatgcacacgtgtattgtgggcgcatgaatttgtactgtacacaaagtaagatgttctaacgtgtttgtgaaatttgaaaacatatttttagtcaaagctcaaatggttttcaagaaattgaaatttaaaacggtaaattcgagcaaaatctcgtgaaaagatgcgactatgtgagttactacaaagttgtcacacgaattttacacctgcatgaaagtagcacgaatactagctttactgatgaagagaggtaagtacaagtagtaagcatataaggaagtttacagttaacccaggtttgattggcttttacctcatgctgcggcaagatcttggtgtcactctctcacactgacatcgagaaaaatgtctgaaagctttggttccttacggatttttctgcaaaggctcgcgtcgctgctacctgaataggctgaaaagcgacaagattgaggcatccagaccatcggcatgtgaatgtactgcctcccctgctcaattgcaaaaggctaaaagcctagaaagcgatcctttttacacccaaaaaaaaattccatacacgagaagaggtggtgttgtagtaagtacagtatactagtagaacattttagcgtagttcaacgcgatgatgtgaagaatgattgcagcatatgaactgccactcatttgcgatcatattgtagatgaccaaactacagtgagaacaacttatttgcaatcatatataaattgacaagtttacaagttacctttcatcaaacaaagattctctactttgtatgtatctctttggctctttggcctttacaagcatattttaacttcaaatttcaggagaaattgaattgttttctacgatacacgcctaaagtttcagatacagattttatcctgatatgcttaaaaattcagaacaggaaagaatattcatagcagattcttcaccagcctgtcagatagtagaaatccccaaacaaaattaaccccccaattagttgtacaccagccaaaaactaaagctctcctccaaacagtggtccagcacaagcaaaatttgggccaaacctgaaaggacccctcctccaacccgacactgtagcaggtacatgatgagaaaaacaaacaaaaacaatgagagagagagagaaaagcaaattaaaattgcaaacaagaacaggtagccagcttgccaacaccactaagaaaacagtaacagcaatccttttcatctaattggtcccaaagcttttaagattttttttactgtaatcacgcacctaatcttcctcatggagtcataccttctctctctgcctgaacctctcgcctagcaacacgcaaacaagtcttgggaaacgtatttgccacactttacacttcatgctgctgtgtttagctaccaaatttaatgacccatattgatctgtctcatgtgcggctgcagtgcgatttcgcctaacttattcccaagttggctaaccccactgtcacaccatgaacagacttggttagttatttttttttctctccacagcaaagttgacaaatactagcgtaaaaccaccaaggctgtgtttagttccacgctaaaaatcgaaatttgactaaaattaaaagtttgaagaaaaaaaggttaaaagtttatgtgtgtactaaagtttttgatgtgatgaaaaagttagaagtttgaagaaaaagttgtgaactataccagacccaaatccccttttaaattcacacataatttacaccgattcacacatactaatgcgtgtagttttgcaactgagttgttttaaccctaggtaaaccctccgttacaaaatataacaaagttatgtatttgataggttaatatatataactaaaagttaatagtatattttaggatggatatattgtattttccctatttctacttatgtactccctccatcccaaaatgtttgacgctgttgactttttaaaaaatgtttgaccgttcgtcttattcaaaaaattaagtaatttttaattcttttttctattatttaatttattgttaaatatatttttacatatacatatagttttacacatttcataaaattttttgaataagacgatatttgaaaagtcaacggcgtcaaatatatttagagaatgagaaagtaagtaagtaaaaaaaaatcgtcctcttctccttccctccctcgtctatcccacctacaccatcctaaagagtactctttaaagaagggtttatctacaaaacggatcgaaaagttgatcgtattttccatatcaaattaaaccacgttcgttcgatcccgtcgtaacgcgtgagcatgtaactagtttttttttttttgaaacatggaaatgtcgttttcgttttccatcgcccgatgacaaaatctggacaggttaacatttccaaaacaaacaaggggacgagattttaaggcaaatccagagacaaaaaattggttaattaagcccagagccgggagggacagctcagcgctgtagcgtcgttgcgcctgagaagaatccgagaagctttcgttgcaagctccatcccaaggagtccttgatctcatatggctccaaactctccaactctgtagcgcgtaattgccagagctannctactattacagcaagagagagaggaggaggaggaagaagatgcagtgggtgtgagctgcggcttgcgggcgagggagtaatctcgctgtcgctttcgctgggcgacgangttgnngaggagagacacgaccattcgtccggcccccaacgcgcccacngcccaccaccaccaccacctccatgactgcatcctcctccaaaaacccaaggcacaaatcctaaccaccggacgcgagccgacgcgacgcgacgcgagtccccatccacatcgctcgcggcccttccaccgcacgccagatcggtggcggcggcggctgctcggggttggatccaatgcgagcggtgattgatagctgttgatgcgaaggacgacgatctgaggtggtggtggagttggggggatggctgcggcgacggcgccggtggcgggtgcggcggagcggcagcagcaacagcagcagcagcagcgcggcggggcggcgtcggcgagcggcaacgcggtgagttttggggtggtcccttcgccttctgctctccgattcctcgcttgcgcttggtgcctctcttcggtggtgtgctgtggctgtgtctgtctgctggattttcgttccggtttggtatctgatgctgcgttgccgccgagtttctcgccggagtggtgctttgctttggcgtgtggatggatgggtgttccactgttttggtggtggtggaatttttggttgagctgcaaggccagatggcgcggataagccaatgcagtttggttcggtggagttggtggtgtgatgaatgggtttcgtttgagaaaatcaccgtactaagcgaggagtgaggttgcagtagttgctaatgttcctgttttatttgggtttggattggatttggtggtcttagtattggaggtgttatccagatgttttagtctgagagtgaccagcggattgcatggtggatgatacttggcttggattagagttgtttaccacaggaatgcgaatcgaaatgtttgagagagtatcaatttgtcatggcgtaaggatggagggattctacagtgtcatctgcacgctgaaactggacattggatgtgtgagatgctttgcaggctgactggtgttggatcgttgtggtgccctgtgaatgatgggcttcagatatgaggtgcagggagagtgggaatccagatgagggaagtgaggaatttactggagtttttccccgttgaattcatctgtccttttacgttcatagatgaacagtctgtatattcagtggttatttggagaggcgtggtttgatttgttcactcttgctggatctctgatacataggtcccgaattgcatgtctgctagcccgagtacaagacttctgaatgttctcgttaaaacagaactttcgattgggacctgatgttgcatttttttgctattacatatttaccattataatcacagtatttctgacattgtaattctctctaactaggtatttaagagtggccctctcttcatatcatccaaaggtaaactatttgggttatgcatcagttatttccacctgtgcatatcagagcatcaccattaattttcagctatgatttttaaggaattggatggaaatcatggaaaaagcgttggttcatcctcactcgaacatcacttgttttcttcaagagcgaccctgtaagtattttattctggtccacaacctaagtaattgctatattgaaaatctcaagttatgtagacccatcagtccagaaatagtactttggtttggcttgttgatatgacggttcacacctatctagtatctacatagcactttcatcgtctctcttgatcatggccaatatgtagtagtgtgatatacatttgttttatgttgatttcatgacaatgcatgtgtagatcacaattaaacatgagtacagtatttttagagtttggcactgaatggcagaatgactaatttgctcttttcagtccaccaaatatatgagtagcatcattatattttgtagcttccttgttctggtggttacatgtgttcctttgcttcaaatatccaactggcagtgcttgatccttggtaactgcttattcatgttcttgtccatgttacacgagagtccaggtaggtgtttagtgtatccactattttagtcattgcatggtcatcagaattggcattccgggccacaggttgctgattattatttagtctagaactgaagggaagagggaggaggggaggggagaaggaaatctaaccttcataccaaatgctgctgtatgccaaagcagcagcagttgctcatggccatattagagggaggaaggaaaattctgttggggatgttggactgatagagatgcgaaatgtgatcgttggggcgctgggacgccttgtgtagcccactcagcccaccttttttattctcctttatcttttttctccaactagggccaatgggatcactcagtgcatttgaaaaacaccacctccccatcaactcacatttctagtaatctgcaaccccatcccttggcccagattcctggtgactacagtcattgccatatatttcgtttcatttattgtccagcttatgagctacaccaatagaatttgtttcttacttcttgacaagtacctttcatgccattgtagaataccttgccccagagaggtggtgaagtgaatgttactttggggggaattgacttgaacaattctgggaggtttgtatctttcattattatttatttatttgcagttttattcaaagtttactttattagatttttatcaaatttgctgcatacttcttagacaaatgatttagggcactgcttcctttttggtttaactgcataataatgttaaactaacaatttatctcattcacagtgtagtggtcagggaagacaagaaattgttaactgtcctttttccagatggtcgtgacggccgtgcttttaccttgaaggtatacaatttccctttaactttaacagcttgaccccttagaaaatacaagatgttgaattataagtgttgtgttttttaagtcttttaaatgcccttcaaagttcactagaagtgcctgctattcccaatacaggcagagacatcggaagatttgtttgagtggaaaacagcattggaagaagctcttgcacaggccccaaatgcagctcttgtgatgggacataatgggatatttcgtaatgacacaacagatccatatgaaggagctgttccaaactgttggttcct

SEQ ID NO: 19219 - DNA, 675 bp, Oryza sativa
tgaacaaatgcaattgcttaacatgacattgtgtagaaaaaaatgtcatgttcctgaaaatataaatatacacaccagtatgcatgctccatgcatcagtatgatttgttaatgcagccaatgtgatccgcaaaagaaagctagtagccactgtaatgcagaaattgtcaggggctggccattccagttggctgctcatctccttgtttggggccgtgctttgcaaaaaaacctggtgttttgtttttgttaaattgtttgtctccttgtggttctgtgcaaaaaataaaaatctaaacctggtcgggtggttatgtttttggtaagtacatggaattttatgatatttattcaatattttacttaatcagaagtagtagatcccacatgtgttcagcttttgattgacacgtaattttacttatccaggaatttgccaatcttcgtggtaagagctcgaaagccaagggaggtcctcgtcaagcaattgataatgaaagcaatggtggagctcgttcattaagaggccggcaaaaagacacaaaaataaaagaagataataattcaattaaagatgactttaagaaacgcaaggtggtggaacctgaagcaagggaagaaggtgaaatttcagaatctgaagcagagactaatatcgtcaggacaagggagaaa

SEQ ID NO: 19220 - DNA, 754 bp, Oryza sativa
cctgcagccggttattaaatacccacgaatttaatttatatttgtaaagttacacaaatatttttcaacacaaataccaggtacaaatgtacaatcagcacatagacttgctatctcaagcacaaacatacttaggttccacaaggagaaaagaacaaaagagatgattgtttaggagaacagtaggggagttcccaattgaaggaaaagaaagaacagatgttcaagatcgatggaacaaagtctgagggattcttactgctggtgtctcaagaccgtttcattgtccatagcaacagatgactggaagttgacaggctttattgaacgtgtactttgctgcaaccaggatccataggggttcgctgaagccacacttttcttcacttctgtgttttcaagcacctaagatgattcatgaggtttagcacatatatttgaattgtctggaatactcaaagcaagaaaggaaaatggttatttcatttctattctaacctggccagtttgtaggtcaaccgttatcatcattccaggacccaatcttcctttcattactacctttgactcatccattggtataacaccaacctgtagattgtcataaaaaaaaaagctagtgatcagtaagaaccatacaatatagaactttggggactcccacagggcatttaagaaagtgatccaaagtaactccatcaagtgttgcagtatggtggcacaaggttaatattttattgtcatgattttaaat

SEQ ID NO: 19221 - DNA, 1373 bp, Oryza sativa
tccattttcacttgtgaagcagatgtcattgtgagttttataaaataattgtccctttgaagggatgaaaattttagcacacaagaaactgaaaatgcatttgttataggttatagttgtagatacaaataaatgatatttactttctaaaatttcatgcaagggataatagtgagtcagaaaagggtcaaggtgtcatgggatatgaagtatggcagcatgaaaactcccaaataaaacataccgaaacaggtggcaacaagatatgcattgcgaacataaatgttatgatccatacgaacacaggaaatattgcactttgaaagcaagaaatgctcggtaatgtgggcagaaaattgaggtaagcataagaaacactctaccagctttggcttcttccatagaattctcgtcttgtggaagaaagaccattccgacacctgtatttgttctgtccaggggagcaagcccttgcttgttggcccagtcattgaacaagtcccatgggataccactcatcagtcctgaaccgtcaccggagtcattgtccgctccacacccaccacggtgctccatgcagccaagagccacaagggcatcccggacaatattgaatgaaggctcatttttcaagtttgcgacaaatccaacaccacaagcaccacgttctgataagatttcattcaaatctgcagcctgataaatagaaaggaaatactgatatcaacaagagcaaaacacactgcttgatttacagcatcataattgcgactcagaatacaatcttgcattcaagacattccagaagagccatggaaagtacattacagcctttttcaccaatgcattacacaatgtggtactcctggaattcgatcgcgatcagtacctaccaccacagctgtcatgtatccgttccttaccaaataattgtttatcgcacctgcatttgttgtagtttgttcacttactaccctactgttttaaaaaaatccacaaaaggaacagcgcaacagcgacaacttgcagtgaacaaggatcaactagagattaaaaaaagcttgcacatgcaagtagcttttgcatcaggacaaaagcctatccaataacagtgatcaggaggcgttaaataatctgaatcatcagttccatgaaccacctctaccgcagcttactctgatttccaatgtattcggggcgaccgcaaatccactagaagcatgtatagagagaaaaataaaccaaaatggcctcaaaactagggatgaatccatgaaaacacgtatgggctcatagcttcataaaccaatctaatcagtaatcaccacaaccaaacatgcaaaaccccaaaacaccgacccattcaagcgcca

SEQ ID NO: 19222 - DNA, 2846 bp, Oryza sativa
gatatttgtggctcaagttcagctgttcaagtcaacgttggttatctctgtacgggattaaagaaaaaatgaacgagaagaaatctgcctcaccttgccctctgaatattctgtcctgtcaggctgttcggtgcacttaataattcatggaaaaagtccggagatattgtcttagcttgagatgaaagatggagtacgtcagaatgaagttatgactgaatatcacagaaaaaatatgcgtcagaacaaatcattatctggattgttcatgcccggcaacaatattgtttgttgccactggcaactagctccaatagtaggtgacaaagagcttttctggaagagttctagttgacaaaaccaagtcatttgattcaaccattctcaagcatcagtactattttttattttaccaattcatgtcaggactattatgcaagagaagatagtgtttccacatataatccaaatattaaaagcattagctaaaattacctttttctgaatgtgcttatgtttgattgctgataaaatatctttttctaaatgtgcttttgtttgattgccgatcccacttgtctttgaaatcatgaagagtaggtgcacaactttcatcatctcttctgtgtttttctagtgaaattgtttccgttgccagtggagcacccaaaatggcagaactggtagtactaatctacagggacaaacattgccatgatggtctttcagcttcgtgctctctgaacgaacggaaagggagatcttcagagttgaaacacttgctgtgctgtctagtacaagtacagtttctgccaatcaagctgatgtagttgtaggatacaattgaaaacaatgtcgccactaatcactattaagtagtactcctaacttgtgtcctcttcaaaaaagaaaaagaaggctctcataacttatggagctccatgagtgcgacaactttgtccacggttcggatggagtcatggggagatgagtttacctgaagaaacaaaacatgtgcgaattggagtaagctgaagtgtaaagcagttgccggtgcaggcaccaaaactgaatactagctctgaatagctcgatccctgtgtgtccttcagctgacagtgaatgctacatgagaaagttggtagcacagagtgattgattcagactgtctgctggcccatcagaggtgctaataacagcgtatccgctttctagcatgcactgaagctgaagcctgaatgctccgttgcaaagctcaagtttatgggctgctcactttcactgctcagttagcttggctgtagtgttagctgcaccatgaatccatgattggtaatagtaacttggaaggtaccatgcacatatcgtggctatctaaaactctgaatttgattgcattgtacgctaaaaaacacttaattttcagattagttgatgtattaaatttccgtttagaaattcaattaatatacagatccaaatgataatacatgaaaatagttctagaagtagctgaataaaattcggcccatttactagactcctagattcggccttgtttggatgggctcgagatgaatcctgggctaaccaccatggatgggtcggaatagaggagggaaaagtacacgcaaggtccctcaacttgtcatcgagatacaaaatcgtccctaaaccgcaaaaccggacatccggcatcccccaacttacaaaaccggtcataaaaagtccctcggcggttttcacccggttttgtcccacgtggcggctgactcagcgtgggacccacgtgggccccacatgtcatggagaccacgtcagcctcctctctctcttctctttcccttcctctcccttcctcatctctctctctcacttatctgcaaagctagccggggcgagcaggagaggaggagggcggcgccacgacggcggcggcggcggccgtagtggggaagcacggcggaggcgcggggagcccggaaccctgccgacgacggcgagcccgtagcccttgagcccgacgaactttgctacctgggcgccgatgccgtactcgcgggagtcgacagcgaggccgagctcgacgttggcctggacggtgtcgtggccgtcgtccaggaggttgtaggcgcggtggccgtgcgaccaggggagcaaggtgtcggcggcgacgacgcgggagcaggggagcaaggcggcggcgacgggcgcggccttgacctcgccacggtgcgcaatctcaacggcgtccgcgtggccgacgagatcctgcggcttgtcccggacgccgccgcgttccacaccacgctgcggtgcgtgaaggaatcgacaagctgctcagaggattcgacggcgccgcgccgtcgcatcatccgtcgtcgtcttgcagccagcaaggagccgcggctgcagcggcagcaggagcaggaggccatctccgccgcggccacctcgacgccgaggatctccgggcggcgcggccgacggggaaggagcggcggagaggatatcgaccggccggctccccacccggcgaacgcgagcgcgagcgtgaggttcgtgctgggcggtgacgcggcggcggagacatgggacagcaagctcggcggcggcaggcgagcgcggctgcggatggggagcggtggcgccgacgactccgcaccgctcggcctcatcgctgtcggcggctccgggcgcgggcggaggtctcctctgataggcgatagtggccacggtcaccgtgccactgtacgcggcgggggcgtcgcaccgcctgcttctcgtcgctcgtccgccatcaccgaccgcacgaggggacgaggaggccggcgagctcgcgccgc

SEQ ID NO: 19223 - DNA, 7954 bp, Oryza sativa
gacctgtggggcccacgtgggtcccacgctgagccagccgccacgtgggacaaaactggagtcaaaaccgcctagggaccttttgtaaccggttttgtaagttgggggacgccggatgtccggttttgcggttcgaggacgattttgtatctcgctgacaagttgagggaccttgcgtgtacttttcccaatagaggaccatccaaatgaggcctttgtcgtgttggcagagaagcccatgcctacgccttgctgcggcctcacgggtaagcggtagaactcgacctgtctagtgttctgctttggatgccattgccatgtgagcatgtaatgtgattatgtgagtgactccgtttgaagatgaagattacggatagaaaaacattaacgtattattaattattaattgaactttatttctttaacttggaaaaaaaagacttatctaatatttttaagtaatttttatatgaagatactaaatacgctgtttaacagattgaaaaacgtattaattaacgaaaatcgtggtaaatttgtatcttaacaagaagagccacatgtgagacggtacggtgcagccacccctctccaaaatacaatggaccatagcaagcaaagcaagcacaggcacgcaggagaaccgactagacgctagaaacatgagacaggacgggcactggcctcaatagtccaatagcatacctggcgatgccgcgatgctcggaacaaccacaagaagacatcgcctgagccccaagcccaatagggtacacggtgaagctgacgaactggtttaataattctaaccttctgactcacatagcctttcacagtttcactcgtgactggccttgcgtgcagtccttcacaccttcaccgacatgcatgcattgatgcatcatacatactctaacttcagaagagatgcggagccgagattcaatcaaactacttcagcttcaccaaaaagtgaaacagagtggaataaagtgatacaaaataaacgaactacagataacctacttggaggagcttcaaatcctaagaaacacttgattggttggcagtttttgagaatctgaaaaaaaaaaacagagtatacaactataagaatctaaataaacaccgggctatttgaggagtttctaattcgaagagaagcaaacaggtccaaaagtatgatttgggtcactctaaacttcgttttaaaagttagatttaatagttagaatcctgccaaatatgaccagttaaccgggctcaaatcttttggcaggatatgcggcaatgccatggcctacctgcagtcggcgtttgtgtcaactgcatatgcggtgcggcgacgactgcatatgctcttgcttggacttgaaagtcatattcatattgcggttgcgggtctacttctgtctctaaacgcggctgttactgcgcgtcgccgttctcaatcacggcatctctctcccacgtacggcagagaatatcacgcgtacttacccaaaaccccaaactgcaacccactattttagctgatttttaaccgaccattatacggttcatgaaccagatccacaacctcacgtgtactcactcagtaaaaaaaaaacaatctagacaaggataatataaggttgtgtttagttcacacaaaaattaaaagtttggttgaaattgaaacgatgtgacggaaaagtcgaaaatttgtgtgtgcaggaaagtttttgatgtggtagaaaagttggaagttttgaagaattgttttgtaactaaacacggcgctagtacaataaatatgaagacgagcattctcagattcgttacagtaggctatatctcattcttacctagcttgtatttttatggagggcctacatctcatctgacagatagccttttagagcaggtacgttagtagactataagccaattataaacatattttgagaagatagatagggagagagacgagcagcgggctacagatttgtagccagctatagcataaattctaagatgcaatctatatatgataggtggcatcagataactattgtatgaattggccattaaaatgactacatataatttagagttagcagttggctatagcccatgagctgcatgccaggatttagttcacacatgccatatgggcacctccatgcaaagacatttttctcctctccttcagctgtccatgcaaaaattctcatcggatttcgagggattcgagtgacgacacgcgcgcaggggtacgtggtgctcgcccattggccggaccgccgcctccgatcacgagctcggtccccggccagcgtcgccatgcatggcgcagaggcagccgaggcccccgccgtcctctgcccgatacgtccaatggcgaggcctcacgggcgggccagggcgcggccgctcgccgtgtcgtttcccgccatggctcacgtgctcccccgctatatagctcgctcggccacctcgccgcaccaccgtgtcacccgccattgctggtctttgccttgctgtggtgagagagatcgatggcgctgagaatgagcatcgcggcgatgtcggtgttggcggtggcggcggtgctcgttgtggccggcacggcggcggcggcggcggcgtcgtgcccggcgacgccgccggacgcgggggcgacgctgcaggtgtcgcacgcgttcgggccgtgctcgccgctgggggcggagtcggcggcgccgtcgtgggcggggttcctggcggaccaggcggcgcgcgacgcgtcgaggctgctgtacctcgactcgctggcggtgaaggggcgcgcgtacgcgccgacgcgtcggggaggcagctgctgcagacgccgacgtacgtggtgcgcgcccgcctcggcacgcccgcgcagcagctgctcctcgccgtcgacaccagcaacgacgccgcctggatcccctgctccggctgcgcgggctgccccacctcgtcgccgttcaacccggccgcctccgcctcctaccgcccggtgccgtgcggctcgccgcagtgcgtgctggcgcccaacccgtcgtgctcccccaacgccaagtcctgcggcttcagcctctcctacgccgactcctcgctccaggccgcgctgtcgcaggacaccctcgccgtcgccggcgacgtcgtgaaggcctacaccttcggctgcttgcagagggccaccggcacggcggcgccgccgcagggcctcctcgggctcggccgtggcccgctctccttcctgtctcagaccaaggacatgtacggggccacgttctcctactgcctcccgagcttcaagtcgctcaacttctccggcacgctccggctcggccggaacgggcagccgcggcggatcaagacgacgccgctgctcgccaacccgcaccgctcgtcgctctactacgtcaacatgaccggcatccgcgtggggaaaaaggtggtgtcgatcccggcgtccgcgctggcgttcgacccggcgacgggcgccggcacggtgctcgactcggggacgatgttcacgcgcctggtggcgccggtgtacctggcgctccgcgacgaggtccgccgccgcgtcggcgccggcgccgccgccgtgtcctccctcggcgggttcgacacgtgctacaacaccacggtggcgtggccgccggtgacgctgctgttcgacggcatgcaggtgacgctgccggaggagaacgtggtgatccacaccacgtacggcaccaccagctgcctggccatggcggcggcgcccgacggcgtcaacacggtgctcaacgtcatcgccagcatgcagcagcagaaccaccgcgtcctcttcgacgtgcccaacggccgcgtcggcttcgcccgcgagagctgcaccgccgcctagtcgccgtcgccgtcgccgtcgccgccgccgccgtctcactttcgctgctgcttcaattctttgtagcttagtgagctagcttctcaggtgaagaatgtttcagtggtttatttagtctgggtttggttcgttgattagatcctgatgataagtgaagtgaaatgtgcacgtttgtgatgtttaattaggtgctggattaattcagctaatcccttgctttaatgtagtaacatgatgttttaagagaagttgggccgttgtttgaaaatacagaagttattgggccgtcattgcatgcccactatctgcaaatgggctttgaactcactggaggtatgtgtgtcatatcgagcccactatctgcagaaattcagatgaaaccctcagctggaccggcccatttccttcttattaggccgaaaaatagttcgtgccattccattctcttccacgtgttcttcacgtgaatgcgacgagtgaaatgaaagcacccgtgacgttgcattagccatcaggcaaagcatccagtaaacatccgtaccatgtgctcacgtccatcatctgtacgtgtgccacaattattgtccccctctactaatgaggaaggcgtattggccagcaatttctcctacatatggtggcgtttgtttccgatgaaaataaagaaagacagagcacacaaaataagaaagccactaataagttgttataaacttaaaaaataatttatttgatattttaaagcaatatttatataaaaagttttcatacgaaacataccgtttagcgtatcaaaaacgtgctctaatgaaaagttgagaaaaaaaacacacatattttgacaatttgaccctttaaaaaaaaactaattttacaaatgaactgcggccaaaacttagggctgttttggtttgatgacaaaatttgccctacaaaatagttggcactttagatagtaccttgttgatgtttggattgatgccaaaatttaccaaatataatacaactcctacaaaccaattctaccaaaatattgatttggcactaccaatgatttggtagggcaccaaaccaaatgagcccttatttcagaaatgatcattttgttcagcgccaaatcgtatggcgctgaatttagacacctcagcgtcacgtcaactggcgctgaatgccatgccactgcgaatggaaggctgagttggcatgccaacatgcattcagcgccgtgctatttggcgctgaggtgtttggcgctgaacaaaagggttatttttaaaataagttttagccatggttcatttgtaaaaattagtttttgtaaagaggcatattgttaaaatttgtgaaaaaaaacatatcttaattagaaaagaatatggccatatataatccaatgttccgttcgtatgcatgcttattgcactgcgatgaggaaggctatgtcagaagcaaactagagggactcttgtttagaaatattttgagaagcagtcactgagcatccaaccattgaaaatgtagagaagttcgaattttaacaaaaaaatctaaactatctgagacgctgaaaattaggaaaatacccacaactgctagaaaccaagggcggatccagcatagagacggaggggtcttaaccctcactactgacgtgaatactataagagcccctacgaaaatcgcactaaaatattttaccatgtgtagatgggagaggggctataacactatctaatttgctcagattcactgttatttttttctgatccgtcactactagaaactcccctcaactttcaagcacctctcgagccatgacatgaacaaacgtttgtactactactagtgaaaactcaaaagcaccaggggattcaactttcgctcaattgcgagccttgtgcctcctcggattttcgccccccccttgtcaaacctgcaatcatctttgcatctttgtagatgcaaaagcttccatcggcattgcccgaggcggcgttgcctgactttgctacagtgttgtactacctgcgttttcagtgttgctctcttctgaagccacgagcacattcagtttcactttgccatgcgaccccaaccaatgcagttcgtgatggtactgtaacttttttttttttttttttttttggctttgaggaccagcacagttttggcctcggggacgacgaaaaaagcagcagaagcagctgcagatgcatgcagtgccatgcactgctccggcttgacggcagagtcgagatgatgggtaccgagtcaaaaaagcaacaaccaaaaaaagtttcttgctattgctacttccgccattatattttaagagcaggtataatagcaggctataagctagctgtaaacatattttaaaaagataaatgaggagagagaagagcagcgggctacagatttatagtcagctatagcacggactccaagacaccgtgtgtctatgacagctgggaccatgtattaataatatagtatgtaactaatgtataaatgagctattaaattggctatagatgaattggagctagtagttggctatactattaaacttgctttaagtgtagccatgagtgtttggtattcaacgtttgatcatccgttttgtttaaaaattatttatgattaatatttttattgttacaggatgataaaatataaatagtattttatgcgtgatttatttcttaaattttttaaataaacgaacgatcaaacattgaacacaaaaatttataactgcatttaaatgggatggagggagttgtatatagtatacggtataattaactgtgaagctgcagcggccatacggaaggtataaaatgtcgctttttagcgatttcgtcgtacgtaggctagtctcccaaatctgggccagcattgttgtgacattgtgtgatctgaattccatttcacgcattgttcagtacgtcattagagacagagacatggatctaaccagatcattaataattatgcaatctgtttctccctttcagtttccaacagacaaaaaaaaaacccttataatcagagttgcaaaacattgcagctttgtgtggctatctgaaaaacggcagtcgcatcgcatgcatgtcacagctctcacgaagtcggcagagatgcgtacttgaggtctaattgcatgcaattggagagaaacgccagaagagatttttttctttttttgtttgtgcaagacaggatcatcatcaggatggcgtctcaatttcttcagaagttcacgacagcttccgttatctagggagtgttctggaccaccactaataaatggcgtttttgtttctctcttgcttggcctaatgacctgccttttggtagcaatcgttaggcacaaaaccttgagctgttctactgatgacaaatggagaggaacagcaaagacacagctaaatgatagctattgaaaatgttcactccttgttgattgttcttcttgaaaagaaaaaaaaaaaaggaacagccttgcactacgcagaggagaacttaaaataactatagatgagactagtctaagttaattccagttaactaaggcacaatgatattgtgatacacacagagtataaaattggctgtggagagaacatgcatgcaacacaatgatcatcgccgattcttgaagatatatctatacaaaatacgtgtacaatcatgtagcatgttcatggctcataaagaaattgggtgaagtctttagccttcagattagtttttttgccattgcagtctctactccttggatgccattttgtgtgatatcagactatcagtagctttctgatgctttctccttttggttttcgtataatagaatccttggtgtccaatcagcgttgccccagcgtataagagaaggttctgcactgatagttgccggccacaactgctcatcaacgcataaacaattcgggacacataactgtctgatcttttgagctctttgctcaatttttctatggaacttgtgttgccatgttggatagtagtagaataatataaaatggtatagtcatgttgggc

SEQ ID NO: 19224 - DNA, 977 bp, Oryza sativa
taattctgtattcggtgtcttaggaactgattgcatgtcaaatgaaaatgaaactcagaatggttccatgctgtcatcgacaccagccacaaatctgggcagatttcttttcattattagtcatatagcactgaatcatttggtttacattgagacttctgttaagaaaattcagaaacagaaacggaagaatgacaaatcagagcctactgccgaggatcttcaggcagatgcctccaaaaattcggaggtattttatttcttagtttgctttgtggcctaatcgattttgggttaccattctttcgtctgagtgtgtattgcacttctcttttactgtgtgatgctggcaggcacaaggtataaatgctgagttgggaattggtgcatctgtagatattgcaatagagtccctcgctgaaaaggcagaaagggagattgtgtccaattctgaaaagaatcttattggatactgtgcaccatttctcgcaaaactctgcaggaacctggctttgcttcaaaaggtcctaatttgtattgagcttcctttattttcttaatgttttgactctactactctctgttttttgttccttacttttttgttaatgcagtttccagggttacaggcctctgcaatgcttgctctttgcaagctaatgattattgatgcagaattctggtaagtatatatttatattccagctgtttcaccttttcaatatgatgtgctccagatatttatattccatcaaatgctcaactttcagtgaagcaaatcttcagatcctatttactgctgctgagagcgcgccttctgaagttgtccgatcaaactgcactatagctcttggtgatttagtggttcgctttccaaacctcttagaaccttggacagagcacatatatgcacgcttacgtgatccttcggcatctgtgaggaagaacactgtgcttgtcatttcacatcttatatt

SEQ ID NO: 19225 - DNA, 3400 bp, Oryza sativa
aatggtactatgcatataccttgcatctatattcgttcgagctttcccatctaaggctaatcaactaccattgcttctgtattcaagataccatgacataaataatattacttcctccgtttcatattataagattttctagcattgcccgtattcatatagatgttaatgaatctaaacatatatatgtgtctagattcattaatatctatacgaatgtagacaatgctagaaagtcttataacctgaaacggaggtagtaaatgagtggcaatgatatttacatggaaaatgtgagcacacatcagaaacggaatgttgtgatgcagcattcttgttctttgttgcaaccttgtagtggagtggcttttgcataagctagcaatatgggaagctagtgagccaatttgatttattttcactcctttcattttaatcctgtcttgagatttctgaattttcacatgcaatatttcaacatttatgaatgattgaattgttgtgatcccattttcagatccttgacctttctttttgttgtgtttcagatgttagacagtgggagtatatatcctattgcctttctcagctgactttcacagagaagggtttgaaaaaactagttgataatttcaagatatttgagcatgcattatctgaagattctgtaatgaaccacttcagaactgtgatagcaaaggttggtgctcagtagcctaggctgaatggatgcatatgttattatgttaaatacagcagggctgaatttgtgaactcttcaatgtttttttaatctatggtaattcctcctatcagtgcaagaagtttgccaagccagatctcaaagtttgcattgaggaatttgatgagaaactcagcaaggttcatcaggaaaagaaagagcaagaggccacgaccaggaatgccgaggcacacaaacaaagaattggttcacttgacaaactcatggtaactaagagaactgggaaggataagggaaaatctgctgaaggtacaattttttttctctgaatctccttatcatctatatcatttaagttaatctccacatgatcatccatcatgtattgactatgaactcaaacattagattagaataaggttacgctgtaaatctgtgtctataatctatacaccagaaaaattgatgcttaccttaaactgaggttcatttctttctgtctgtcagtggcagaggaaactagtgaggtagttgatccatcaacggagagcaattctgaagataaggagaacatgccagaatgcagtgacaatatttgttcggaaaagagtcatacatcatccacgtttacagaatcagacggtgacagcacagaggttcaatcagcgagaacttcttgcaaaggtaacagatggttgcactgctgatattcgcatgacacatccagtttctcaaggaatctgttccatgcattatgcaggcgtgtcgcgttcaaggataaataaaatgagagaaccggaagactcagaagacagtgctccaatgagacgtgtgtctcgcagaaggtgtttacactcactaccttacaacaatcttacttcatagtagtagtatttgtttcacgtccactaattttaaatctttctggatcattgctttgttcatactactaagcagtgctattagactcgtccttaattcctactcatgaattactaagaaatgcatttgcttacaaactttgcagaccagttaggtgatgccgaactgtaatatggaccaggtggcaacaactcctctctgggaagatctcgccttgagatcttggagttctgaagcaactggtctccctggcgcttgtcccaccagaaactctatctaacgccgatatatttgttgaatcataatgtttataagcctgcgttgacctgctaaatcttggtcagctccacacggaacggtttgctggatgctgatatttcatctagtaggttgcctctgattgataatccgtaattggagttcggtatctagtctccttgccccgtatgttgaattttttgttcgttacgatttgcgctgcttgaacaaatctatactcgcttggtcgaatccagaacttggtactactagagagatgtacctgtatgttgtctgtagactgtactgcctccattctcagtattggagtacatgttttaggtgtatgcaggtaaactttggatatatatgtattcctaaatgtattactagcatttgtcgtgtgaaaaaaaatactagtggattcctcatgaaaaagtactttatactattagtagttatgaacatatagctaaaaaaatataaattcattgatagtcgaagttttaaaattttgattgaattttatctgaaatatcatatactttttaaccagatggagtaataggaattacatatgcttattggagagctggggccctggaaagcccaggctaaatcatccatggcctcacttaacaaagcaacaggcagcagctcatttgcgttgtccagggacaaggcaaaggcatgttgcgccacttgtgcaatccagttctttttttcgctgtctgcctcgaatctgggttgctcacatccacatgtcatccatttctcctcaaagaatttgatcacgaaattcagccgcgacgttgacggattccaccagccgcggtcctcctcatgctccatggctgatttggaccactgatttgagtggcagatgatttatctgagatttaattcagtgctgaaacaataacagttcactagtatgaaaaagtattagtcggtcatatgcttcgtcgcttgcatactttttccatgcagtaactgcaaccggtgcatatttctccacggtgaaaaagacattgtcacactagacatgtttatgtagaaatatgagcaggtgttttactttgaatcattaagattaagatgtagattttacttcggtttctataagcacactttccaaagtgtatttcttataaaaactttatatacagaagttaccctaaaatattaaataaatctattttttaagtttataataattacaactcaattattcatgcgctaatggattttttgttttgtgttgcgtaatttcattttcatcttaatctatctcaaacaccacctgatcagtcatactatttgtcctctaaagatttcgatgcttatttgtggttatacaatgtaagcaatgtcaactgccaagctcataagctagatatattcgcatactccttctgttccaaaacagtataagcatttccgaaacttaaaatatgtattccattataaacatttttctatcaactttcccatcttcaccaatcacaactatgtctccctggacgtcagtttctattaaaactcttaaaagtgctt

SEQ ID NO: 19226 - DNA, 3757 bp, Oryza sativa
atgcacagattaaacggacatacattaaaatgaacgaatagtccagccaattagtctacctaattagcattctcaaattaactcttaaccgttagatctaactgaactacagtaaagaaaatgtaaatttactcaatgttttgttagcaagaaaaactttatatgtaaacttttttttcccatttggagccccctgtttgtactgaatttgccatttgtagccagtcctctcatcctctcctcctcgaaacggctaagcacaaaaacagaaaaccgaaaccgagggagaaggagcaaccaaccaaaccaacggacgccatcgccaccaccatcctcgccgtcgcctctccaactcaccactcctcctcctcctataaaccaacgaagaacacaaactcaaactcctccttcacacacacgcacgcgacaccggtcaagaagcgcgcgcgcgcgcaccactgcaccgcgcgagcggcaacggcggaggaggagaggctgtgagtggtgggcaatggccgtggcggcgcggctgaggtcggcgggggcaaggctcgtggtcgggccggcggcgatggcggtgggacgtggtggtggtggggaggggaggtggatggggacggccacggcggatgcggccgcggggatcgcgaggtgggagccgatgggggcgcgggagtactacgactaccggagggccatctacggcgacatcacccacaaggccatcctagttgacgccgccgggacgctcctcgcccccaccgagcccatggcgcaggtccgctcgcctcctcccccatctgcatgtcgcatctctctctctctctctctctctctctctctctctctgtgtgtgtgtgtgtgtgtgtgtgtgtgtgtgtgtgatgcggccgcctccattccgcgggatgccaatagttcagtgtttctaggcggattttgatcttacacaccactcattatttatattcattaagtgtgacgaatcgacaatctctgtggtcatgtgcgcgattaaacagtgcatcgatctgatctgttgcagtgttgatgttctatccgatccaagtctatggatcgatttggattgtgtcagacttagtgagatctatttgtgtgttcttcaagtttgtcatttgggtggatttgttccgtacataatgggctggcaacaaaaaaagctctctttttgcgatgctgggatatgtgtgcgcaattatgcatatggaatatgtcttcttcatgtggcttactcctgatgtcctggtgtttgttcaggtatacagaacaattggcgaaaagtatggagtcaactactcagaggatgagatcttgatgagatacaggagggcttatgcgcagccatggggtagatcgcggctgaggtacatcatataatttgcttttactgttctgcatcactactgtaactgtgaggtttggatttagtttttgcagtgtcttggatggccttgtgattttattgttcctgtgattttgatgatttgatttttagaatagcgtctggttgtgggacattatgctatcactgtcgagtgcattatagtgtgtcaaatccttactcaaatggttgttgacgtgtcgtatattaatgctttttgtgcgatttaaacaaggtttgtgtcatgcagaagcagcgcggctgccaacttaatatttgtcactcagtcagcacaagttggtcttttcaaactatcaacatgatattccctgactccctctatctactccgtaacagagaatttgctcttgtgggcacatgcaaatttgatcttcaagtggtacgaactcatgaaagatgaaaaatatgagcatccaacaggcatacaagcatgaaagattttaaatagagtgaatcgttcaacaatatgataaattgcgggatagaaaacttccatcttgtttctgacgaaaaaattctatcaaaactgaacctcaactgaagaaaattgttaccgtgatgccaaacagaacctttcaagaactgttgttttataattctatgaacaatcaatgtttcagattgatattcaggaactaaccaattttcgggaatgagttatatcttggtgacagaagaggggaaatgaattttcatcttacgtttataggcagtattcagatcaaatacagataatttttctctgtgtgtgtggtttagagtttagacactatacggttgactagtgaaactcttgacctggttttatgttgcaaagcacacataagtatggacaatcatctgcatctaattcttcttgacatatttggttgatggtgataggcagtacaagtgcatttattctttcttatggaccttttatctaaccagtgcattcacgtgcctccttgaactctgattgttgcgttaccaaaatagaatagagatataaccatggtagagttgcagccttccagatatgtgattgtgttgttcacattctagattcatatttcaaccatatttacctttcttatccttcaaatttatctgagctgcatggactaaaatgcttcaatatatccaggtatgtggatgatggtaggcccttctggcagcatatagttagctcttcaactggatgctcagatttacagtactttgaggaactttatcagtactatacaactgcaaaggtgagataaactatgcaatcataatcgtttcaatttttgcttttacatgctatatataccttatgaagttcttcatgtttgctaggcttggcagctctgcgaccctgacgctaaatatgtttttgaagcattgagaaaggctggtgtaaaaacagctgttgtatccaactttgacacacgtcttcggccacttttacaggccctgaattgtgatcactggtttgatgcagttgctgtatctgctgaggtgggtttccattttcagatgaaccggttagcttggcccaatgtccaagccctggctggtccttgacttactgttcttgtctctggatcctatatcaacaggttgctgcggaaaagccaaacccaacaatattcttgaaggcttgcgagtttttaggtgtgaagcctgaagaagctgtgcatattggtgatgaccgcaggaatgatctctggggagccagggatgcaggctgtgatgcctggctctggggcagtgatgtttactctttcaaggaggtacaaactacataccttaaattttcagatgctccaacactgcaagatacaaacaaaccaatcatagttctcttcttgttttagtccatttaatgccaaagttgctgttctattacttgtctctctttgttcagaaccaagctcacatcatcaaatctggattgctatgcaggtcgcagaaaggatcggagttaaggtgtaaggagtcgttcgtccgctgggtcacctgaaataagaaggccgggaggtgttgcatttttgtacatagcggcaacccttgttgctccactgatgtacatatttttccagagaataaccgatggcagtgtagtatatatctgtatgactgcatttgcatttgagactttgagcgctcaatttacgttacccctgctggtgtctgaaactctgaatgtctccttgtgttagctgaacctgaaaacgttaacctgaaggcgattagcatcaacatccacattgggtcgccggcccaggtgaccaggcctgcattatgcttaccagttctgggcagcgcacacttcttttccattttaacagcacttccatacaaaacttt

SEQ ID NO: 19227 - DNA, 7871 bp, Oryza sativa
gtcgggggcgcaccagtaaggtcctaaggtcagtggtgaaatcgtgggtccatgactccaccatccaaggtttaaattctattacctacgaatattacgtttatacaagtgtacttttaataagattttagtaagatcaagaatgtactgttgtttttcatctcttgataaggatatcgttgtttttcatctttttgagcttgtgttaaggggcagattcatggagatgtgagcaaggtgttggtaagatcatgaatgtaccgctaattttaggggcggatccaccgtatagcaaggttgtcaggatcgggatactaggtagtatcgttttgctcaaagtaatatcgtatcgtagtattgggatgctatgagattttcttttttaaaatttaattaatacttatattaattatatatagccattctatataaaaaatatagtaatgatatatgtcatgtaaatagagacatttatcaagagaaaccacgttggttttgatatatttaactgatttttatataaatttgagcatatttagttacactattttcaaaccatgttattttaaataatattttgtagtatcgtagggatcgtagaattgggataccacctaagatttcatatgatcatgtagtaatgaatagtaggatcgatatactatgaaaattaggatactaggtgggatcggtatcgtttcggtttggtaagatcgtagtatcgtaagatactagaatacgtatcgggatactgataacattgccgtatagttaatatttttgctaattacactactaaatatgcttggaactaataaatcattcttagaattaagcatttgcaccatggtaggtgaagagtgaccccaatgatttttttttctagctttgctcctggctggtttcatctctttgagcttatgttaggagaagtattcacggaggtgtaagcaaggtgttgcatgtgtagtggtgtgtgtgcgtgtgtctgccgtgtaatcgaaaaaaaaatcaccaagcatgtcgctgtgagcagtaaacctttttttttaaaaaaatgaaaggaagtgagcagtacaaacttgcttggcaactttgacatgaaaatccaacaaaagaagctaatcggaaaacttgtcaaaatggaacaaccccatgcaaaagtcccaataagttttgagttgcacgccaaaataagataaattcaaattttgtaacaacttcagctcatgtcaattagcatatattgtcagaagatgtacacaagacgtgctagttcatgcaatctgtttgccatttgacggtaaatcatttaccttacttacaaacagagatcggtctggatgtacaaaattcttgtagaaacaaacaagagatacccatccaaaacatatgtacatctaatccaaatttccaaccaaaaatcgcttcaatcttcaaagcaaaactagcagcagccaattagaagagaggattagacgaaaattttcatgcatgtctacttgattcccttgtccaacccgagcaacctcaccggagacagcctgccggtggggctgacgacgacgtcgaccaccctccgccgcccattccgctccttgatcgtctccagccgcggcgaccacggccgccccctcgccgcgcccaccagctgctcgtagtgcttcctcagctccggcgtgctgcacagcgccgccgccccatgcgcgtcctccccctcgccgccgccgccagccggtggccgcctccccgtgacggccttgacgatgaactcctccgtgaccttgatcaccgtccgtccgccgtcgtccttgacgtactcgaacgggctcttcgcgccaccggccagcagcggggcgccggcggccctgtcgtaggtgagcgcggcgagcgaggcggcggtgacgacgtcgcggccctgggggaggcggtcgacggggaggacgaggtaggtggcgcaagcgtcgaggcggtcctcgatggcgagcacgggggccgcgcggccgaggcagaacccgtcggcgcggcacaccacgaggcgccccgcgtgctccatcatcacctccccggccatcctcccggccgccgccgcccgcctctcccctccccacagcaccagccgcgcccctcgccgccgccgccgccgccccggcacgacgacgcacagccaccccagcaacccattcttccccatcgccatgtctagctagtcccagcaaccaacacgagcttagcgttactatatattgcggagcacgaaggggttgacatgcatgtacatgtacgagccgcgagccgatccgtgcgaggcgcgcgcgaggttgacatcgcgtcggtggtcaaaagtccgcgggcgtttgttcgactagcgcgcgcgcgattcgccggtggaacggttcacgcggggacacgacgggatacagtgaaatctcgcgcaacttgggcgtttttttgggcagttttggtggtggtcgctgcaggcgcgtcgcgtatcgcgcgcgggggcggcacgggcgggcgggcgggcggcgcggctgcatctgtgctggtgcagtttgccgtggcggtgagggcgcagcatgtgtgcgtgggtgagtgagaggacgagattgtggtggagatcgtgctagcagggggcgacgtaacctagtcggcaaggcaacgggggtatactggcctgattctagctagcgatcgattgatctcacatgttacaccttacacgtacatgctggaaaacttctctttttttttgatatatttcttccaaaaaaacctagacaacggtatcccgttccagggatacccttctatggatacctgatacctgtcgtggtaccagctgcatggtatccgatacctgtgatacctgttacccggtacatgtgatacctaggatctgacacatatgatactcgtgaaagagaatagttaatatacctatcccattgcaacgggatcccgttttgtagcagccctctatttcttttgagtagttttaaaaaatgatgggataaatcagtgtacgatatgtcaccccttcaaactttcaacttttccgtcatatcaaatgtttgacatatgcatggagcattaaatgtggacgaaaaaaaattaattgcacagtttgtatgtaaattgcgagacgaatcttttaagcctaattacgccatgatttgacaatgtggtgctacagtaaacatttgctaatgacggattaattagccttaatagattcgtctcgcagtttacaggcggaatatgtaatttgttttgttattagtctacgtttaatacttcaaatgtgtgtccgtatatgttactttttttttatcaaaacaactaaacacggccaaaattcaaattagatcgacacttattacgacaaaaagtgcacggaagctggtggctggtagttagagtcgttattagtagttcaaacggtgagattgtgaaaattcctctggatcgggtgggtttctacttttcagagatgaactggttctgtcaactgcctattgttttcgcaggatcaagctaagggtgaaacttggaaggaaggtttcagcaggatcaagctgggtcagccgcgtactctgcaggctccactccaatacggatctactgatcagtcgtcgcagcactgcagcagtcgagagatgtgtatcatttctgagaccaaattgtattattttactattataacgtgcgcaataatttatactagtagtataactatgcacctaagcattatgaaatgccttgctataaattcagtgaaagatacgtcagtggcgacgacgttttgggcaagtactcttgctgctgttgtgtttgacatcttcctccaatcctcctctcgattgtcccatgaccggatcctaatctaaccaattgaatcatttctctattattaaatggaattcgccacgacagacttactcttcatttcgcactgcttacaacatttacatattaattaaagtagaacaacacatagcatcttcaagctagacacatactcctaatcctaaaatatagtacatttacatagcatctgcaaaggtgcatgcaagcaaggttcaccaaacggttttcaaaccaaaaaaaaaaaacgaaggtcagcggtttcctcggttttcgtgaaaaccatttgaaagttaacgataaaatcctatcaaattttatcgaatatagaaaatctagcttgctttattttttttttcaaaacttacctttcgttttatggaccaggaccaatttcatctcagaccaaactttaaaaaccaagaggtttgtgttttcgagctagtcctgcggctttcgactgtttggtaagccctgcaggcaagtcccatggtcatgcaggcattacattgcgcagaaaatgcgctgcgtagtgacgacgtgagactttgtcgacgacattatcgatctctctccaactgcagaagaataatttcatagaaaaattgcggcgcctgtggtgcgcagcttgctaattaaccagtaaattataaacaaaagcgtattttgaacaagtcctctatgtgacatgcatgcatgttagtatattgttatgtctagagagagatcctaatccaggtatgcactagcttgttttggcaggtcagctgagacttgtaaactgtcacaacacttgtagtaatttaatttgaaattctgttcttgcctctgacgaagctgtccatatagtaataaagttcaaaagaaatattcaggagttaatgcagggttagatcatgggttgacaaatgagttcgagaaaatcccatgtatattgaaaggtgttttattgcaccctttttttgaaagtcaagagccacaatttacgttttaggtaatggaagtgttataactttgggtctatgcaccaactgttttgaaagattgctatgaagggaaaataacatcttttggcatgaaaatattgacatctctactctttagacatgcttgtatagttatataggcaacattcttacattcaagagttgtttttaagttcttgcagaggttttagttgagccagtctatccatgattctcagaaaaattgcgcttaactttggtctaattttcatttcttaatcttcattcatccaagattccaagcagggctaaatgaaaagcaaaaaggaaaatgttctcaagaaagcctggaatctttcgggtccagcctaattaaagcccacatactgaactgggccggcccactagcccaaatacccgcttggtactgacatgtagggacagccaaaccgcagttctacacatctcctcagctccaggcggcggcggcggcggcgatgggcgcggaatcggagcaaccaacggcggcggcggcgaccgccgagcaggcgcaggatctcatcgacgtaagccctgaaccctcccacgcggcctcctcgccggccggcttctgctcccctttcagctccttacgcgttgctgtagtgtgtagtactgagatggatgcttcttcgcttgggttaatcgcgcgccgccgtgtcgcttctcgtgcaggccgctaggtacgatgacctggaggacgtcgtcgcgctgttcaccgccggtgtttccctagactccgcggattcgcaaggacgaacgggttggtttggttccccgaactctcatgctgcctggattgatcttagccttttgttataattattggtctcgacatgctagtatgatgttggaatatgctatagagatgttgcatggtacttggatataactgaatatttaccatgacttttaattgaagcagagtagaggtagctccatgattggggggcggatgaataatgagtctatgtgtctttttatttgtcttgtagatgactaactatggagagtgatatagctatcattttccctttgctgtttcaattgtcttactacatgtttagctgcatatatcataaattcaactgtatgcgctaatatatctgaaaactgattagttttctagtttattggaaggacctaagcaccctgagtgatctgctgtttaatcatgcaaacttccttgtagaatgttgactaattattcgatcagcagctacctaaccatttttcctatttctgtcagcacttcatatggcctctgccaatggacatctcgctgtggtgcagtacttgatccaaaatggagcggtaagaaaattactagtatttcatagtgtttttcctgtattgggcatcagttcatgttatagcgagaagggcagtttatgaatgtgtgtttgatatacagaatgttaatgctacaaactcagagaagaacacacccctccattgggcatgcctcaatggacatatcgaggtatttgtgttgccctctgctatagccatcttttgatttttcttgcactgaaataaatagctgatggcacctctgcttgtgaaaataactttctcaggtaattaaagcgttgatatgcgctggggctagtgtcagtgcactgaacaggtatgtgaaatgtaaatgaccgcatctgaacaagcaatgatgtatcagcaaaatagaattgcatggacctagtattagactttcatctgtaatgagtttgtttaagcaatgatttggtatttctgcagccatttagttagtaatgagttagaattgtctgtaccctgtctttagacattcgttaaaaatgagtttgtttatgaatgaaagttttgatgtttctgcagccatgagaaaacccctatggatgaagcagtgacgaagggcaagatggaggtgatcgatgcaatcggtgcagcagtagctcaagcagaactcgatggtgtcactgtctcctaaaaggacttggtactccttctgaacggtcctctccttgacaatggatgacatataaccttgttcttatcttttctggtactgtgtattactgtctgtgtcacttgtgatgctgatatgctagtatcttgggcaatgggagaacttgaaccattacttaatattatcaattctgtcggcaatcagctattacaatcaatgacctaaaacgatggacatggatatatactgttataggctatttgtgcaccagtcgaagtcgcctggactgatcttctggtttcagacttgtagtggactggaactttgcatttgccgtgttagtaacatagtcatgcccactcatggaagtaagtgtagtttgcttgttataacagatgttattggcctgagctttgcagcttgtaagctgggttaatctgtgagctgttacccatctgggtatttcgcgttgtacagctgatttttcatgtgggctatgtttctgaattctgaactgtatgtacttgggcctgcatgggagtatcaaggcacagtgcaacgtccacttctaaccaagttagtatggcccatgaactgaccttaattttcttttgtggaatactataccgaaatgaactgttgctgatgatttgattgattgattaatttgcctatcctgctgcccaatccagaggcgccagatgctatctgactagtatgcaagttcagcaaatcacagttttggctgtgttcggttcccttcaaacttacaactttttcatcacatcaaatatttggacacatgcatgtagcattaaatgtggacgaaaaaaaaccaattgcacagtttgcatgtaaattgctagacgaatcttttgagcctaaatacgccataatttgataatgttgtgctacagtaaacatttcctaatgacagattaattagacttaatagattcgactcgcattgtactggcggaatctgtaatttgttttgttattagtttacgtttaatacttcaaatgtgtgtccgtatacgtcaatttttttt

SEQ ID NO: 19228 - DNA, 1052 bp, Oryza sativa
tttcatttcctgcttgcaaagtgtatttatgtaaagtcaaaaacatttctgcagcatgttctacgtgaactaccatcttctccagtacctgcttcctgctgcacagccttattggaagcttttcgtaagtgctctgctttgttcatgttagcttaaatatcgtcattcacgatccttgataaactttataatgaattcaataaaatacaaacaaattcactaaactacctaatattagaagaagctgcaatattttttagttactaaaactaatcatagatacagccgatgtaagttctaagctttgactgctttgcttacctgtaggatacactcataccccttctggtgtctgttaccaagtactagattattttaaggagcaaacctatacagattcaaaatcagactataaccttttatggaagttgattaaagttatacacttatacatactacagttcaactggtagataatgactgtaacatacaatgctattttttgaaaaaaaatatttacagaaactaaaacagttagtgttaccatatactttagcttaggtttttgtaatttgtttattttcagttatttgcttccatatttcgttccttggcattcttttcatttccttcatacttttccaggtctggagagcaaggaatctcggataaattctatgcgtgcggcaatatctgagacatttcctgagcctaataggcggctgctacagaggtcagtgtacttctattttatgtggatatcttatctgccgagttggctttgcctgctggcatatcagcctgaatattgcattatcactaaagcctgataccttctgagatcagggtttttgtcaatgtttttgtattgattaaaattatgtgtttgatataggagtaacaaaacacattcagctctgtactaatagtgtaaaaattgctagtgatgttatgttatcatttagatagtttatcaacaactggccaaattcttaacaagcttgtaaaaccattttttggcagaattttgagaatgatgcacactgttgctt

SEQ ID NO: 19229 - DNA, 1791 bp, Oryza sativa
atgttttctattcggttctcagttacattaacttcactagtgactgatttgtgaatagtcagccaaagtaatccttgactctgctacttggtcagcttgaaaccaggacgaacgatgtccttaattgtagtttaaagctaactgtttagttgtatcttgcttaatggtgcagcattacttatatatattctattttgcagatatccgatgcgattgagaatgagaaggaggtttccaagacatttcaaatttacaatgttgacagggctgtctgtggtcgagtagcaggtgtcattgccaagaagtatggtgacacaggatttgcaggccagctcaacattacgtatgttaaccgttttctttttttttttaattcgatttctcttatgaaaaggtaggaacataatgattttttgcccttcaggtttactggaagcgcagggcagtcctttggatgtttcctaactcctggaatgaatattcggctagttggagaggccaacgattatgtgggaaaggtatctaatgcaaacaggcatgcagcgctattgaaaattgtgcctgaccagatttataataccttttctttttttaaaaaaaatgcagggtatggctggtggagagctggttgtagttcctgtagaaaaaacaggatttgttcctgaggatgctgctatagttggtaacacttgtctgtatggagctactggtggtcaggtatttgtgagaggcaaaacaggtgaaagatttgcagttagaaactcccttggtcaagcagtggttgagggcactggagatcattgctgcgagtacatgactggtggctgtgtagttgtacttggcaagtaagtaccacatgcaggattctcatattgagaatcgccttcttttgtcctgatatatggatatttctcaatcgacagagttgggaggaatgttgcagctggaatgacgggtggccttgcctatattctagatgaggatgatacactcgtcccaaaggtttcataaccttgaaacttctggttttactagcttgataacatgcacgtatatacgccagttaggacttgttctttttaatatcattttccatatttctgtctagttgcatgctcggcttaggacaacctcagactaacatgttttacatgattctacgtcgtcaggccttttatctaaaaaaacatgattctacgcaagtacagggaatgatgattagaaaggcctacatgttctgatataatattacaatcttatcatctctaataactttcgttgcctatttcatcactttgcatgagtaaattgttcatgtatgaaggtcattgtcaaggtaaagaattgacaattagttgtgtttccttaggttaacaaggagattgtgaagatgcagagagtgaatgctccagccgggcagatgcagctgaagggcttgattgaggcttacgttgtaagtgaagttcacttcggaaagtttagcaccgactactcgttcatttcccatttcgctaacactgaacgttgcttttacaggaaaaaacaggcagcgagaaaggtgccacgattttgagagaatgggaggcatatctgccactcttctggcaactggtaccaccaagtgaagaagactctcctgaagcttgtgccgagtttgaacgagtacttgccaagcaagcaacaacagtacaatcggcgaagtgatctactgcaattcccaagtgatcagattagacaacaggaaggtgttctttggtactttccaggtgattttttcctgggaccgcatca

SEQ ID NO: 19230 - DNA, 1577 bp, Oryza sativa
cacccaaaagaggctgccgcatgcaacaacaaaacaaaaacaaatggaagacgaacaggaaagggatatacattcattctcactagcagcttctacgaaagaaaacgagaggattctttaccaagaatatacaaacagaatgtcgcaaaaaaaaagaagtctcctcctaccttggactgttccaaggtgacgaagacttgtatgggaaaccatgattagctgatccatttcctaaatccaggctgtggagttgctccattaattgtgaccgccgttctttgaagaaatctagcctggtcgtcagttcgaccagagtggacgatgccacgggagcttgcctcccgtactcgacgccctgtgatagtgatacaagagaattgaatactcgtattgaatgagaagcggtgtggtctttatttcgacactaccgcacccttcagttcggaagcagtggtttttcctttacctcggttgccttcgggatgttcacggacatggaattgccatccgctggcatgctcgttgatgcctccctcgaatcactcgacgaggcgtccatggagtgcttccgggagaagggccttgaagaaccatgaggtagcacgtgctgcttgatgcttctccaatgcgatgcacctgcggggccctgctgtcacacagaacgttgttgtgccatcagtggacgaaatgggatttttttacattgcaagtagacaattactcatcggtgcctttgcttttctataaacctgcaggcccataagacgctgagaactagaggtgcaacgagagaaggctagtgggcgaacgtcccccttaagtggttgtttgacccacctgacctggatggctttgggggtataaattggtggttgggcccatagtcacaaagttcctgggtcaatgggatcgaggaacgggatcgaggaacgtgatacgctacttgcgagaggtttttacaaggtggggacgaaaatgaccccgtgttttcgggacagggacggcgttcccgggtcgaggatcgctgccaccgccgtttcctgtgactatggttgggccaaacaattgtgatgcatggatattaaattttggcataatctactaggagtttgtatcattcgagctatacctagcaattgaaacattggatgagcacagtcaaccatatggaaaggttggaaatatagcacaaaaaataattggggcattttacaccttaagcacaccataatgatagcgcaatgagaaaatgagctaacatcagctaattggttggttctgtattttccaacttctgttgtcgtaaatttaagcatagaagattaagggaaaatctttagctaacctcattcctttgcttcttctcctgattacagaaagcaaggttcatatcaaaacctgattgaacaaagttcctgttggcaacaaaatattcgcatagttaatgtattgcaatttcaaaggacaactagagtatatataacacattgaactgttaaacatatatggtttgagcagatatagtaagccagcagttgacagcagaaacatcatgtttttgttactaaaatgtgtag

SEQ ID NO: 19231 - DNA, 7818 bp, Oryza sativa
agttcaagcagctctaccaccaagatcacttccactgaagctgccatccattttcatacatacaattgacagcacacaagtagagtgcccaactgcattttgcatggtgtgacagcctgatctttctttggacagtttaaagttcatctacacctggaggcagaggtttcttgagcttcaacacattttcagctatctagcctgtcttcttgaaatgctttgtatataaaatctttaaaacgtctagagtactgccttgggtccaccgctgatattgaggttgggtcatactggaaagatttgtatgcatgctcgagctttttgctgatatcataatcttgaagtatgtctattatcccaaaatataatatagcatcataatactccccagttggctctccaataagctgtggttccaaatcattcttccgagcagtcagttcagctcttgcaggcatgtttgctccgagcttgattttaggccacctgttcattcataatattcagatgtaagtcacaggaaatagtgaaaagcaaactggaagtgtattttcatgggaaataattattaattctatgagtatctgtagccctatcttggttatgtggttatttaccaccttctgtccaactagttgatagtacatataaccacatcgcaaacagctagcaggcaaattatggaaaggaaggaactgctaaggtcctatgcaaaacaatgccctagagtagccatgaaccaagtggacacattccagattttgaatttttttttattagatagtgattccagattttgaataggtcatatgagaatgattacatggttttatatttaatagataatgtctttattaggtcaattgcttcttcagaaagaagcatgaatatcacgcaatatgtgatgatttgctggtgtgattgtgaagctagcccgtcacgacataaggtcaagacaagcaaacatcacataagtatgaattttccatatataatattaggtcacatttcattaccacatttgtaaacgatacaacagatattaaatgtttggcttacctgtttggatcagtgagacactgatccacatttcctcttgaaagacgaggagtagatattttgttgatatcgtaatcggtggaaccttcaaccaaacaaaaggccttgtaagggataaaatgagcatgcccaagaactcaagttttattcatgacaaactttgcctgtttttaagtttttttttttttaaccaaccttcgctcagaagcttctctctattgcctctaaaatgtacacccaccagaagactgtaatccatgatcttctcctgctcaaggaaatcgcaatccctgtccacttgcctgcttcaacacatttaattctatattaatgttttgaaggaaaaaaaatgattacatgcccaaaactagagtatgagacaatatgtttttgcacctttggaactcatggaaccattgcttcttcagtctaaatatgaaattcagatcaagatccttcagagttgtatactgatcaatctcagtttgtggcttgtcagttgttcggccaagagacgagccttttagatcaaaacgcctatggatggaatgatcagagcagaacagatttcccatgatgacaaagcgaacctgggcggtaatataatggtaaagagtcagggaacacatccgacaatgtatacgacaaagaaagcgctaaggatggatatgaaatactgaaatatacagtgagattcgtctctaacctttttctggtttgccccagctaatttaacacaatgtagaccaaaaaatttggtaactagagtgttctcgaatgaacggacatgattatagtaagcaggaagcatcttaagcagcatctgtaatgtaaacaaattttttttccttaattcagaataagcttaggaagattggaaaatggaaagcctagatagtcagcggatcacaaggacaaacctttacttccgatttcttcattgtctttatcatgtatcgatcatcatttgtaaggtaaaagaagcttccacttttaccaggagaagagagctcacgcagagcctcacttccacaaagggataacatataatcagcagcatccaccttgaacaacttgcgcagcgtcctttgattcagttcagaacaaatgttgatcagcattatgacaccagaacaagggtaaagcatacaattttaacatgggagtgatgaccaaccggaacacctgagggcagtaatccttccatttgaaatcacaagaattgtgcggaggggtgtattttgagccttctggagggaactttgtccatactttttcctttgggtcaaaagccgaggatttcagatcaagcgtaactggaccttgcttcccgactgcatgcctgtgccaacaagccatcgatacacacatggatttaatcatgggaaaaagttgataaaaatatgatctataggctagcgtggagttcaatcgatttcgagccataaaggaaaatgccatcttaatgctggaaaatataacatacactgcaaatcataatctgattaacaacccaagaatatcacaaagcaaaaattttatcgaattacttataaatattccccaattaaaagcaatcgcaaaacaaaatttcacatcattcataacatacaggggcaaaaaggaggagctcacgcacctgatcccgagctgcaagttgagcatgagctcgtaattcttgtgacccttggcgatggtctcgccctgccgcttcgcctcccgcggtggcacccacttggcgatgcgcggcgccggcgacggcggcgcgaggaccagcccatcaccggcggcggccgccttgatgctcctcctggggcccaccgcctcgtcggccaacgcggcgccgtcgacaatgtcgcaggtgatgtccccgtcggactcccaaatgcaaatcttgtcgacttcctgtcgccgccggagctgttgctcagccccgacgcggagctcgaccgcgcattgcccgccgccgccgcggcgccgcctctgttgccggagtgattcagcgacctgtgcggcagagacgcggccggctcggcggctccgcccatgaagcccgggaggtccctcgcgaacacgtcgcgggggtcgcgcgccgtcggggaggacgccgccggggacgggtagtagacgcccttctgctggacaatgccggtggcggcgtcgcgcgtccagtagccgacgtagacgctgccgtcggcccatcggaaggtgccctgcccgcgggggcacccgtcctcccacccgccatcgtagcggttgccgttcgaccagacgagcgcgccgcggccatggatgaggcggccgcgccactgccccgtgtactcggtgccattgcgccagatgtagcggccggcgccgtcctggagcccggagcgccactcgccgtcgtagtggtcgccgttggcgtagctcttcttgccgtggccgtgcttgaggttcatggaccacgagccccggtacgtgtccccggcggcgccggtgtacgtcccggcgccgtccatgaacccgtccctgaactccccctcgtacgtggcgcccgacggccacgagaacctgcccctccccgtcgccttcccgtgccgccactcgccctcgtacatgcacccgtccgtccacagatacttcccggcgccgtgcggcgcgccgccgcgccactggcccgtgtagaagtcaccgttggggaggccgcgctcgacgtacccgccgtcgtcgccgccgccggccgtggacgccgacgacgaggacgccgtctcggggtcgtcggcggccagcatcggggacacgcggcgcctgctgcccccaggctgcggctgcggctgctgctgctgcaccaccttgcgcaccgtcgcctcccacgccctggcgcggatgtgctcgtgcatttgccgcgcccgcctgtcccggccacacccgtttcttgatatatccccacacctccggcgccgccgccgccggcgcccgagctccctgtggcgtggatctagcaccgccggaggccgcggtggctccacggcggcattgctggggggagagcgagctcgcgagatggggagtaatggcgagaggaagggatgcacgcaacgcaagcgaggaggaatggaagggggagaaggaaaaagggaaggaaagcaaagtgttttggggtggagaggttggggaagagagggagggaggatggaatgaaagcaagagggagggaggtggaaggggtgttttacctttaatttgtttttttttcttctttatcttttgatattttaacatgaattcatgaatgagttgatttttttaaggttatttatggatataaaatataaattatatatattaaagagtttaaaaaatattttagaaaaatattcgaacaatttttaatataaatttaggaagcgtgcaaacgaaaattaatccaaaatcgagaataaaagatagagaacatttgtgtcatactccagcattcctaggagaatatgatatttttggtttttttccttttattctttaggccggtcttttgtaaaacttttaaaggactccaatatttgtgaactattgaataaaccgataaaaaccaatagtacaatacagattactcctttccgaaaaaaaaaggggctggagatcggtagttgtgttggtggtttttagttgttggtggcagtgtttgtctaccaattaaagtgtcaaaaggctacagatttcggttctgctgttgtctccatgcttaattagcagtggtaagtacttaccaactaaacaatcgatcctcggcttaatttagggctctgtctgtttgtgagatggtgggctcctattctttctccgagcttgcacaacaccagatgtgagatatttaactatttacagcaccgctcttataaatgataattaaaaatttaccgttttatttatatgtcacagacacataaaaatcaagatgtctcatattacgagtggtaaatttttaattgtcacatcttaaaagtgataaatagttaaacgactcatttgtcatgtacatgcttatttaattattaaatgtatgattttcttaaaaaaatacttcaaaattgtattataataatttattttctagtttttaagctaaaatttaattaatcataccacctcgttttcgggaaaaaagtttccaacacttactatcaaacacacccaaaacagaagagtgaagagaagctatcagttcaaaactacaccatctcttctccaatttagcctctcgtggtctgagtgttgtcttaggcctggtttagttaccaactttttcttcaaacttttaactttttcatcgcatcaaaactctttctgagtgttgtcttagacctggtttagttcccaactttttcttcaaacttctaactttttcatcgcatcaaaactttcctacacacaaaattccaacttttccatcacatcgttccaatttcaatcaactttcaattgtaacgtgaactaaacacacccttactatcaatttagcctctcgtggtccgaatgttgtcttactatccataattaaaatttaaaattataattaagatttttagttgattttgctttgtttttatcatgatttatttttgagcattagctttttaacccgctaagatcacagtatttaaattttttacttactgcaatattgttattacttaggacacctgtgatgtagaaaaaaatatgggacacattgaaggttccaatcctatataggaacactaagaagcgcctttaaacaaatgatgaaatactatccttgaaaatcctatgaaatgcataatagagattttaaagacaagttagcaagagctctaactttttggaaattttctttggagtccatctcatcttaatcttacgtttttttgcggtctactcaaatgaccgttcatgtattttcatgtgttttgcaattctctattttgcatttatattttagttaaaattatgtgtttttcatatttctttttttttcaattcggtgtttctctattttgtttctttttcccacggtttatcggctgtagaccaaacatcaaagcattaattactaaccaatcggcctagccttcttaagctcttcctacctgtgtagcctccatttggtttgtgtttggtgtcttgtccctgttcctctgatacctgcaggaccatggattcagctgcaaatattcagtaacccttgtcatgatatatagcctggtcctaatcttttgacttgtaggtctacccagctgtttggttaaaaggctgctactaatgaccggcttctgatgttgctttatttagctaatccagcactaatgaagctgatcaatctcatagggagaagaaaagaaaggcgatacactaataaagcaggggtatttattagtcaggattcagagacaggaatcccaatcttccatgaaagcgaatcaatcgccttgttagttgttcttctgtcatgtaaggcatgtacctcctgtcctccagctttatcatttattttaaaaaatggagattagtatttttctttgagcttcttctgacttttggccagcacacctcatccaagatttgattttggagtataattttacaccaaacgtacagtgtgtactggtttttgttagaagagaagaagaagaaaaaagaggacccaacaaaacccagaaaatatggcacgttgtcacatttgacatcctcgttcgctttcccaagaaagttgcaataagattaccaaacaagtttgatttctttggtacaagtatcagtggtagcgtctctcttgactttatatctgtgttcatcagcagacaccatttctcatgcgtttttgctgattgctgacttgctgaaacggtgataccgaactctcaaaactgcaaattaattgttgcagctgatgaaagatgcttctctgatgatgcaatttcaactcaatttaccagcaactagctgctgcttggccctgggtctctatctctccaagacatcaacacaatgcatgccaaacttgtgcattggaggatcctcaggtctcctagtaattatcagtaccacagagccagcagtactgttgaaattaatttccatcagagatcacataaactaatggtgagatcgcattagtcgtgcgtccaaataagtggtcagatcttgatccatttcttaattaaagtctcgtccttgcctgcaggtaggtagcctaagcctggtctcagttctgagcaaaaaataaggtaggttgccagtggaaaaatatgcttgactggttctcttctccctgataattgataaactgaaccaccagttcttcccattcatccaacgaacaaaccgacagatagatatggctagcaattaacagaaaccaaggtccaagtgtgaggtcaacaatattgtccttgcattggctcacacacaaactgtaaagttgttattgttctgcttgtctttagaagggcagaagtgcagacactgtagctgtaatgcaatgttactcagaccaaacagggatcagttaagtgtacagccaaacacaaggtgaaaagcatatactatctccatcgtagtccgactatatgtatggacaaagccaaaacgaagtctatgtgggatggagagagcgagagagactaaaaaatgttcggtaacataaattatttaagcaattgactagagcatttttatactacatttcatcggttttgctgttcatttcagatatatattgatccaacaggttggagtaga

SEQ ID NO: 19232 - DNA, 4855 bp, Oryza sativa
agtggatcccccgatgatctgattaggtaccccaaaccgatgcacaatgttgatgaaaaaatctctagctttatctgctgtgattgtgatgaccggtttagcctcaatccacttggagaatttgtcgatagccacaaagagatgcgtgtaatcgccgactgcccttttaaacgggccgaccatgtcaagcccccagacccgcaaatggccaggacaatgggatggtttgcaattcttgggctggcaaatcaatttgtctggcaaaaaattgacaaccttcgcatgtccgcacaatcttgtcagcgtcggacaccgctgtaggccagaaaaaaccttgccggtaagctttgccaacaatggtccgtgcagcggcatggttaccacaaataccagaatgtatatccttcaacaactgtctcccttcttcgaaagacacacagcgctgcagtattcctgatggacttttcttgtacagctcagtgtcatgaataatgtaaagtctgctgcgcctggaaatccgcttggcttcatttttgtcttgaggtagttcttgtttgctcaaaaatttaataaactgttctctccagtcggcttcgatcatgcttacgccttgaatatccatggcttcgactgtctcttttctgggcacggtcggttcgtaaaggtgttcgacaaacacatctgaaggagctgcttcccgttttgaaccaaaattggccagtctgtcggctgcctcattgttatgtcggaggacatgggtgagctcgagtccatcgaatttattttccaacttgcgtacctcttgtcgataagcggtcatattatcatctagacatgatcactctttcatgacttgattgacaaccaactgagagtctccacagacgattagtcggcgaatacctagagatattgcaatccttagtccatggagtagcgcctcgtattccgccacgttatgggacgcagaaaaatgtatccacaatacgtagctcaatctttctccagtcggggagattaaaacaaccccagctccagtgcctgtaagcctcttcgacccatcaaaatgcatagtccaatattccatcttttcctctagcatgtcttcttggcactcggtccactcggcaaggaaatcagctaaagcttgtgacttgatcgaagttcgtggcttgaacgatacttccaaagacatcaattctaaggcccatttcgcgatccgtccgtttgcttcgcggttatgaagtatatccccgagtggaaacgatatgactaccgtgaccgggtgactttgaaagtagtgagataatttcctgacggtaattaagacaacatatagtaacttttgaacctgaggatatcttgtcttggagtcggctaaaacctcgctaacgaaataaattggacgtggactttttgaacatggccttcctcttcacgctcgacaaccaggaccgcactcacaacctgggaggtcgccgacacatataacagtagcggctcttgcggatgggcaaggccaaaactggtggagtggtgagaagtttcttgaagtcttcaaaggctttctgtgcttcgggtccccactggaaattgtcagttttcttcagcagcttgaagaaaggcatcccccgctcgccaagtcgtgagacgaaccggctaagcgccgccatgcatccagtcagcttttggacgcctttttgggagcttggcggtttcatgttgaggatggcgttgattttctccgggttggcctgtatgcctctttgagataccataaatccgagcaatttccctaacggtactccgaagatgcacttttccgggtttagtttcatcttgaaagcacaaatgcttgtaaaagtttcttctaaatccgcaatcaggtcatccttctgcttggtcttgacgactacatcatcaacataagcttcaacattgcgaccgatctgagttgaaaaacatctttgaatcatgcgttgataggtcgctcctgcattcttcaatccaaagagcatggtgatgtagcagtaggccccaaagggcgtaataaacgaggtcttcaagcagtcggattcttttagtcggatctgatgatatcccgagtaacagtccaagaagctgagtaactcgcagccggctgttgagtcaaccacctggtcaatgcgaggtaacccaaaagggtctttgggacaagatttgttgaggtcggtataatcaacacacatgcgccattgccccgtctttttccggaccaggactgggttagccagccagtcgggatgaaagacttccttaatgaagcctgctgctaacagcttggttaattcctccttgatcgcatccttcctgtcctgtgcaaaacggcggagtcgttgcttgatgggtttggcgtcttccttaacatgtaaagagtgctcaatcacctctctggggataccaggcatatcggatggtttccacgcaaaaatatctttattactctgaagaaaggtgatgagcgcgctttcctatttacaatctaactcagtgcctattacagcagtcttatcaggatcggagggacctaagggaatctttttagtcttggcatcactttcttcggtcttcgtcagcttggttgcaggcacttctccctcgcttgccgtggttgcagccagtcggatctcttcacgggcgagagtagtctcgtgagtttgggccatctcgcaactttctttatcacatgtgacggcttgcttgatgtcgctccgtagtgatatgacccctcgaggaccaggcatcttcatcgtcatgtaggtgtagtgtgggacggccatgaatttggctagagctggtcgtccgagtatagcatgatatgctgtctcgaaatcagcaacttcgaaacaaacattttttgtgcgaaaattctcccgagtgccgaaggtaactggaagagtgatctggccgagtggtgtagctgacaatcctgggataacaccgtggaagggtgcattactcggctttaattccgtgcgaggaatctacatatcgtccagagtcttagcgaaaaggatgttgagtgcgctgccaccgtcgatgagagtctgtcgaagcttgatattgcgaaccactgggtctagtaccagggggtaccgccccgggtggaccactcggtcgggatgatccgatctatcgaacttaattactatctctgaccaccgaagatattggggcgtgttaggctgaaccgcattgatctcccgttctgttagcttctgttttctcttagattcataagccaggggtccgccgaagatgtgattaagttctttgcgatgatcttgaaaaccaatcggggcatcgtcttcatcatctttcttctttgatgtgccttgatctccgtctgagggtttacgtgcgttcttaacgtattgctccgcgaactgtttgtagacgaagcaatctttggccacgtggttggagttgggatgatgcgggcattgggagttcattatcttgtcgaaggtgttgacacaggaacgttgtcgggaagacggagaggtggtcaccacaagttcttcaggcttacgcttgcgatccttgtggttgttactttcactccctcctgcggtcggcgtatccttctttggcttccaagtggtgcccgactgcttggacgccgtgatagcatcttcagctttggcatactcattggctttttcaaacatctgtttgaccgtcttgggaggtttgcgtccgaacttgccgactaggtcctcgtggcgaatgcctttagtaaaggcggcgatgatgacgtcgtcggtgatgttggagatcttgttgcgttgctcagagaagcgtcgaatgtattctcgaagagattctccagacttctgaacgatgttatagagatcgaagtgtgtactgggccgttcaaaagtgccttggaagttggcgatgaagtggtcgcgtagctctgcccatgatccgatcgtgccgcggggtagcccgtgaagccatgaccgggcagaatccgctagggccacaggtagatagttcgccatggctttgctgtctcctcctgctgcgcggattgcaagaccatagacggtgagccaagactcagggttggtggtgccgtcatatttctcgattccagttggcttaaagccggctggccaatccactcgacgcagatcgcttgtgaaggcagcaacttcgtccacgtcgtcgtcgtagcgatccggtgaatgatggcctcttgctgcgcggcgctagtcgatggtgtcgcgaagatcgatggggcgccttcgatgtggggagtgtggtcattcaactgagcgctccctatatcgctcgggaggcgaatgaacagaccgttcgtcatgtcccctactactgcgactagattcggcgccgccaatgctaaggcttggctcgtgatagtcttgagatcgaagatgagggactcggctaccagtcggggtgcgggtgcttgcggagttggccggaaccgaggcagcgatcatggtcttcgtctggttcaagatgttgactacatgatcagcttgcttgagtgcgtcttccttgaggagggtgtcaaggagagtgattgctgcaaccgcattctgctggggggtgcgaaagaccgctgtcccatcgacgtcttgttgcccaatgagctctctcgctcgccgcccagattccaaggtgcgttgttgtcgatcttcagcctccttcgcaatccgctcgcgatcttgctgctcacgctgtagttgttctcgctcttgtcgctgtcgctcttcctccagtcggcgacgttcagcttcttgccgtgcgcgatcttggtccgcttctcgggcctagcgctgtt

SEQ ID NO: 19233 - DNA, 4443 bp, Oryza sativa
cccagtagattggatctcatccgagtggtttgaagccgactcgggagagatgatcttggagtaggcctcggccgagttcgcaataccgaacggcacggggacctggtctctccccgactggtttgaatccgtgtcaaggagagagatcttgccgaagtcgttggtgataaacttgaggctgccgaactggaacgcctgcccgggaggaaaggcgaagtcgtcgatgccagaaacaaaacccatcacacttagtcagcgagaacttgacgctacccctacctggcgcgccaactgtcgaagcaagatttcggcaataataaaagggggtggctatcaagctaggaaagtggatgggtttggaaacaaggaattttatataggttcaggccttcttattcaagaagtaataccctactcctgtccggggatgattccgccgagtgtgttattgattgtataaactgggaaaaagaatcgcccccaagaggcacacggaccctccttatataggggaaggagtccgctttacaaaatacagtccatatcctaacggaatatgggattatagataaaatacaatcgtaaccgactaaaatcccaggtatttccttgacatacaagtttagaacctaacccaagacttcatagagatattccatctatatttggtaccgtatatccgactaaattacaactgtcatgtagatatagggtatccataatctccacaccctgtatatgctctatgttgatattaggaaaaagtacaccgaaggtccctcaacttgacaccgagttacaaaaacgtcctcaaaccgcaaaaccagatatcaggcgtcccttaactaatctaaaccggtcactttaggtcctgcggtggttttgaccccggttttatcctacgtggcagctaagtctgcgtgggacccacgggggccccacatgtcaggtgtccacgtcagcacctctctatttcccctcctctttctctgtttctctccttccttcctcgttctcgctctctgctctcgcgagcttcccccaggcggccgacgagctcgaccacgtcatcggccgcgaggcggtcggagacccacgtcttgagctcgcaccgcctcgagcaaaaagagttggatgaggaggcggcggccatggcggccatggggctagcatccacgaagcagatgttggacgcggtgtcgtggtggtcgtctccgtcgtagcggctggggatttggtggttcttggcgtcgtggctatgctgctgctattgctgccggttcgctggagggacgagacgagctgtctcgatgagctgccgagacggagcccgagaagtagctggcttcccgaagcgtccgtgggttcggcggcgacgatgacggcatgccggtggccgagcgtctgcagcggcaggacgccgggccgcccgaacggcgtggccgcaactagcatgccggatcacggggtcttctaccccaaatctcacgcgccggtcgctgccgcgagatggacgcggtagcgtcatccttctgctcctcgccagcggcggctgcagccgcgaacgcctcatcgtccggctcgcatgcttcttcaaggaacgctcgcgtaagggggtccggccccggatgctgcgacggcgggggcggcagcctagccgctccggcagcattgccgatgtcatcacctttaggagaaggacggcgtacacgcgcgaacggtagttcgggcgtcggagcacggaggcgagggtgtcgaggaagccgccattgtccttgccgaggatacggcgcagggtgggctcggacggcttgagggagtagagcacgcccagtgcctccttcttcggcgagctcgtcgacatgggggaatcgatcatcgagtcgagcaggtcatcgtccaacctagccgacgtggaggtggaggcggcggcgtggctctggacgacgacggagacgaggaacttgacggcaccgggcgtggcctcgatgcagcgcttgttgcggtcgctctcgacggcaatggccttgatctccctgagcgcggcaagatgccgctgcctgccaccgccgccgccgccgccaagcatcgtcgtcctccatcaatgaggcgcggggtggggaatcgctcaacggcgtgcgcagcgcaccacgcctggatgagtcgccgcagcgtttggttgggcgtcgcctcccactccgccggcgctagctgccgggtgatctcgcgcttcctcttgggatgtccttcgccgccgtcctcgcgcaggtgcgtcatggcgagtggatttccttggcgttgttcgtgatcctctcagtgatgttcgtgccatcaaatgtacacccagtccatgacaacgaacacgcgacgcaccgtgtagagcagcgacaccagcgccctcaccggcggccagaacgcgccgcgcccagggtgccgaccacgttctcggtgaggatctggcacgagaggagaaacagagaaagagaagagggggaagagagaggtgctgacgtggacacctgacatgtggggcctgtgtgggtcccacactgactcagctgccacgtaggacaaaaccggagccaaaaccaccggaggacttaaagtgaccggttttgattagttaaggggcgccggatatctggttttgcggtttgaggacgttttgttaactcgatgtcaagttgagggaccttcggtgtactttttccttgatattaagaaaagaagagaagtgtaaaagaggtgatttctctctcttttgccatcggccagcccagcccattgattgggctttctggttttttctttttcatgttatttttcagtttatgatgaagttcatgttctcattttggttgcatttgtggatctaaatctctgaatgtgaatatttcctggggaggagctagggttgttttgaagtggcagtacttttttcttttttgttttgattctttagaaaaaaatcataattacaatcgggtgtcttaaaacatagctaactgcaataagtgattttcgtagacggcccacactcggtggatcgtttgagaaaagcaaatttggaggatgattgtacgagccacatgtcctgattttcacatatctctaggtgcaggcgagtgctacatttgtctacgacaaaccatttcgaccgcatttggtagttgtctcgacgctacaagtctattctgctgctactgaaattcctagtgccttccattcaacaagccaccgtgatcatctgcgcacagtacacataagctctccttgatgtgccccctcctattatcactccaagattttattatccggaaaacatatggtgtgctctctagctagcttctcgttgagtctgattccaagagcattgtagtaagtctgtccatgcacagtgattttcttctccgtattgataccgtctgtctgtccagggcaagggtaagcagatctaagtatccctcattaataaacacctcaacaacctgcaagctagtatttgatatggatgaaatagacaaatagtcacgttgctctttcgataaaaatcaatgcgtgtactattttttttttttgtcctttttccaaatcaaaggttatccctgggtctgcattttcgattttgatcaaaatttcggtactttctggatttttggcactttttggcacaaaattatttgaattttaataaattttgattgaatttcaataaacttggaccaaattcataaaaaattaagaaaatttctgaaaattttgggtgagacaattactcgttggggatccaaaatttcgaacctgaattgcaataactcgacgccataataccttgcattttcgcaagtaggagcccagtttttcgtttaacaactttgaatcaaatatcgctgaaagaatcttgaatttaaacccattttttagattaactcaaaccagattgaatgaaattcaaccaaatttgaacaacttttagtggatcattaattttaaccaaatttgtaaaaatcttgggaggttctgagctagcgcgatattggcatgttccagctatatatctgtagcgcccgttccgtcatggagcctagcggaaaaattatctcttaaaaaccctaattgcgaaatttgtttctttgcttgttgtctagtgtccgtgccatctcagatctcaatccccgatctatcgtcgagttcaattccgaatccaaatccttccaaatcaattcctccgcaaaagtctattttgcctcccccggggtcgatgggccgaatttctctcggcccatctaccccgggggtggctaggctgacttttgcggtggacttgattcggtcggatttggattcggaattgaactcgacggatcgatcgggggattgagatctgagatggcacggacactagacaccaagccttgaatctaatttcgcaattagggtttt

SEQ ID NO: 19234 - DNA, 2406 bp, Oryza sativa
cgcgcctgtcgcccgtgtcgccgctccgctccaaaccacccagccgtcatcgccgtcgtcatcgcccggcccccgccactccgcgcgcaagctgccaagggacggaggcagagctcctcctccctctgccgcgtcgcccctgctccctcctccttttcccgaagaggcaagggggcaagcccccttttctctccctcgtttcccctttttcctcccgccggcgtcatcctcctccctcctccctgtcgccgctttggccgcgactgccgagcgctagccctctcctttgaccgccctaagtcggttcccaaaccgacattgccgtcctataaacccaagcctccccctttcctttcctctcccattcgcctccacgccattgccgccgcctcccgtgctcttttcgccggtgcgttcgtggacgcggaaggggactccgggcgcgccctctccttcctcttcctcggcccgaggccggagagattactcccgcgccgtcagcctctcgtcactgcgccccgtctcgcacggtagtgcatctctccgttctccctcctcgttccatctctcccccttagttttcggtagtagctcgagtagcctccccgtagctagccggcgccgccccgaccgttgccatcgctcgccgagtgctcgccgccgtcgccgcccgtgctccgtagcacccgctcgtcgccggcctcgctcggcgtagctccgcccaatccgacgctagcaacggattcccgcggccgcataaatgctctcgccgccgggaattggcccctcgtgacctcgtcgccttttcccccttcttccgcggccgcttgccgccgccgcaattcgtcgccgtcaagttccctccgacgaatccgagccgttggctcgtctccccttgtcctgtgcaaccacccggtgttctcgctttcgcctgtatcgccgtggttcgctccgccgctcgccgctgtcgtccgccgtccgttccggccagcgtcgtcgtctacctcccgccggcccgcgtggcagccacgtaggcgccacgtaggcgccacgaaggcgccacatcggcgccagctcggccaagaccgggtcgagccgaccccggtcagcccttcaccgtgcgcgcgttccaccgcgagccgtgaggctgcgcgtgggcccgccgcatccgttcctccgcgaaccgcgcgcgtgcaccgcgtgcaccgcgtcccagccccgcccgcacgcgtgcgccgcgtgctccctccgcacggtgagtcgagccgctgacaagcgggtcccactcgggaccgcgcgcggtgagcccggtccaccggctctctctctctcctccctcccgcgcgcgcgctccctgggtcgccttgggccgcccggcccatttaagctcggccgagccgccccaattctctcgggcagcgccctagccgcccgaggaaagtctaatttccctccctcttctcttttcttttcttttcttttccaaaaaggatttaattaaatccttttcccttagaccaaaaatccaataatcttagaaattcaatatcttcccaaccgtaaatccgtttgactccgtccaacttccaaaattcctcaaatctcgagatctacctaatggcacgcttagaggtcattaatagggctttattttctccatttgttgagttgtcccgtttcgcgtgtagtttcggagcccgaagacccgcagtgcgaggatttcgaggatcaagctccagatctcgagcaaggcaagccacctttgaacatcttgaggctatatttgaaatttaattatgttgcttgaaaaatattatgcattgttaggatcgcacttaatctgtttgtcccgtctacaaggcagattggcggacctacctaatttgttacatttgacccttcctttgttatttgttatatcatgtcccccttgtatccatctagttgcgtcatgatattcgtgcacccagtgcgagtatcgacggacgccttcaaacttaaaatctgaaaaaaacaacttgggtaaacttgggttttacaaagacttggaaaacccgacacctgggtcggtgcttgcgaattaaatgaatttccaaaaccgcggatcggggaacgtaccgggtgtacggctttccgctctcgcacttaaggaccgtttccttggaatttcatccaaacataagacaagtacgaccacatgggtggaatgggacacccctggctgagtaactagcttatcaggggagccttgatgccgagagacatgtggattcgccggggtggtgtcggggaggacccctgggcttcctggcacagtatggtctgggagctaacctgttgttggtctgggacccctctcgtcggcatatggtaaacctgtgtcggctttggaaatgccttgtcatg

SEQ ID NO: 19235 - DNA, 777 bp, Oryza sativa
acaagtcgagcgtgctaacggcatgatactgcaagggatcaaagcatgagtttttgaccgactacgtccctatgctggcaagtgggtagatcagctgccgtccgtactttggtctttacgcactactcctagtcgggctaccggccagtcgccgttttttttggtttatggcgcagaagcaatgttgccaagtgaagtggaatttgaatcactacgatttcggaacttcaacgaggagggctatgaagagggccgagtagacgacatcaaccgactagaagaagcccgagaagcagctttaattcagtcgactcaatatttgcaagggttgcgccgttatcataatcggaatgttcgatcgcgagcctttttagtcggcgacctggttctgaggaaaattcaaacaacacaggatcggcataaattatctccctcatgggaaggaccgttcataattgctgaagtcactcggccaggttcttatcgactcaagcgcgaagacggtactctcctcaacaattcttggaatattgaacaccttcgtcgattttatgcttaggcatttcgcttgtatctttcctatttgactgctaatttcaagtttttccttgaagttttcagtcggggggctactatgataataatggagtgtgatttttatcaattcaatttgcttacttgatttatcattgccctgtttggtctttcgacttagccaatgaggactgaaggtttttaatagcttttgcgggttttaggctcaataaggcttgacaa

SEQ ID NO: 19236 - DNA, 1678 bp, Oryza sativa
tggcacagggcgactggatgttttcttccttggagtagcctgttttggtagtttcttggttgtctctcggtctccaggcctcctggcggtatcatcggcttcgtcgtcacttagaaccagcttcctctttcgagaatctgactggccaattggatcagaagcacttggttgagtttcagacctaattcttggtcctccgctcccttgcccagtttggtggcggggcgatcggcgttgagcgattgggggatccgacttcatcaaagcaaattcctgggtgtaatatccttcattgttaactgattcaataagaaagcaagatcatattttgagaaaggttgaagtgtatgaatacgtaccggtggaggaggattgaatgcattgaacggtacgactagcagcaagtgtgagtagctgacaacgatggcgtttgagaagatcttatacatcctttccttcatgaccttgaagtcaagagaatctggatcttcacggtttgggtcatgcttgccgtcaaattcgaaggctgtgcgagatctttctttgattggagctaactgacacttgataaagtaccgggtaatctgttctccttgaaggccctgttctttcagctttatcatcctctccatcagttctactgcttgtgcagcttcgtctcccattggcagtgagttccaagtatcccgataaactggaggaagacaggagtattcgggaagaacaggctcggggttttgaacataaaaccaatttgcgtgccagcctttatttgaggtcttgaagggcatggagaagtatttttggcttagtgttcccctgagttgtaaaccagcacccccaacgacgcatggtttactcttgtttcgttggggcttgaggaagaagatgcggcggaacaaggcgaaatgaggcctaatgcccagaaaagcttcgcaggcatgaataaaattggcaatatgcactatggagtttggattcagatgatgcaagctaatcccgtagaagtttagaattccccggaaaaatcttgaggttggaagagaaaatccgccgtagaagaaatgagcaaataccacgatttcgtgtgtatcgggggtctggaatgcctcaccaaatgccagtcgccacccgatgatctcttttgctggaagaacgccgtgcgccaccatctccttcagattgtcttccgtcacatcggagggcgcccactgactctcgaagctttctctttcttccgccatgaatgtgaactggatggtctgatttagttcgagatacggctagaaagggatggggaatcggagcggtggatgcggggagaaatttcgtgaagtttttgagggtggattggagcggattgatgaaccctagtttgcccggcgcagttttgcactgtagcaggaaatagggaaaatggtgagagtctcggcggggaagacgaagagacgtttttcacttcggtattattagggtatcgggagtattaatgggcctgggcctgtacagtacttcagcccaatactataatcagcgtggcctgttgtgatctctagggacttaggcactttttgctttggcaatctgtgttcacgatggtgtggcccaatgctgttaaaatcctttttaacgcgattcactaattctttggaattattatgatgcacataaaaaggtg

SEQ ID NO: 19237 - DNA, 5177 bp, Oryza sativa
ctgacactgttctcttgtggctggtgatcttagagcaggggaaagaggacatggtgttgctgattgaggtaacaaatgatcaatatggtggtcgactcaggccatcagttcaaggatgcccatatggaggcgatgctgagggggacaattcatatttgaggtcgtttaggtatccaaatatgtgctacaatacgtgttggtatctatttggatatatctttagtatatgattgttttttttttcaaatgccttcggatggaaagaaattttcatatcagagttgtagattccgatgtacatcattgtaatggacaattttcatatttaagataatcgatagtgtacacattatatgttttggatagggagattaaaaaaaatagaatttattatagtcaagaagtgctttacatgtgagattgtaacaacgctacttaaggagtcctttggcaagtcaaaggatgatatcaacgcctccaagagcgtgtattagccaaatcaaatctaggtcaaagtatagtcacaggaaacagggttgaagggccgaaggcagcattccttgacccagaaaagatatatccccatcccaggaacgagaggacattatcgttaccacatcataaacctctcgcaattagcgtatcacactactacagaaaacacatacagttcaatactatatgtgccggaacagttaaaaccaataactacagatctcttcccacctttgcatggtgaaaaaaataaaataaaatcgacaccttttaccaactataggtgttagttctaaagaaaaaccagcaccaacacttttaagtcccatttttttaacaaaacggtacctatatatgtaggggttaaaagtgtcagtttataaaataaccaacactttaatgcagccgagccgagcggagagagagcgagtgaggaatccttttctcctccccatcttttctgcgtctcccccacccctcattctcttccgcgtcttccggttgtacgtataacaaggcttgtctaaaagaagcaaatgattaataaaattatatgtgggtaattctatttgatgatttcgcttgaattaatataaatgtgtgctttattctctatgaaatttaaagttagtactataaataggtaggttggtccactgtttatggcggagctcacctagctagctattccacaaataactggcacctcttaaaggaaaaattcagagagaaagattagcaagaagggatgaatgttttcttgtatccacgatctacagtgcttatctgtacagccacgggcaatattacggttcatgggaatgggaggcattggacttcttctgatatgttgtatgtgtacaaagagggttgttcatgcagtttgtttgtatgtttgggactaatatatctaacttactgtgcatttttctgaataagtgatctcaaatgagaagagaacacccggaggtgaattgttggtccactacactggacagggtcacctgtgacgggcccaaaccctcacctttaacggctttggatttggtcagtgatcagtggtcactggtgagtccagtcacctttgacgggtggaggaccgtcactaatgacagtcacctctgatgggctagaactctacggcccgtcagaggtaagtgtctgcgctaatccatgccattttgcaacccgtcacagatgactcacctgtgacggctcggagagtaaaaaccgttacaggtgtgtcacgtgtgacggcatgtatgtgcaaagccgtcactggtatagttacctgtgacggctttttcaatatgaaccgttagtgaggaggtacatccagaaaaaaaaaatttctaaatattggctagccctaggatttgctagccaatatttagaaattatatatcagcagcagcacaaaatatatccatcacaaattagccagaatataacctaaatttctcatcaacaatatatccatcaacctaatttgcataacaaaatttccctgcatttccaaatatatcacatatattcccaaattccaaatctatcacccatgacagtaagggacaaatccatcacacacatgagcaaatttttctaaggggaggagggaagaagggggagaggggtgtacctctgcgttgggccatcctcctctcctccacatccgccttgccgccgcgcaccgctgcccctctttacctcgccgccgcaccgtgccactgtcgctgcaagaatcatcggatctagaaattagagaagggggaggagaggagaaagaagggggaggaggatggggatggatgcggcgccgccagatccggtggttggggctgggatccgcccatgagctccagatcccgccggcgcatgcaatctcccggcgaaggctggccctcgagaagaacggctcgcggtggagaagccagcctccaccttgcctccttcgacccttccctcgcgccgcgccactgccgggctgccgcccctatgcctcccctccagcccctgccggatgtggaggaggggagggcgccaccgccaccgggccgccgcgcctcccctcccgccactgccgggccgccgcgcctcccctcccgccactgccggaccgctgcccctgcgcctccctcctgctcctgccggatctggaggaggggagggtgtcgccgcccctgtcggaccggcgccgccaccgcgcctcccctcccgcccagctgcagaacaatcgagagggagagggagagggagagggagagcgagtggagagggagagaagaatcgagagaagtggagaaccggtcttatctcctctaggtgtctgccccgttgggagaaaatcgagagaagtagtggagaagccggccttacctcacctttgacggccatccgggttgcgatccgtcacaggtgactagtcacctgtgatgggttgaaaatgaaacccgtcataggtgaggtttacaccaccttcgacggtttccacttccggcccgtcacagatgactagttacctgtgacgggccgtggccggatggctcaccgatgacggcatcccgtaggacccgtcaaaggtgaccttcatcagtgaccgttttctttgcccgtcagagatatgccgtcagaggtgtgaggatctggcgtagtggtcttgcttgaaagtgtttatggattaattgatctcgaaatgcgtgtgcattgtttcctactagcacatttgaagatagcactgtacagtgtttatgaaattgctgtgtggttggtcacgtatggtgtgcagtgtttatgacagagttccacggctatttcataaaagcaggcattaatattttattaacaagagaggttttacattgtttgcattttaaaaataaaagtaaacatctaacgctccacagtaaaagataccattaagaggtatttaaaacctagcacatgtacttaggtagttagggtaaaataataattgttctaggagattgagaagggtttaattgtttttagtattagttctagctacataggtacctatcggtaattgtacttgtcttgtcttatcttgttatttacgtgttcgtttttgagatttatatttcttcgtaagaacatgttcacaggtaatcctccgttacattatttaaatgttttgtagaattaattatttatcaggatttacttctccctctatttttttctagtaaactaattcaaactctagaataggaatgaaatgatgtgggagaaaagaaagaagatacaatctgatttttttggtgtgtagatccaatcggtgcttaggaatatttacattttctctaatgtacatgcagtaccgttcaatggagccaggtatccaattcgacaataatgccaatatttcattagttaattactccgctatcaatatatactataatttctatttcatatcttgcccctctacagatgaactgttcatattactccacctctcaatatccctaaatatctcgtgaacaccatagaatctgtcgactatatatataggtcagggcatcaaacaaaaattgcttcaactgcagaggtagctctggttgagagagcgggaaacgtaaaattggcaagaaaattaaaggttgtgctcttattcaagcctgcattcacaggaaactagtgatttttcattttttattgcccgaaagtagtctagaacaactttggtgaacaataatttatacacgctcccttgtgctttagattacaataagaggctcgacatctcggcatctgctaggttcctcgtttgtaaccctgcctctaacctatataagatgggtagggagccctcgaagaacatgagcacagagatttacaaccagatcatcagatctatactatacctgttgaaacaatatttcagcaatataaaggggtaacgcacaagacctaaaagtggatggatgcggagacaaggatttaaacaggttcaggccctttcgatgagaagtaataccctactcttgtttgaggatttgaatccgccgggtatattatagatctgacgatttagttgtgaatcatctgcccctagaggcctccttcccaccttatataagatggggggcagtattacaaaatagaaaccttaaccaatacggtatcagtttcctaaatctactttataatattatcaaatcaggactttaggccgttccataatatacaaggaaacgtaatacccaagtcatgatccgttacatatttcataaaaataagttatcccctataaccagtcggataaccatgccgtgtgggtattgtcagggttacgggttaggtataccctttaccctttgatatacgtcacatatcgatatggcatgtccacgtgtttatgaacgatcctctacctacatggaggaaatccttcatggagttacagatggaaagaatcctactcggacaagactgggtcgtcaatgtatcgtgtagggtccgatgtctccgagttctacttggaaaccgcctgacctgcgatataaaagggaccccctgagaggacctaaggcatcgaatctcatagccaacacaaccaccacagcctatgaagtcggagcttgcaggagccaaatcgccaggagatctagtcgaaccaactcgattacgatctcgtcggtttcatcgagttccatcgttcc

SEQ ID NO: 19238 - DNA, 8757 bp, Oryza sativa
agatgaagacaaggaacaagaaacgctggtctcagatcgattcgttggcataatcgacatcgattcccacgaaccatcagttctgcatctactcgaggactatgtctcatcgccaacaagtacgccacgcgaggtattagctatcgacgggaccagcacatcagcacacgctaatgcggaagcgcaaaatcaagtgactacaccggcccagcacctcaggaccatcaacgcaatactgagggagaccccctacgatcccgttctaaacgatgatctcacacagtggacagagcggctacgggagtcagtaaccaacctcaacaatgctttcgaagagaccgccgctgcagcgcacccgaaacagccaccaactggtggtatcaatggcgaaaatctcgaacagcgggaatcaccccatcgagctacccctccacctcgcggcgctggcgatctacgcgaccacctcaatggccaccgagaggcacgacgcacacgagacaacgggaatcgctcccagcatcgcgtctcttcacgacatcgcgataatgaagaacgagagggccgctctaacgaagaccgagaccgtgctaatcaccacaatcgccgcgatcatgatgatcgcgaaaggcggacgcagggcgatactggtcgaggacaccgccataacgacgaaaacgacagagaacggcgccgggacaacaacggaggccgacgacaggattctcgagaacccagccgacgacctcgtaatcctacaccggaaccaagcgatccatcgtcatcgtcgtcttcttcttcatcctcatcgtcagacagacatccacgaaggacacacgatcgccgacaacccaccgccccccaccgctgggtgtggagctttcagtcgttccctgcgtgatgtccgatggcctgagagattccgacccagagcaatagagaagtacgatgggagtaccgacccagaagaattccttcaagtctactccacagtactctacgctgccggagcagacgacaacgcgttggcgaattatttgccaagtacgttaaaaggctctgcacgttcatggctgatgcatctcccaccctactcgatttcttcatgggcagacctgtggcagcagttcgtcgccaacttccaaggaacttacaagcgccacgcgatcgaggacgacctacatgcgttgacatagaactcgagtgaatccttgagggaatatgttcggcgctttaacgagtgcagaaatacaatccccgaaatcaccgacgcttctgtaattcgcgccttcaagtccggtgtcagagatcgctataccacccaggagttggcgacaagacacatcacaactactcggagattattcgagattgttgagtgatgcgcccacgcagacgatgcgctgagacgcaagaacgataagccgaaaaccgggggagagaagaaaccagccacggacgcacctgagtcaagcaagaagaaaaatcgcaaaagtgggaaaaagaaagctcaagcggaagttctcgcagcagaatacgcgaacccacccaagcgcccagacccacaaggtagctaggcgaagaaagcatggtgccccatacacaagacggacatacattctttggaagattgccttgttttcaaaaagtcgctcgagaagcacatggcatcggaaaaaggcaagcgagtacacgtggtcgagaaggatgcggaggcggctgctcaggaatcggactcagcatatccagactctgacctccacgtttcacacattttcggaggctccacagcgtactcctcaaagcgagaatacaagaaagtggaacgtgaagtctgttcgacatggcagggggctgcacccaagatgaagtggtccgaacagaagatagaatttttggaagaagaccatcccaagactgccgtcatcgtcgaacccactattcggaacatcaaggtcgcgtgggttcttatcgacggtggtagctcaatcaaccttctcttcgccagcaccttggatgcgatgggaaacccacaaagcgagatgacacccaccgatcagcccttccacggaattactccccagtcctcgtccaaacaaacaacttccgaacggagtagatcatctttgatgtcgctgaattcgatacagcgtataatgccatcatcggcagaactgcacttgcgaagttcatggctgcatctcactacgcgtatcaagtgcttaagatgccgggaccgaagggaacaatcactattcaagggaacgcaagctagcggtacaatgcgacaagcggagcctcgacatggtcaagcaaacgcccaacctacccgccacaactgagcctcccaagaaaatgagcaagacaaacaagacgccgaaaccggacggcgcgatcaagatcgttccactctcttgtgccaaccccgacaagaccgtcaagatcggggcatcactaagcgagaaatagtaaatcgcgctcatcaccttcctccgcgacaatgctgacgtgttcccttggcagccgtccgacatgccgggggtccccagagaggtgattgaacacaaactcatggtgcgatccgatgccaaaccagtaaagcaaaaactgcgtagatttgcaccagaccgaaaacaagccatacgagaaaagctcgacaaacttctcaaagctggctttatcagagaggtactttatccagagtggctagccaatctagtcatggtgcggaaggccaacgggaaatggaggatgtgcgtcgatttcaccgacctcaacaaggcgtgtcccaagaatcacttccctcttccttgaatagatcaactggtggactcaacagccggctgtgagctgttgagcttcctcgacgcttactccggctaccaccaaatcatgatggcgaaagagaacgaagagaagacaacattcatcacgccgttcggggtattttgctatgttaagatgccatttggactgataaccactgggaatactttccagcgcacggtccagggcgcccttagtgaccagctcggcaacaatgtcgaggcatagatcgacgacattgttgtcaagaccaagacaagcgactcattgattgacgatctgcgggaaacgttcgacaacctccgacgatatcgcctcatgctcaatccagagaagtgcacgttcggggtaccgtcgggcaagctgctcagtttcctcgtctctgtgtcacgtcctgataaattcatcccgaaataaaaatcatcttctaaaaggaataatagaattaattaaaattcgaaaagaaattggcaaaccttaaaatacgtacaagaaaaattcaaatgtgacccggagaatttttgttagattctccttggtctaaaaggagccctcaaattttagtggaattttcagagcacaaataataattgagaagaaataaacaaagttgaaaaggttttataaaaagaaaaaccctaaaagaagtcctcttttccccccccttccttcttgggccggctcggcccagtccctccctctctctctctctccccccggcccatcggctcaccgcgcgcgcgcgcgccgctgacaggcgggcccgcccgccactctcgctgacgggtggggcccacctgtcatctccctcctcccgccgcgccgccgcccgcacgtgccctagcgccgccgccgccgcggattccgccgcatcccgtcgtctccgcgcgcattaaagagaggggaatcactccccgtgattccctctcccgtttcccccgattccccctctctctctccctcggattcgttcgaatcgtgcccgcattcgtcgccggcgcaatcaatggcggccgaaatccccgcggccggtttccttcctcctcggccgccttctctcccttccgacgctataaaatcgttgcccgagctccgctcttccgtttccgccgctcgccgctcgctctcgccgtcggatccgtgctcgcgccgtgctccgctctctccgccatcgccgccgagctccgttccgccgccgccgccgctccggacttcctccttactcggcgacccctccgtccgcttcgccgcgtcgccgtcgaccccgtccgccgctccgcttcgcccgtcgaccgtcggagcgccgccgtcatcgtcatcccgaaccgcgccgccgtcttcttccgctccggccgccgttctcgtcgtcgtcgttgtcccggggtgagccgaagaccgccgttcgctttcccccttccctcctctctctcgggcgccgctccgccgcgccggtggtcgccggcggtgaccatcggggcgcgggcgcgccgctcccgtcggccgtgccggcgaggccgcccttgggcgcgccctcgcggctgccaagtgggcccggccgtcagccgcccgcgcccgcgggtgcggctgacgcgcgggacccacggcgccgaccgccgccagccgcgtgcgcccggtccaccgtggaccgagcggctgacgcgtgggccccacccccgtggacccggtccgcgcgtcccctccctcggctgacgcaataaatgggttttttaattaaaatttaaatgaagaaattcgtaaatatccatttaaagagcatataaacttcaaatggccatatcttggccatttgaactcggaattggaccgttcaagtctctaatttttccttaagatgtaaagaacccatttttgtgctttgtttctgctgttatgtggagttatttagtgttaaagcctttttcttttccgttggtcgtgtagacgctgcagcttcggaagatccgctcttcgtggaagtcgaagccgtcgattgggaaaacgagcaaggcaagacacatcatcttgatcatattgaatcccattttataaaattatgttgatttaaattattgcattatcgctttatttaaattcccgcgttatcactgttttatttagccatgcctatttacctttgttatgaccatattattattgttattgttattattattaccttgttcaccctagacaaacaaaacctcaactagtggacactctactcatggtatccctagtataattttaggtagatgcttcgcaatttaattaggcaacattaggtggttttataactttagacttgggaaattctcatatcatttggacaccatggaatggttggcttatgttggaattggacacacacctctcttcctctttcaaaacccctaaaacctgttttcggtggggtttgggtgcatgccagttgtgggaagtagcaccccggccactataaggactaaagctcgggcctctgttgcaaagcactaccgtacttccacatgtctaatgggtaaggcttagtttgtggctcagtctagtcataaacaaaagtacacggattggagatggatgaagtcgggcgtcgatggacattctccagggcaaatgaaggctacacgagctgcggcccggtagtcgagatgtcatacggcggagggttggtgcccaatgctaggggctcagttctgcctgcctgtcccgggtatcccggccgtaggtaggattgggtcggtactcttgtctaaggctaggatgggttggaaactatgtcacgtcttccgtccgtataccgtggtggtatgtggcacgtggcaacacgtgaggaagatgtgtcttgtgggtaaagatgtacacctctgatcagagtaaatctattcgaatagccgagccctcggatatgggcaagcctagcaatgtacccaagtcagtgttttaattcttaaaatttgctcaacaactaaaatatggaatggttggcctgggttggcttgggacgagctggaacccaggtcgggttgccagttcggtccgaatcatcgtaggccttgggttaaggcaggttcgtgagggttcacggccttgtttaataatattgtgtagttctaagatcgtgtttacaaaatagccctgagcaactaaatgtcttttaaatgctgtttactgcaaaacttaatccctatattattattcccttgtacctcccttgcattaattatgcatccgccggtgtggcttgctgagtactgtggttgtactcattcttgctcaatccttcccctcttcagtaagagaagctttggagaagatgtcttaggtggagtcctggcttataccccagttgagcgcctgtgaagatggagccgtaggcccgctagtccgctgctgtttatttttgattgtcaggcctgaagcgcctttgtaataatgtaaatattatcgatataataaagatgtgtcttttatatcatgtttgtgtggtgtaccccggcttttcctgggacggggattaatacactagcgttcgggaaaaggcaattttcccggtcgcgacaagctggtatcagagccatctcgactgtaggataagccaaatggataaaacctaaggacatattttataaataaaattatttgcgaaagttcctctttttctccttcccctaatgctatttgcaaaaagtttactcttttctttcttcggatttcaactaagtactagatggtcagcttggcgaagaagaagatgtcgtcagttgtttgccgaagctccagaagactgcaggatccgctagcgaagcgaaggaagcagtgaagccagctgtgaagcaggagtgaagatcttggagaacccgtcgcagaacctaagccaccctctagtgtttcgtttgtcgtgtgtttccttgcttgtgtgtgtagcgcgtggtttgcatcggtgggttgtgatgtaaccatgctaggttgtttgcttaatcaacttgcagaataagcctaacatacatcataacagtaaaagacttagatctgttaaggtcctatccttagtttctaatctgtctctcccctttgttttccctctctccccctccaaacctttgcaacagatggctgacaatgagaaaggcaataaggtcagaagtcaggacattggtacctcaagctcccgagtgaatgaagcaccagacaccagttgtgtgacactagtccaacacctgattaaccagaaccgattgcttatagagatactacagcaacaccagacgccaattctgaatttgagtcaaatacaacctcaagtgcagttggaggcagtccaagcactcacaccacaagtcagcgcaccgccaacatcccagaaggcccctcatgccatgccacatgttgacccaaaagaagcaagtatcatctgttttatgtgtgatgagcaagggcactatgcaaggaactgtcctcagcagaaaagaaaagcaccaatgcgaaccgaagatgaagtccgtaagatggtcattaccagcacagaatggcctccaccaggaatgacaaaacgtcagagaaggaattccttccgaggtgcacaacagttgacagagcatcttttagctaatggaggtagagtgtctggtagtgaagattcagatcaagtctcctcagatgaggaagatgagaagtctccccaaggtttcaaccagaataaaatagaacttaaggcatgctctcgttgtggagaaatcggtcatgttgccagctcgtgtgcctctacatgcgttcattgtgaggaagaccatccacccaataggtgtccaacgagcaggatcacttgtttcttttgtgaaggaactgatcatgtaccaaaagattgtcgattcagttttctgctgacgaagaagatggccaaccaacacgcccgttccaacggagagaagcatcaaggaaacacaaatcctcgccaagattacagtttcagcctaactccagtgccaggacagaggaaacaaaatgagaaaagaaaatgccgagtccgggaagacatctgttgcttcaattgtcaaggaatgggtcatttcgccgacaagtgcccaaaaccgagaaacatagctgccggcacgtcagtccacgcgactccctgcaaccagaagcttgctcctcaacgaattgtcatccatacatcccgaagcagtcctatagcccgcgttgcaacagctccaactccaatgagtgcactaccacaaggtgtcaatgctcaatttcagccccagccaccagctgacaagacagaggccagtatctgcgttgtacctttggaagttccaatacagcagctgagaaatcaagtacaagatgaagaacccgagtgtaagaaagttattgtttgttacaactgcagtgaagaagggcattactccgaaaactgtccccaaccaaggcaaaatcgacctccacattaccgccaatttacacgaagcagacattccaatcgtattgtggtcactggagcaaacgccgtacccgtaaggcctcgtgataatcagaacccatagcagaaacaatgcaccaatgctcctcctgctgcacctgactcggcaataaatcatagcaaccactctctgcatcgacagcctcagcaaagaattgtcgtagatggaagaagttgtgtctctccccgacctactccaggccgagccaagggcaatcaacatccggagggcgataccaagcagaagaccgtcatccgcttcagaaggaagcttctcctgtgaatgatagcattatgcagtcctatcacatcatcacagaaccaatcaaggatgcagtcactagaacaatgccagctatatctccccagaatcaaaatgagcagccatgtttgtggttttcagttcgctacttatcatggtgtaatcgaaagtttgcagcaatcatgtaattcataaa

SEQ ID NO: 19239 - DNA, 9138 bp, Oryza sativa
tagttctaagatcgtgtttacaaaatagccctgagcaactaaatgtcttttaaatgctgtttactgcaaaacttaatccctatattattattcccttgtacctcccttgcattaattatgcatccgccggtgtggcttgctgagtactgtggttgtactcattcttgctcaatccttcccctcttcagtaagagaagctttggagaagatgtcttagggggagtcctggcttataccccagttgagcgcctgtgaagatggagccgtaggcccgctagtccgctgctgtttatttttgattgtcaggcctgaagcgcctttgtaataatgtaaatattatcgatataataaagatgtgtcttttatatcatgtttgtgtggtgtaccccggcttttcctgggacggggattaatacactagcgttcgggaaaaggcaattttcccggtcgcgacactctggcagaggaatagaagcaaatcccaagaatatcaaggcaatcgagaacatgaagtcacccacaagactcaaggaagtacaaaagctaaccggatgcatggtagcattaagctggttcgtcgctaggatgggagaacgaggacaacctttcttcaccctgttgaagaagtaagataaatttgtatggacacaggaagccgaagaggcattcattgcactcaagcgctacctatcgaacccccctgtacttgttgctccccaacctgatgaagaattatttctctatattgccaccatgccatattccgttagcaccgtcattgtcgtcgagagagagaaagtgcaacaaccagtctactacgtcagcgaagctctccatgacgcaaagacaagatatccacagatccaaaagctgctttacgcggtaatcatgacatcaagaaagctgcgccactactttcaagcccacagagtcacagttgtctcctccttccctctcggtgaagttgtgagaaacaaagacgttgttggccgcattgcgaaatgggtagtcgagctaagccagtttgatgtccactttgtgccatgaacagccatcaagtcccaggtactcgccgacttcgtagctgattggactatgcctgataacaaatcagacaaccaaatcaacaacgaaacgtgtacaatggcgttccatggtgcactcaatagccaaggagtaggggcaggattcatcttgacatctccttccggagatcaattcaagcacacaatccacctcaacttcagggcgaccaatgacacagccgagtacgaaggactactcgccgggataagagctgcaaccacacttggggtcaagcgactgatcgtgaaaggggactccgagctagtcgcgaaccaggtgcacaaagattataaatgctctaacccagagttatccaagtacctcgcagaagtcaggaagctagaataaaggttcgatgggatcgaggtccgacacgtataccgcaaggacaacatcgagccagatgacctagcacgacgtgcgtgcagacgagaaccactcgagcccggcacttttctggacacctgacaaagccatcagtgaaagaggttagctgcgaaattgacccagccgcccccgacatcagctcggaggccacagaggcagaacgcgccgttgctgatatcgagaacacagacgactggcgtaccccactgatcaaattcatcaacagcgaagagttgcccgaggatgacgcagaggctgagaaaataacccgtaaacaaaaatctactgcatgattggcaacaatctatacaagaaagcgccaaacggggtacttctcaaatgcgtctcgtccgacgacagcagacacctcctccttgatatacatgaaggcacctgtgggtcacatgccaaccgccctcaaagatacatgcgatatggtccagcggtgtgaagcctatcaattccacagcaaacacacaaagctacctacacatgcgctccagaccatccctctcacttggccgttcttgtgctgggggctagatatactcgggccatttccacgaggacagggcggctacaggttcctattcgtggcgatcgacaaattcactaaatggatcgaagcggtgcccacgggggaaatcaaggccgacaacgccatcaaattcatcaaagggatattttgcagatacggactactgcatcgcatcatcaccgacaacggctcccagttcatcagcgccgatttccaggattactgcatcgggctgggagtcaagatatgcttcgcctcggtttctcgtcctcaaagcaacggacaagtcgagagggcaaacggcatagtactacaagggatcaagacccgtgtctacgacaggctcatgtcatatgacaagaaatgggtcgaagaactcccatcagtactatgggtcgtacgcaccacaccgacaatgtctaacaaggaaacacccttcttcctcgtgtacggctccgaggccatgctccccagcgagctacgacatcaaagtacacgagtacagaggtattcctatggggatcaggaggaacagcgaaacgacgatgtgaatctactcgaggaaaatcgcaaacaagttgccgtccgagtagccagttaccaacaggccctccgccccacgagaagcgcatccgagcacgcatgctttcgatcggcgactacgtcctccgacgggttcaaagccaagcagggcgaaacaagctctcacccaaatgggaaggaccctacacgatcagacaagtcctgtggccaggcgcattcaaaattgcagacggcgatggccgtgagttggcaaattcttggaacattgaccaactacgtaatttctttgtatgagtcaatatcatccatacctgtaagacaccttacagcatcaataaagcctattttcaggcgcatattacaatcacagtgttccaacccgatgatcccttacccagatgacacctagcgttgaaacctatcctcatgtccctttacgccaccctgacaaggcctccgaggaacctaagggatcttcggctggggacgcccagagccgataaggccttgtcagatcctgtagagacgaaagactatgtatgacctggtcgtgtaagagttctcgccgtgcgtattaaccaagccgtataatcagaaattaactttccaactttacggctgggggctaggatcaatgctttttcaaccgaggcaggtcaaaggtccaagagccttgtcctccgagaagaattctccgacgacaaggctgggggctagggagagtgtaccactcaaacgactagccaaagtcgggaactgaggaggcgctcttacacactacatcgagagtaagaaggattgatcaagatagatttcttttctatttcacaagatacttcttacaattttatacatgtccaaaactatattacactttttccctaagatatctataacagggtacaaagactaccaggaaggccaatgccagtccatagactggaaaactttctccgccagcggtgccatcgacttcgctaggtggtctatctccgctggagtcccccgagaacgagcgaacccttcatggagaaactcgaggtgcagttcggacgatgatctcgtatgcaagccaacacgtgccctccaacatatcggctcgatcgacggcattcctgtttcagggctccgtcaatgcgcttgacgacgccttcgagctgagtacaggccccattcagccacgagatgtatccggccgccgactcctcgggatttccacgcggtactcggagctccctacaaatttcggccatggacgtgcagcaactcttcaagtacgagttgaaccacacctcatgacctcggagtgtttccacagcctgctccttcttcacttccagcatagttctctcaagtttcgctacttcaaatttcgtcttccaatattggatacgacgatcttggtcagtaagcgcactctcgagatctgtttagcatgaaagcgattaagtcaagatgctcttctctttcgggaacacagctaatcaagtcggaaggagcaaaagggataaagagaccaccaacctaaggaagtcgtcgccacccccgttgtcgagggtaaaatctcatctacatcgtccggcgacgcgtgtgcctcaaacgcgagagccggaatgatcgctggcgccacaggctgcccacgctgctggacatcctcgacatcgacatctctacaaaggacaacaaatactcgggatcaaaaatgctggggaaaactgaagtgacgaccgcacacgcgaaaaggttgagaacaacaatgtttttacaaagcgtgactggataaaaggtacaggggaactaagatcctactcttcaaagagcgggagaacagactctcccagatcgccgacttcctccatcacgcctctacacgcgtcgttcgtcgccccctgctccaagatccgctagagatcaagttccggatgcgccaacctgacacacgcgaggacgtgacatgccccggtgtagatcccgttggacgcctcctccccgatcctggccgtgtgcttggaggatatcgcctccatcgccgtagccagttcctcgagcaaagacgtcagcgagaacttgtcggggttcaccgggatcgtggtcttgacaccacattccccggcgagctggtgtaggccagtgtaggtgactcgcaacaagccacggagctccgataggttgctctcgagttctgccatacggccctcgagaccccgccgctgtcgctcgttgccggccaccagctccctcatcttctggaggtcctcgcgaacctccgccagtttacgctccagcttgtcggcgcgcttgttggccgacgacgccgccgctgtcctcgcctcggcaatctcgcgacttatgccacgagcaccagcttcgaggaggcgccccatctcgacttggagctcccccctgctgaggacatcggcaggcgggccgcgaacaggcccgagatcaccggccaggcagtggggcgtcgccttccgacttcgtggggcgaccacgacgtccgtggaggccaccgcaggagacgcgctggaggtctcaccagacccatcttgtgccgccttcgcccgcgcccacctatagaagattattgcatccgaatatcaagactagtcgccagatcttcaaaacaaggaaatacatcaatcctcgtctacttacttctcgcctagcgtcaccagcttttgtcgtcgaggaggtggcggagacgcgtccgacgcctgagtaaaccaagggcgatttgagggggacattttccgactacaaggttaacggcgcaggaaacctaccagtacggaggtgaactttcttcccctcctctgggggcggctcccactactcgcggcaacagcagtggccgcatcggacgtctcctggacgactcgctccttcaacgaggccgccgcctgatggtccacgagcggtccaatgacgtcagtcagagggagagcctacactgcatgaaatcattattcgatccaggagcaaaagtaaagggattgccgaatacactcacgttgatcaccgcttcacgctcggttgcctccttctcacaaaggggaacggggatgtcgcctgccattgtcgggccgctgatcatcagttggccaacgcagcgctccaccgttttgctgttcaagcctgcaagtcatgaaccggaattcggtaagccaggaggagcatgcacataaggaggtcaaatcaaatacaagaaaaataccccgaggagaaacccgggtcatctcctccagcccagaatagtcaaaggctggatgggcttgagcctggagcggctggattcgcctaccaacgaagtcggcagcgacttcataccccgacaaacctcgcactcggaggtcatcgatggccttgacgaaggaccgaagggcaggggtcaaggtaggctttgcggtccaagacaaaatcttgtctggttgttcctcgggaacaacaaagataaaatccgaattctctatctgaagatagaaccaccttgcccgccatttgctacgagaagaagggcactggaaggggatataacgcgacttcaggccatcccgaagtcggaatccgacgcatccagacaccctgttggattccatccaacgcaattcatagtaaaagcagaaaagatcaagaaagggctctaccccaatgtaggtctcacaaaggtgtgcaaagatactaaggaaggcaatggaattggggttcaaatggagcaaagaaaggctgtagaagttcaagaccaagagaagaaattcagaaagtggagggagaaaacgacaaagaatgtagtcctcgatcgcaaccatgcgaccaaggacaggctggggttcagtacctcctacttctctctccatggctccacgaccgggaagggcgccgtcctcctagagcttcttcagtgacgcgttggtggaggtagacttgccgagatccatcgccgactggagatcgctggagaaaggagggagattaacaagctagggttttttgcgggagctgagaagacgagaggcgcttggaggctggaaagttttttcacaacaggcagacttcaaaatgaatccccaaaactcccttaaatagacgcacttccaacggtgcgaattgcaaggaaaggagagagatagccgccggaaatttctaggtccgttacgcgcggcagtcttccggacttcagtttaaattcactcaagaccgttgagcttcacatggtattcttgactacgtcccgtctctgcggttctcacaccgagaacgacgacagcctcgacaccagaagtcgcgaattggttacacgagttcatttaagcagaagtcgggggctactgtcagggttacgggttaggtataccctttacccttcgatatacatcacatatcgatatggcatgcccacgcgtttatggacgatcctctgcctacatggagcaaatccttcatggagtttacagatggaaagaatcctactcggacaagactgggtcatcaatgtatcgtgtagggtccgatgtctccgagttctatttggaaaccgcctgacctgcgatataaaagggcccccctgagaggacctaaggcatcgaatctcatagccaacacaaccaccacaacctacgaagtcagagcctgtaggagccaaattgccgggagatctagtcgaaccaactcgattacgatctcgtcggtttcatcgagttccttcgttccctttgtaacctgtgatttccgtcatataattccatatcaactggattagggctattacctgttaatgggcctgaaccagtataatcttcgtcttctgtttgcttgatgtcgtattacgtagatctttgtaccaacgtaccccaataccctctatatccggtctacgggtatcacccgtcgacaggtatggggtacccataatctgcacagtagcccctgagaccttcacagtcgaaaagataatcttctctcgaacctgattactccaaagccgagtgcttcaatcatctttgccattgtctcccgagtacttttaccaaatctgaagactgcggaggtctgaaaaataaagtcaggtgcatcgactagatgcacctaataggtgtagcccccgactatgtggttagttgaacaaactaagcatatagtcaaggaataaataatccaaccaaccaagtggttttgataatcgtagtcaaccaagtgacttaatattaatatatagcatatgcggtatgaatcccgaataacatgatccgagtgatataccgactgctttgtaaaatatgatgccagcaacctaaagttgtgtacatcatgaaaaattcacatagcaaaacagctataaaaaaagcttgtatgctatgaataaagaaatttccaaagtattgggcatacagcatgcgcacactactttaacaaatgtgcttaattccctaaaagacacacggtttcaccacacccagaaatatacagcatacgtggtgtaaaatcggagtaaataaactcataaaggatttaccaaccgcctaaaaaatgaccaaacatataattagcctaagctataatattggtcaataaatatgcacaattacatggcaaaaaagcaacgatattgtatccaatcaagtttttgataaacccaaacagcgccttgactatataaaaaagtcagcggggcagcaatgaaaaacttcactgttgggcaccttttaaaatgcattgtaccaactcctaaaaagttgagtaactgcggtataaaatgattttaaggtattgggcacgtaatcacgtgcacttttgcctaagcaaaaaatgcttaagtccctaaaagaacgtgacaggccacacctgaaaatatgggctgcagacacattaggcctagacctaaaatatgtctaccgatacccttaaaatatgacgtatagaacacgtcaattaatatgatcccaagtgataaatatcctgggttatgtagatcaatcataattatccctcatggagaataccaaaggagatatgataattgaatcccgactggcgcaagcactcagctgatggccctcatggggaataatgaatagtctaatctttgagcataggaaatcgactcatgactataaattcatgatgcacttattcagaagaagtccaaactgaaaaatatgatccttgtgcttgagctagtaagcctctaagcgtatagcttgtccttctgttgtagtcaaaattgtccatcgaaggtaactgagacaatcagcatagaaacgagatgaccaacatgaagatgatatcacccatcaaagctggcgaagatgttggtagtggtaaaaaaatatcaccaatcaaaggtgatgaagtcgcatagccatggaggcgaagaaaccagtcggcaacagacaattcagccagcagtgtagacatggcagcgaaataatcagtcgataacaaacgaggcgctcggtgaagaagacgaagacgcacatcagcagaggcataataagccagccgtgaaagtgaagacaccatgggcggcggcggaggcaagccagtgtgaagacatagatactcatcaatggcaatggcgaaatcca

SEQ ID NO: 19240 - DNA, 1603 bp, Oryza sativa
ttttacggtggcaacgttaattttgatagcactattctaaaattttagtcctctttgaatcgataagcaatgagaaaaaataaacatgaatagtgtaacagtgcccccctgccaacttgcgcaagttgaaagagggagattttatatttgaaagcacatgctaattaccaacatgatgaatcaaatcagcaacggaacttggctgtcactatgtttattattcaaatcggaacatgcatttcttcatggacaagccaaaaaaaaaaatcttactatcagcctgcaactaattaatcctcttcgtatagtcgaacaacttgggtcttaggtccagcggctcaaagctttcgcgtctttaaaccgcttgcattcatagcgccaaaaacgattcaaatcctgccattagaatttctaatgcccctcattccaacaagctgccagcatcatcatctgcgcagcacacccaattgctcactggtatcccccttcaatctttattcctagctactgttacaagaaaaaagatttgactgactccaaaagcactagctagccgctgcacacacgcgatggccgacgcacactggggtttgtttttttacttatacatagtaccaagcaagcagacacttaataactctcattgttcttgaacacatctcaaccaccagacagctgtttttgctacggagggcctaccatggtataacaattagcatagtagcaccatacatactgcgtgaagattgtgttacatatctcaatataaaaaacaagtgtaactaactaatgtgaaacatgagaacaacttctcacagccacagtgtaatcagagaaccggcccaaacaagctgtgtaggatcgaaacacaagaactaagccatcaagagagaggtaaatggttggtatagctaaaaacccaaactttcagcggaaataaaagttaccctcaaattcgatggatcgcggtctgaccgaaagtgtcgcgtcggtctgaccgtctggaagccgtcgttctgaccggaattgatcgctcggtccaaccacctaaagatcgcctctgcctcctgtcatcctcgtaggtctgaccgcaggtctgccactggtctgaccgccgcctagccgccggtctgaccatcggtgagttgccggttagaccgccgaacccgacgaaacacaaatcgaagaactctcaaagtagatgataactttattacttctctctatgtttacaaagtataacaacatcactccctataaaaatctcgactaaactagaaaccataactaaactatcaactcaatttctcttaaaagcgataccgcgaagcctcacgctccctctctatttatatatgaggtaggcagcctaaagccacgaaccaaactcatactagaagtcctaatccacctaggaaaccttcccgtacaagaaacaaactttacaaactccgatcataccaaatttggactccttccaaattcgaatccgcatcccatacgcacataatacctccatcgtataccatatggaatcttcaccaaccacgtgcactgaactctacccttagtatcccgcatgatatctgaccgtcacggacat

SEQ ID NO: 19241 - DNA, 3143 bp, Oryza sativa
acgctgcaattagaattcctaacgccccacattccaagaaatcgctagcatatgtcatctgcacagaacaagcatgcaatttctcattgatatatatcccctccaatcttcattcctagctactcttacaaggaaaacatgtgctgctgcacgcactgtccatgcataattgtttgcattctacatatgcatatatagtaccaagcagacatacctaacatctctcattgttattgaacacttctcaactacctgcagccaactgttttctatggaggacctactagtgtacatatatacgagttgctctatatattcatttttgtcgttggtatagcaattagcacagtagcaccacaatgtgtcatgacaaaggagattctcttaccgtctcaatatcaaaaacaggtgtagtaattaatatgaaacatgagaagaacttctcatagccacaatgtaataagacaacatacccaaactagcggaggcatgaacttgtagtagtgtactactacatccgtcccaaaaataaaagattttataggttgagacacattccagtactatgaatatgaaaaaggggtctatctatattcattgtactagaatatatcatatctagatctaagtttgttttttgtgtgatggagggagtaagttgtcttccctatcctcaaccatgtctttctcactacaaatattttacgtgcaaacatgctgatatgttgtgctcctcctgttcaattcacgttatttatttatgcaatatttgcgtaactcggttataaatagtactacctccattttttaatagataatgccgttgactttttctcacatgtttgactattcgtcttattcaaaaaatttacgtaattataattattttgttatgagttgttttatcatttatagtactttaagtgtgatttatatcttatatatttgcataaaatttttgaataagatgagtggtcaaatatttgagaaaaagtcaacggcgtcatctattaaaaaacggaggtagtaccatccaccgagcggcgctttttcaagagtttacatttcagtacaatgcacgcatatttaaagatagtcacttctagaatatttccttctgataataaggaacatacatattttgcaaaatgttggaagagatagtgcatctcaacaaattttttttttgcacgaaacagccaaaatcttctgatccaacttaattaaagagacgaagccaacctagattcttagacatagacatagacccaacaatcaaacaaataactaataacttcaatacaaatgcaacaagttctacagttatgtttggcacgggcatcatgcatgttttatgggccgatgtgccgcatggccagcaaacaaatggattgtgcagttgtcatcttcacagcttacttacaacagcaatcttctcgaacagatcatacgaatctatggctgtttaagctttacccattagcagctacaaagagaaaaatctgatgctctgaaccaaccctaacaagataacgatatgaacagacaggctggcttccatctaagtttcactaaagctttctctgtccacacactacaagaatcctgttaatccatgatgaaaaatttccgtcacggatcactgaaaaaccgtcaccaaacaacatctgtgatggtttcagaaatcatcacggattgagcgtcatggattgacctgtgtgacggtttgtcgaaaaccatcacagattaacagaatcggtgacggttttaaaccgtcacgatgaagcccgtggtctagttagtccagccaagcccatttcctgtgatgaaaaataaccgtcacggatagctgccacgtaggatatttctctgtcacagattagctgccacgtaggatatttttccgtcacgaaattgaatcaccacgtatgtgccatgtgttcgccaaggtggacgctgatgtgtcatcgatgccatgtaggatttagcccacgtgttttgtggcccaattcttttccaagagctttcggcccatttatgacctaatggttttttttttgttttgggctgattttttttagtgttttttcggccttttagtcatcattcagcccagctcaaattgggctacagctagattttagcccaacaaaaattcagctgctgctaaatttagcaaatacaaatatttcgtccataattttagcaaaattaattactgatcatcagttgacattctctcatcatcagtaacaaaatagttatagatcagcacataaatattataaaaacacattacaaccttcacatctcatacaacataattttttagcatatctcatacaacataattaaaacctgttcaaaagcacatgacagtacccaacagccaccaaagcattttggccactccatcaaagttcgcatatgtttgagcccagcaacctgatagtacaataccatgtgttagattatttttttatgcgctagagaaacaacaagaaacaatctacagatacgatattagtttttgaatgatagggctactttgcaacaccaatctgatgtccccataatacattgcactaacaaaactcaatgtccccatcaccaacccacctcatttcattggccaagcaagcaagcaactgatgctatagattgaaggaggaaataaatgtggtccttttgcaggacagagcaagaaatccacagtttctgaagcaaagaaacgcaacaaaacagaactatcaaagatctgtgttatgtacaattaatctttaaacatcttagttcaggaatagctctacatatcacacgtactgacaaaaacctctgtacaagaaactaaaaatcaaggcagtgcacaactagttcagagttgttctgagttcagataattcacatccaccaaactatagatagattcacaaacaactaaagtggttagagatatacacagacaaattctactgactagacctgctcatcatggaagcaaaaccaaaaatggcatttacagccataaaacgacactgctagtttggctccttttgcagcttaagaaagttattaagtatatacatcaaacaaatctacttggttcatttgcagattaagaaaatgagcaaggatatacatca

SEQ ID NO: 19242 - DNA, 10820 bp, Oryza sativa
ttcagtgcattcgtagaactgatttcaatctgaaagaaaaaaaaacaaattcagtagtagatacacgtctgggatgcggagaactgtaaagacgggaagaccgctgcaactatgacgaggaagtggatgacgacggccaggacagatgggaggcaggcaggacgtgcttctatttgcactaattcaatctattagaaataagagaaagaagggggaggaggatgggggtaccgtgggatggatctggcgccatcgctcgcctcctcctcgccgcctagcgccgctgcaccagaccaccgccgctcacctcctcctcaccgccgcacgccgtcgagccctcctcactgctgctgctgccagaggagatctctcgcggtcgctgccgaagcggttggcggccatgaggatgcccccgatggcgccgagcaccccgcacgcgaggagagcggccgcgaaggcgatctccatgacgggcgcgccctgggccctcccacggcgctgccgacaaggtcgtcctcgtcggagatggagaaggagtggtccacgtacgccacgcctggctaccctcgcctcctcctctgcctctgcctgtcggtgccggatccgatctatgaactactcttccccacctcctccttccgcgctcgcagcctcgacggcgccgcctccaccagcgataccgccggcagcgggagaaggaggcctacctccgcgtcgaacagcgcgtactcgccgccaaaccatctccgccggaggttgaggaggaagaggatgcagattcagatggggacttggcggcggctagggttggggattgcttcgtttgattttggatcggctagggttggggaacatgggtatgaagcaacaacggatgcgattttacaagaatagccttggtgcatgtactagcttctgatactatttggacaagatggacatttcacgtcaattttggcttgaccgcgcgcagtggcctgaccgcgatgcaaacctgggcggaaaattttggcgcttgccagtatgtttatttttggcaaaaaaaaaaaaaagatcttgtgctactcgtactttttaattttaattcatgagaacttcaaatttaattttaggctgatttttgtgtttcaaatgcaaaaatcataaataacaaaattgtagaacttatcgaaatctacaactattgtattggtcctttttacaaataagttcatttgaacaattccaattttgaattttcaaaatttgacaacttcgaacaaaaattggggtaaataaatgatttcaaatagaaaagtcaccacaaccaaagatgtagaactcatcaagatgcaaaatttttattttggtcatttctccatctgactctatttgtacaatttgaattttgaaattcaaagtttgagaacttcaaatagaattttttattagtgaatgacttcaactgaaaaactcatcaacaacaaagttgtataatccatctagatctacaatttttattttggtcatttattcatccggcatagtgattttaacattgttaataaattttacatatctccaaatatggtttcataaattataagagagatgtatacattttgtgaacaatgttactatcactttgtcggatgaagaaatgaccaaaataaaagttatagatattaatgagttatacaactttgttgttaatgactttttcagttgaaatcatttactatttgaaaatgttgtttgaagttgtcataatttgaaatttaatttgaaattcaaattcaaattattgaaacaaagtcatatagcaaaatgtccaaaccaaaagttgtacatcttgacaagttatacaattttgttgttgacaatgttttcatttgaaatcatttactacccgaataattattgaattgagaggagggatgtaaaatagacttctcagcgagggaggagcagaaggggccggcggcccgaagagagtggaggagagagaggctgcgggctgagggagggagagagtaatacttgggccgaaaaaggcccaagtacagagagaggaattttaattcgtttttcatttattttaataggttaaataaactttatggtattaaaattagttattgcgctccgaaaatttatggaaaatttcagaaaaaaatttagaccacgtagaatattaaaaaaaattgcggcaatgatttttaaagaaaaattttagtttcctcgttaattcacttgattaaattgtttaaacctttaatatattttttctagtaatgcaatatataaatctatgacgtttgcttcaactataataaattatagaatcctaccgtaacacaccagacaactagcgcagtggtaggatgggttatcttcaacaagaggtcatgggtaatttaccaattcgagttctcttttcatttttgaaacgccaactctcgagtgacattgggacaaataaaaatatttaagtgcacattgggacatctagaacaagtggttcaaatggtaagacacgttcctaccttccagctaagttgtgggtccaaatcccacatgctgcagattttacccatgcgcaccatatttttttagtttgccatattatgcatcatatacatgtaacaaattaacaaaattattttgttcaaatttaacaaatcgtattttgggtttgattcttcttgcaatcacattttttatttttctttgcgctaaatatgttttattttttattgctttgggctaactagagtatgacgaatttaaaatcatacattgtgacagtcttgataaaactgtcacaagttagcgggccgtgaatatccactgggctgatccgtgacgaaaaacaaaaatcgtcacgattacgtttgtcagtgacgatctgtaaatccgtcaccgagaatccgtcatggattaacaagtttcttgtagtgacaatagggccggcccggggggggggtggtcagcccgtgcgcaggcccgaggccccccaaatccaggggcccccatggctaatgggccatggcccacgttaccccatatgcatcgctacttcccaggcctaggatcctttcctattgaagacggaagacgaaacgaagaggagcgaaggaaaagcgaagcgatttgactcccgttcccgtcgcctactcgcctcgatcacgcctcctccatcgcctcgatcacgccgctggccgatcgctcatcgctacagatgctacgtcgctcggtcgctgctggctgctgcctgctggggtgagctctcgcctctcggcttctcgtgtcgcaactcgcaaggagacgaggccatcaggccaaccgcgcaacggcgacgcaccctctgccctcatcggctgatcgacgtctcggcgccacgcctgtaggctatagcctgctgcagtgctgctcgaggtaattttctccatcttttttagtttttttcctcttcatagatcaaaatttattagcactcgcactacttaataattcatgattattttttcaacacaacattaatcatgtcgttgagaaaatatgcatcgggtagcgaaaaaaggaaacagaaaaagcgtttgagatgttcaagcatattagagatgtggattgttatcctaatctctccattgcttatcagaatagttctatttgaagttttaaaatgttatatatagataaatttatcacatcgaatattaaatgttgtgtttttatgagactataaatatatatattagtttatgtgtatatatatataaatgggcctcccctggtccgcatagttctgaaaggactgcagtttttaccacgactccatcaatcctatagctgtggaaaacaaaacgttctggctgaagatacactcccacaatgcagtgacattagggaaaagaggaaattcctagtgcttcccattctaacgatgcacaactgtttgagaccggcagtacagatacggatgcagcatttgtaattccaaagaacttcacaggaaaaatatcatgtggcctttttgccttgaatatttcttacacaaaaaccggtgcctactatttatgccaatatacactagccataaactgcgcagcaagaacccataaaacttcttatgcatagtttagtactacctccatccccgaatatttgcatttcactattaaaattttgtaaaaaaatgttatttctattgagatgggacctaataaattaattagattgatatactaattccctcacccttgttattagtcaagtttgcaagtatgtaatgtgtgcgtgcagtgtggtcatttatatgtggtgctaatctgtatgtaatatcctagaaatgcaattattcttggacatagatagtataatctttcaatttcacacctaataaactataattcaaaccacatctttcaaacagaattaatagcataaaaattttgttccaccaaaaataaagaaacaattaataccaacatatttattttctcaatcttacgcgtcatatttttttccacgataaaataagattcaactttcacatctccacgatgaccttacccgtggcatggccgcccatgctcttctcccacgcctccgccgccttctcgaacggacaccgcgagtcgaccaccgtcctgagcttcccttctccgacgagctccatcagaaacctcatctcctccttccccagcgacatgagggccatcatggttatcttcttcctggcaaacatggtcagcatcgccgcgacgtagttcccggggtttggtgttatgtccaccaccctaccacggctgctcagggtcggcttcatcgccgaccagttgacgttcatggcggtgttgatgatgtagtcgtacttctcgtcggaggccgagctcgtcagggcggcgccttggggggtattgtagtcgaggacctcgtcggcgccgagggagcggacgaggtccatgttgcgggcgccgcaggtggcggtgacgcggtggttgccgagcttggcgagctggacggcgtaggtgccgacgccgccggaggcagcggtgatcagcacgttggcgccggtgccgccggtgccgtcgaatttggtcccgatggacatgagggccttgagagctgtgaggcctgcgaccggcagcccggccgcgtcgacggcggaaactccggcggggcggacgacggtgaggctctccggtgcagcgacatactcagcgaggcctcctcctttctgtattgcaattattattctggtgagaattgatcattttcttgatgagaaggttaagcaataaaattgttacaaactctatttttttaatgtacgacggcgttaacttttttataaaaattagattatttggcttattaaaaaattttgatgataaattaagtcataataaaataaatgattttataaacattagattatttggcttattaaaaaattttgatgataaattaagtcataataaaataaatgataattaaattttttagatataacggatggtcaaacatatctaaaaagttaacgacgtcatgtattaaaaaacggagggagtattaaagaagaaatgcatcagaaaattcaggtgctatacatgagatgaatcatgaacaaactggatgtttgaaattacccagaagttcagtttggacaaaactttgtcaccaactttgagctcatgtactgcagaaccagcctccacaatctccccggcaacatcagtcactgtttcatggagtaaattgagagatgaactaaataatattagattattccattggtgttatatacttcatcaccggtcaaaaactgaattatcttcataactaagagtgtgcattactgaaatagacccgttcatttgcaatcaattgcacataaatatatgtgttgtacgaagagtaccttttgaattagtacttctgtctagtttcataaacaaatggtccttactaatgggtaaacacctggaataaatggaaacttgggaagaaatgggcgtagcatccctttctgaatactccaatcaatcgggttaacgcttgcagcttcgactttaataagaacttcatgtttcttcaccgaaggaacagggatttccacgtgctgaagtgaaactaaactgtatttaaatcaataatagaataaacaaattttacatacacatatggtgtgttcaatattttcttcaaaaaatcattgctagctatatattctcactttgatgaaaatgttcagataagtcatgtcctggaagtgtcgtctatttcttggaagcaactagactcatgaattacagatgaatcggaaaattgtactagaaataaacaaagttcaatataatcgacaaatgcaatttttccaggacaaaacgaaaaagaacatgatcaaattttatgtcagagcagtagtgcagaatatcctacgaactcgatcactcgtagagcattaaatcaggaggaagaagaagatagcaaaccttgagggcaccggcgccgccgccgtagccggtgtactgcaccgcgcgcatggtggccggaatcccgccgccggcggccataatcccgagcaattcctgaatttctcctgttgtctgaacaagtcaatcgatgatgatagatgaatgcagtcatctgggcagtgtgcgttttgtactagattaattcttgtgacttaatgtcaaaataaaataaaattcttgtgacttgggcgtgaagggtttgaccgggatttgattcaataagcatttgaatatatggaagctcatcacccaggcgctgatgtcattgacaagcgtcgtgcatggataatcaaactaagaacatatatataattaattatatatgatcttttgatggtttttgacggctttcctcctctcgtatactattactagctactccctccgtttcgaaatgtttaacaccattgactttttatcatatgtttgaccgttcgtcttattcaaaaaatttaagtaattattaatttttttcctatcatttgattcattgttaaatatatttctatgtaggcatataattttacatatctcacaaaagtttttgaataagacgaacggtcaaacatgtgctaaaaagtcaacggtgtcaaacatttcgaaacggagggagtaggaagcaaatatgtaaaataaacatttgagaccaccgattgtttatgcgtgcaagtatgtcagtataatagaataacaaaatagagatattgtttctcatgtcatttgatagtttagtcctctttgaatagtgtaacaatgcccgtgctgacttgccatgctgacgacgacagacggagggagattttctatttgaaaccacacagtgattaccagtatgataaattaaacaagcatcggaactcggctagtaggctgccaacatatgcattttatttcaaaccggaaaatgcatttttttttttttggtatggatcagctacaaccacagaacctcaatttcagcctacaaacgggaacagtgcaatatccatcaagaatgcacaattcaagcccgatactatcatggagtttccgtttggcagacttattgtaatgtccatcatgtcaactaatcttcttcacgtagccggactactactgcctcagattcaactgctcaaagatttcgcgtctttagaccgcttccattcatagtgccaagtctcagcgcaatgtatcatgttatgtcattgagccacacggtcaaatctgtagacgctgcaattagaatcctaaaaatgcccctcattccaacaagcgccagtatcatttgcgcagcacaagctatttctctttaatatccttccaaaaacactatagtttttaccatggtctcgttaatcctgtagctgtcagataaaaaatgttccggctaagtttcattaacacaactcatggttagaacagaacaggcgaatttcctagtgcttcccattccaactacccacaactgtttgagacgggcgcctgtgcagttgtagacggagcatttgtacttcgttaaaaaaatttcacaacgaaaatatcgtttggccttttttctttgttcaatatcttctcaaatagaaaccagtgcccgctatttatgcaagtagctaggtatctcaggcataaaccgcgcaccaaccagccataaacttcccaggcatagttcagtacaatctatcgatttcacatctagcaaataagtactccgtccgttccaaaatatgaatgagattttggttcaatgtaacacatcatagtatgaatctaagatgtgtcacatctaactcaaatcctttatattttgggatagagggtgtacaaaaaaaacagacaaaaaaatatttttgggacgatctcgttttgttactccattttgggacaaaaattatacattcagaccaaaatataattttctcaatctttcccatcatttttttaggacaaactaatatattactttcacatctccacaatgaccttccgtgttgcatgaccaccggtgctcttctcccacggctccgccgcctcctcgaatggatgccatgagttggccaccatcttgagcttcccttctccggcgagctccatcgtaaatctcatctcctcgtttctcatggacatgcatgttatcttcttattggcaaacatggtcagcacggtcacgatgtagccaggggcgcgggccaaggactttgaacttgtgtattcgaaatgggaaggggtaaaaactttttttagcttaattatacgcctaaaagcctaattattaacttttatagtgtgtcacacactaatcattatataatatatagcgtatataacacaaaaagcataaattcacacaacttattgatagaattgatcatcacttgaaattgtttagcatatagaaatactaatttgtaaacattttaaagtgccaacatatatgaaatacatggaggatagaaaatgataaagtgagaagaaatctcacaattatttaaagatcaacttttcaatacttgatattttgaagcagctctctccaaaaaagactttaaatcaacaacagggcccttcttcctttttcatgtttcagttatgaaaattaaacaagattctatttatactattatgatacaaacaactaagatgagatctctgaattactatgaacaaatcctactatccaaggctcctaatcctagctaactgcccaacaagctaatcaagtttgcaagatagtagctactaactaggaactatgaagtatcaagaatgaattactaagtacaagtacaaactacagttctactccctccatcctataatataagcatttttaactacgaatctggatatatgtctatctagattcatagttagaagttgttatattttaggacggaggtagtaccaactaagcaaaagcaagtagtagtctagtagataccaggtaagtataagtgtagtcagtgaactttagtttgctaaccttaatgactcaacagttcaaatgttcaatccctcctcgattccatggcttgcggctgcttgggacatatgtctgtctagattcatagttagaagttgttatatttagggatggaggtaataccaactaagcaagagcaagtagtagtctagtagataccagataagtataagtgtagaacaaattatgaaatcagtgaactttagtttaatttgctaacctcaatgactcaacagtttaaatgctcaatccttccctgagtccacggcttgcggctgcttgggtgcctccctcctagtggccagaggcacaggcattatgcccacggcactgctggccgttgtcccgcaccagcgccatcgccgactcaccgtcgcgcaactgctccgcccccccgccacaccgtctcgccaagtcacgccccaccaatgcagttgcaccgggcgtctgcactgccgcctccacacaccatgctgctctcgtggcagcaccgccttgatctctcgccgatcgccgctcaccagccaccacccgccaccgctgagatagggttaggtgagggggagtcagttgagaaagggagtcggcagtgagtgagagagagagagagagagaggatgatgaaggaggctcaagaaaagtagtttgattgctttttggttgtttaaggcattttatttattttttatacatatgcgaaagacagagtatatatacctcttttttcaaaaatcgtcagtatatatctgaatacctttgagtcatagtgggcccaccttggatgtagttcccggggtttggggttatctccaccaccctaccatggctggtcagtgtcggcctcatcagtgaccacccgatgttaatggcgaagttgatgatgtagtcgtacttctcaccggaggccgagctcatcaggatggcgtcctcgggggtgttgtagttgaggacgtcatcggcgtcgagatagcatacaagctccatgctgcgggcgccgtaggtggcggtgacacggttgttgccgagcttggtgatctagatggcttatgtgccgatgccgtcggaaaccagatggagaagaaacatcataggaaattcaaacacgatgaccctatcgaggcacgatatttggtaccggagttcagctgtggcctacatctccagggcattgattacgagtgctcctttccgatccaagatattacaacgtatcagtgttacaataacactcgagtagatgccaccagcagccgcaacctcttactatgctaagtcgcctaatatggttacaacaggtccgcgtttctatttaaaatagaacctcatgctcagatttc

SEQ ID NO: 19243 - DNA, 3724 bp, Oryza sativa
attagttagacacctatttttgatattgagatggtaagagaatctcaggtgccatgatgcagtttggtgctactgcgctaattactataccaacaaacaaaatgaatatatagagcaacttgtatatatgtacactagtaggtcccccatataaaacagcagtggctgcaggtggtagagaagtgttcaataacaagagagatattaggtatgttagcttggtaccatgtatatgtagaaaacaaaacaattacgcatggacagtgcgtgcagcatctagtgttcttggagagtcggtcaaatgatttccttgttaaagtagctatgaatgaggattggaggggatatatatcaataagaaattgcttgcttgcgcttgtgctgggggcttcttggaatgtggggcgttaggaattctacttgcagcatctacagctttggctggcctgcttgatagaatcggctaagccttggcactgcgaatgcaaaggttctaaagatgtgaaagctttgagccgttgaacctgagacagaatgagtcaatgtctgtgaagaatatcagttgatacaaaggagatgacagcaagattattcaacggaacaccacgatattattgggctgcatttttcattcttgttggggtactgtacagtgcttatttgaaggctgaaagtgaggtgctgtaattgtatggctgatccattaaaaagcacatgtttatataggtttggataaacatattgacagcccaattcggtagcttgtttgattcatcctgttggtaatcaacctgtagtttcaaatataaaatctcgcttcgtcactcgtcatcagcttggcaagttggcaggggcattgtcatgctattaatgattatttctgttcgcgtttatcaatacaaagaggactaaaaatctaaaatgttgaatgaacatgaggaataacaacatttctgttttttacccgttcgtacggacaaacgattagtgggcagaaatattcattttacaaatttgcttcctgtaacacgagagcaagcagtcaaacaaataccatcaaaagatatcagtcaattatggatggaggatgcttgttaatgatatcagcgattgggtgagcttccacgcacacaaatgcttattgaatctgaccccggtcaaactaaacccttcacgcccaagtctcaagaattcagtacaaaacgcgtactgcccacttggctccattcatccagctctacggccgagtttagttccaaaatttttcttcaaacttttaactttttcatcacatcaaaactttcctacacacacaaacttctaacttttccgtcgcatcgttctaatttcaactaaaccttcaattttagtgtgaactaaacacacctgttcagccaagaggagaagctagttcagaaaattgctcgggattatggcctcgatcccccggtgggataccggccaccatatgcgagcggttcagtaaagtgcgacaacagcggcggcaccggccagtatattactaactaataggtatagtccgattcttactctatttttatacatagtacaactcaactcctaaattgtaatcgattttgtactttaacacaaactctaacttggcaaatatgccatgccaacttgaatatgttacttgttcgaaccttcgtgtagtaggatttgagttggttctcctgatgttcatgccaagcagcccaaacagtttacgccaggctcgccgccttcatgattgtgcacagcaacactagcatacctaccctccatgacttcacctgcaacttccttatggcttgtacaaacatgagctttcctctcaccatacataatattctttctgtccttcataatattcatggtctacttactacagtctgcctgacacaaccaacatatctcatgtaggcttttaagcaaaattagactactccttattgctggcacacatgtctcacatccgaaagtagcgtcccatttctatcatacatcttgaacaccaaacttgacatcacccgctcaaacaacatgacaactcatgtcatcgcccaagtaaaaaaaaacaaactcacaagataaccacacccattccctagggcactgaattggtcaaaaggccaaccaaggcttagccaatgctattaaaattttacatggaaaccctttttatgttcgagtccacatattgatatacaattgtagtaaccattaaataatattgcaaatgaaccctcaaatcattttaataaaaactgttcaattcataaatgcaccctcaaataacatgtaaagacattcaatatggagagagggaggttaatgtcgatccctcaataaacttcttttataataaagtccttctgcaccccttagggtgtgttcggatgcccctcttccgaaccctctccttcgtttttcgcgcgcacgcttttcaaacggctaaacggtgtaatttttgcaaaaagtttctatacaaaagttgcttaaaaaatcaaattaatccatttttgaaaaaaaaactaatacttaattaatcacgcgctaatagaccgctccgttttccgtgcagaggcactatgttccccacctgagcatgcgaagtttcgcgaccgaccggatttcgcgaaatttcgatgtttcgatgagactcgaaagtagaaaccgtctgagatttcgagaagtttcatccaaaattcaaatttgcattaataaaaaaaagaaaaaaactaaataaaatcttataaatactatgatatttatagaacttgttgggatataaattttcgaaaaaaatgatgtattgtgtgtatttactaaaacttacattaggaaagaaaagaagaaataattaaaaaaaaacacttacatgagccaaaactgaacggaattaaaaaaaggaaaacacttattgatcgaaattttgatgattttgatcggaatttcgccaaaaccgatcggttttcgagaacttgttggcaaacttagggaatttgatttaaattttggtttatgaaatttgttcggaatttaccggttttccaccggatttcacgaaattctgaattccgccagtgcccgaaacggaagggcttgtcggaatcgtaaaccctgatgtgaacacagccttagtgctactctttttcattttcctccctttctaacgctcgcttccacctgtgtcctcagtcctcatgcgccgcctactccctcctcttgatctccaccatctcggccttctcccccaccacgtcctctcccacctctccaccaccaccgtcgtcatgtcctccatctcgccgtctccatcgctgcctccatcctcgtcccatgggatcgatcaggcaacgatgacgcagcttgatctgagatggcgtgtagcagaatcgtcgatctgttgcggggatggggacatgagacgaggcggcggcaactacgcgtcatgaaaaatgtcagcacgccctcctccattcttactacctagcttcctagcctcgcctccacactactggagaaaccatctttgatcggtcggctaaatttcacaatagttctggttcttataaaaattgggattaaaaaacatctttagtcccagtttaaaagctcaggggtactttttgatctttagtcccggttgataacatcaaccgggactaaagatcatttttagtcccgtttcaaaaaacagcaggcagagatctattat

SEQ ID NO: 19244 - DNA, 3325 bp, Oryza sativa
agccataaagcgatgcatctatccgtcagttgatgatgacttttgaacatcatgtgctctagtcttatatgagactttcgttctccttccgttgctatgtcctagcattgttgccttccctcaatcaataactaaatggttaattggacccatgctactatcattttgatggttttaaaaaataccattactattcacctatttgaactcatgccactataattacaccgttattttgatatatgccacaaattaacctttgaacacatatacacattttctaaattttttagaccaaactgtccatcgtcttcctcctcgaccccttctctctcttctgtgttcaccttccctcctcatggacctagcagctcgtccatcagcgattcaatggacggcatactgccgggcccagcagagtgaggtcatcttgctgctgctcctcacagcacctacctgtttgcatgatagcatgagctgagctcccattctcctccacccagcagcgaccatggtcgccctcatcacaattcacaggcttggatccagcggcagcagctgaaaccggtgtcctccccccttcctccagaggccgcgacgaagcactacgcgtcagcgaggagcatgatgaacatgtcggtgggggccacgggacccagggaatcctgcgccggacacgatattgttgttcccatgcgacaggatgggtaactagtatactactcctatgaatcaaataataacaaaattggtatagcttcaaataggtgaatagtaatgtcatatatcataaccataaaagttataattgcatagatccaattgacccataactaaatgactaatattattttaaataagagaaaagagatgaacagtggacaatgatggtcttcaatgaaatggcagtgaaatttcctgtaactaggttaaaccccgtgcgtgttgttgcgggagtttagtatgatagcactaagtaaaagtaaagtgtaagatagctacacaatataaacttacgtaagttgatgtggtttctaattgaggtttacgataatttaaatttaaatagtatatagaatgatgattcaaacataaaagtgagtttttttcgcaaaacataaaagtaaattgatgtggctttctgagagaagaaaaggcgggagatagtttggatcatagattaatcatctaatagctaaaaataattgaggagatatgacttaataagagaagaaaaggatgtaggatcgaaattcaagaactaagccaaccagagggggtgaatggttggtgtacccaaaaaccaaaacttttagcggaattaaaagttaccctcaaatttgacggatcgcggtctgatcgaaagcgatacgctggtctgaccgcctggaagtcgtcggtctgaccgaggtagtaacaccaattgaaccgccgagatcaactccagaagtcgcctgatgccgtcgctggtctgaccgccacttcttcactggtctgaccgccgtcatgtcgcctgtatgaccgctgatgactcatcagttagaccgctgaaccagagaaaacacaaattgaagaagtcacaaagtagatgacaactttattacttctgtctgtatttacaaagtgcaacaatagcactcctcacgaaaatctcgactaaactcaaaaccctagttaactatcaactcaatgctctcaaaagcgataccgggaagcctcacgctccctctctatttatacatgaggtgggcagcctaaagccatgaaccaaacccatactagaagtcctaatccatctaggaaaccttctcatacaataaacaaactttacaaactccaatcataccaaatttggactccttccaaattcgactccgtttcccatacgcacacaataccttcaccgtatgccatatggaatcttcaccaaccacatgcattgaactctagcctaaatatcctgcatgatatctgaccgtcacggacgtggccttatccccaagtcgactcccgatccatcaccgacgatactctcccgaggcatcaagtgaccctacacatggatcgaataaagaaaccatattccgaggccaagctatctccaacttgactcattgttagcaaacaatagtattacatacgcatagtatccatctagaagccataaacacgaaacaatcacggatatccaaacaaacaacccgaaaccgaaaccgacacagagtcggccagtcagaccgcgggctagccggtctgaccgttcgcataactacggtctgaccggccgcaccagcccggtctgactagaccctacaaaacagtaaccctgttcatcacctgaaaaatcaatcatcttcaaaaccacttcaccaataatctccaaatatcaaaaccaataatcacagatgccaattgttcatcacagaataagaatcaaaaacactttgattttacaaaggaggggaataatttggacaatagataatcatctaaggacaagacaattgttgtgatatggcttaatgaaagaagataaagagcacattaactaagttaggagttaggatgaactatataggtacataagatattatgaaaagagatgatgagacatattaaaatattatgtgaattatatgagataatgatttaacatgcttgcatttgaaaagctataaaatttaataagtataaaattatagataacataatatgcttgcatgatgtttaaatgtcctagttgttatagtagatgatgtgacatctttgcatgttaagctttaggatttagtgggttctaactttatagtaatagaggattaacgaaaaatcagactcatgtgtcacctctgttggcgaatacggaggcgaaggcgcgtctcgcctgcctcgcctccaacggaaatgcggccccctgtggtggtggccaacggtggtggtgcctccctccctcccccctctccggcaagatccaggcatctctccaacgtgagaggccaaatcccctattgcggtggtggctggcgatggtcatgatggtagcaagagggacgaccagatttggccccttctagtcatatctggcgcgtcccagttggggtcgggcaaggccaaaactccggtgcgaggtcgttcggcagagcttggaagtccaatgatgccaacggtatggcttcacaactcggtgcagctctgctagtccggctaggtggcagagctggtcgtcaatggtgtctacccggtctttgtgcaggtcgtggtgtgaatagtacaggtaccttcggtgtgcagctagcatttggtggcttctgctggtgctacatgg

SEQ ID NO: 19245 - DNA, 9350 bp, Oryza sativa
caccaaaaattttggcatctctggtgttcttcgttcttctccatatggctaactctgtccccttgattttcttcagcttctacaaagaggagttcgcacaagtggtcggtcccttgcggtggaagcggcggcggcggcggcggcggcagcggtagcgtccctagagacacctcacagatccagcggccgtcctcacggccgatctctccagcgtccagctcttccaccggacctgcaaggaagaagctggtttgtgtcacatatctcctcgcctctttggattttactgatttttctctcgatttttagctgattttctctattggtttttcgccgcgtcggccgccgccactgtactccgggacatggatccggtcgccgttgccgccttccctgcctcccaactgatggccacccgcggatctggcctccgggatgcagatccggccgccaccgcctcttcctccaaggccacccgaccgctggccgctggatccggcctccacgaggtttagagacgtggatccggcgaccaccgcctccatcccccaaccgttggcatccgtggcctcttccccgactcctccaacgccacccgaccgccggcgtccgcggcctccaccgtctccttcacccaccagagccgccgccattttgactcttgcttgattttttgttatcttgcaaatgttcattgccaaattttagattaggccatattctgtgttgtttgtgtggatgtctagtttgttaagatgcagatcattaactgtgtgatgtatattgttactcaagttgtgtgatgttggcttgcatcttgggataaatcttgcatcttttgcttcatgttgagagctggtggctgagggcttttgaattttttttttatgatttttcacacctgtgacgggtgataaattaaacctgtcagtggtatatgtcacctttgacgggctggaaagagtcatccgttacaagtgattctcacctgtgacgggctatttctatgcggccgtcagaggtgttaatcaccattgacgggctttcacccgtcagaggtgaggtgcagttatcagtaaccactaatctctgacgagggccaaacccgtcagaggtgatgatatgggcccgtcaatggtgagaggatccagcgtagtggttgttcaccttattgaaggcattgatattggagcccttattcaattctacatcaagatatttctccggatgaaaaccttaagattcgtttggatcgggtgatgtgttgtcgttccctcggtgtatccttcttgaaggcttcgttttaggagttttttctcttgttggactgttgttattaggttcagtatgccaatgccagggttttcgtcggttttacataaattaaccatgtttacgtaaggtttttgttcggttttccttataaaatgaatcaactcactctggtttttgggtccggttttccatatcctttttgcgcctacaggttgtaggatagtagaaggtcttcccacccccaaacgctagccaattaggtgaggggctccccgggccacttatatatcagtttctttgtccttacacaaccaatgttacatcatgcatttggtggaacaacataaacctgctacccttatttgtggtttaatttatcacgtggctgttccaccaatatcacgttgtcctagctctgccaacgacttcatcttcattatctgtcgttggctgtggaaaccaatggtagcccatctgatctgtcctttcgtcaattctcaagtgatattgttcttactccaatagcttgattggtatgggttcgaggagtgatgtggtgatgggcaaacccatcattcaatttctttaatcaaacagatcatcaagaattaaattgtttaaaaaaatctagatattttttttatattagcatgagcatacttgattttatttaaagaggtgtgccatcacgctagctggttccacacacgtagcctatcgtctgtaaactgcatttcgccatatagctttgtttacctgatacatttcgttcttgatcatgtctgaagacatggtgagctcaccctcgctctggcgccctcctgttcccatcaaagacgcgatcgagcaagatgccatcaccccgttccccaagcctgaggctccagaggaggaggaggaggagtcacaaggcgactgctaccgccgcctcatgtcatccctaccggtgaaggtctacggcgagcgccgttacctcgagtaccaggcgacgtggtggcctgagtccgccgtccaagccgtgatcgccatccaacgccggttccggccgaggccatcggatgtgctcctggcctcctaccccaagtcgggtaccacatggatgaaagcactcgtgttcgcgatcatgtcgcgcaaggtttaccccctgcgggatcacccgctgctgcgtctcaacccgcacgactgcgtggtgcacctgtctggcgcctacgcaacgggcaaggaggcggtggtggaggcgctcccttctccgcggataatggccgtccacatgccattctccaccctcccggcctccgtcgtcgtcgactccagctctggctgcaagatcgtctacgtgtggcgcgaccccaaggacgtgctcgtctccctgtggcactactaccgcaagctacgccccgaggaagcccatgtgtccgagttccacgacctctacgagtcgttctgccagggggacaccgtgtttggcccttggtgggacaatgttcttggctacttcagggccagtgtggagatgcccaccagagtgctcttcttgaggtacgaggacatgctggaggatactgccagcgccgtcgtcgccattgccaacttcgtgggatgcccattctcggcagaagaggagagagccggggttgtcgatgccatcgtcaagctttgcagcttcgaggagctcaagaatctggacaccaatatgtccgggagcaatgggcatctcatcaagctcccaagctcctcctacttcaggaaaggagtcgctggagactgggtgggtcacatgacccgggagatggccgaccgtattgattcaattattcaaggcaagttccaaggttcaggtcttgagattaaacgagcctctacctgatcaatctttttatgtaattatatatcatatatggagtgttgatcattatgcattataatcactactcctatcttccgtcccaaaaataaaaactcaatcctagatttaaacctgaataagaattgagtttttcctgtagggagtgcttgtgatgcttgtcaggacgaacgcagtaataaatatataatagggagtgcttgcgatatttgtcagtacgtatgcagtaataaatattattgatcaggcacagctttctgtacgattgtaaatttatgggaaagtcgatttacgatatgtgaacaacactattagaactaaatttatgtgtaattaaccaacacgctactggtgcagtatgtctatatatagctctccttttatagtttttcgatggttgtatattcttcgagcaagctagtatgtcctttcagatgggcccgccactcagcagattccgaagatagcattcgttttaatcggatgtgattttgcaattcgcagtcgttcgatgtgtaaataattgatagtaattttcttgaagcaaatatatcctgaaaaatatacactactgcacaaacgatttttactccataatttttacaaacggaccataacttgccatgtctgaaaaaatcgagtagtattttcgcgtacagctccttaagagcccgtatggaaaaatcgatttttccatatgggcgtatgcgaaaataaaatttgaaaataaaatttaaaaataaaattttcaaaatttgaaaataaaatttgaaaatttaaaactagtttatctcattcatatacacttcaaattggatgattcttttttctaaatgtttataaaaccatgcttctatcatgttattatgttcttactgctattattttggcattttttcttctgactttgttttataaattgaaattttgaatttcaaaacttcaaataatattttgaagcaataaacaatttccgctgaaaaagtcatgaaaatataagttgtagaactcatttattttggtcattttttcatccgacaaagtgatagtaacagtacacaaaattagcatatctctcttatactttataaaaccaaatttacaatgttacgatcagtttgtagattttttgtagattttgaagagttatataactttgttgttgatgtctttttcagttaaaatcatttagtatttgaaaatattgtctcaagttgttatattttgaaattcaaattcaaattgttcaaacaaagtcatatagaaaaatgaccaaaacaaaagttatagatattgatgcattatacaactactacccgaaaaattatttcaattttttgtattttaaaattcaaattttatatagttcaataatactcggatggagaaataacaaaaaaaaaggatatattcaatgagttctacaactttgtttttgataactttttcatatgagttgatctagtgccataaaatttgatttgaagtttaaagagcggcatgaaaaaaaacgatatttgcatacggacgcttaaggattcctccttccctctccaccagttcaaaatttttcactcccaaccttaccattctatcattcctcaccttgacgaccgagagcagagcggcgcggcacgcgcacttgaagtactaatgcagttggatctagtggttcttggtatctggatgaaccttaaggaagcaaggcagaagacatagggagtggtagaagggaagacatcagaggtggcatgccaactgaattacagagggtttggcatgaggggtcagtgtgctaggctgctagcctgacagagagaagagaggaggatgaattggaaggagctaggccggatactaaagctgtgtttggaatcctgagtttctaacccctctccatcgtattccgtacgcatgcttttcaaaccgtctttttgcaaaaaattttattaatataatagtaatcatatatagtatttttttaaccagcgcagatgaggggtacggattgattgttgtgtaccgatggcatgatcaaatatggtaatagcacatacatttaaatgacagcaaagcttagagccatcgctgaatcttaatctcacatctccacgatgacctttccagtggcatggccgctgaggctcctcgcccatgcgtccgccgccttctcgaacggatgccgcgagtcgaccaccgtcctgagcttcccttcccgcatcagctcgagcagcaaccccaggtcctccttgctcatcttcaggctcaccagcgacagcttcttcctccgggagaacagcgtcaccaccgacgccacgaagttgccgaagttgggggcgacgtcgacgaccctgccatggctgctcaggcgcggcttgaacaccgaccacttgttcttgttactgatgttgacgatgtagtcgtacttcttgccggaggggctcgacagcgcggccccctccggggtcttgtagtcgaggacctcgtcggcgccgaggccagcgacgaggccgaggttgcgcgcgccgcatgtggcggtgacgcggtggttgccgagcttggcgagctggacggcgtacgtgcccacgccgctggaggccgcggtgatcagaacgtcggcgccgccgctggtgcccgagccgtcgaacttggtgccgatggccttgagcgcctggagcgctgtcaggccggcgacgggcacacccgccgcgtcagcggcggagattccggcagggcgagcgacggtgagcttgtccgatgtggccacgtactcagcaaggccccctgctgtctacattgcagatttgcagaaagtaaattggtcaagttatattttttttaacgactcgcactacacagagcgaagttctagtgatatataaaaagagaaaaatataagattacaaccatggaaggttatatataggaagaagaaaaaaatataccatcatccacacactgacaacgccaaacacagacctagtagaaagttagcaccggaccagctgccgctaagtggtatcgaccgccgctaagccagcaacggaaaacatccgagattgcccaaaacccaacccttacaactaatacaaaaccacgctctatccaaatttttgggattcagggagagagggtgagagagaagaatcgaaccgctctccgcctagaccattcgacgtggccaacttgcggaagataggacgccgacataagaggataagaatctagagcgagattgcaccaattgcttgggaggttttgatagaggggtgcctagacgacgtctccaaggagagtagcaacggaagaactgccgccgacgtctgtcaaggtcctaaagagaaccgagactgggcttttaccaggcaaccacactagagggagtgagacggcacgacaacaccctcaggaggggagtggcgctcgaacgccactgttgccagcccggccaaggccgtgctgggttttcacccgccgtagaccccctgttgctcaaaagctgtcctccattgctccaactaccaacccttcaccatcagcgtgtggacatcactgaaccaacgccccgcattggccagccttcacatgcctccacatcagcctcccactctccgctaccggacagccgacaagccgctgccaccacccgccgtgcctccttgcgtcgtactggcttctaccgttgccaaccgcacctccttgtgtcgtgcagatcctcagggccgctgtgccatggcctgcagcctccactgctgccttgttggcctccaccgccgcctgcacgtgccagtcgtgcctcgccggcttccgcctccccttgcatgcgccggccgctcctccccgacctctgtcgccacctagacacgccggccacgcctcgccggtctccatcgccgcttgcacgctcccgtcggcctcctccaccatctggacgaccgcccctaccacgagaagctgccgtctaccactccggtgcccacgcctcctaccctgccgccacttgctgcctccgacgaagacgtgccgtcccacctcatccgtgacggcctgccgccgaaacctcgccaccctgaccgccaccgtcgcccgtcaccgccgccaccactcatccccgccgccagccaccacccggccagatatggccggggtggcgtggatatggacagggctccgccgccgtcgccgccgccaccaccgtcagcccccgccgccaaccaccccctggttagatctggccggactcggccctgatctggcctcctccgccctggacagcctcccccagccgtcgagcgtggggtgggtgagacgaggccccgccgccgccgtccttgcggccgcgtggctttgccagcgcccgctcaggcggcggtgaggcaggaggagtaggaaacggtgggaggaaggtggcagcaaggtgtcgtctctcatgccgcccaggggagggcgacgtgagagagaaagttttggtcaagttatattggcgtccaagctggtgaaaaattcggtgcattttgaatcgaaaaatgatttgctgagacgaatttggagccagatcattggaagtacgtacccagaagtctagtttggagacaactttatcaccaactttgaactcgcgtactgcagagccaacctcaacgatctctccggacacattatttactgctcaaaagaattatacaagagtgagtacatcaatttcatcatcgtttcatggtaagaaaaaaaaaatgatctgaaacgaatgctacctggaataaatggaaatttcgggtgaaaggggcgcatcatccctttctgagtcatcaaatcggattgattgatgcttgcagcttctacttttacgagaacttcgtccttcttcacagaaggaacagggatttccacaaactgaaatcaaattaccccgaaacgtatatggaattcaaataaatcaccacggtaatttgttgaccaattcctctcttagacaaacagggctcttcacatataaattaaacagcacaactcacgcagaaatccaggcagaagttccccattgcgaatatgaaaaagtaagaacttttgaagcagatagaactcaccttaagggcagcggcgccgccgccgtagccactgtactggacggcgcgcatggtcgccggcctctcgccggcggccatgttcttggtgagatcaggtgatgtctgctcacgccgttgtcagaactggtgagctatttgtgagactggaggaagaagaaagctccccactacttcatacaacagctccatttggtagttgagctatctgcgtctgtaaagcttgcgttggtgcacaaagaatttcggaataattatataaattttatagtgatattaaattacacagtctcaaagcatctcctgcttagtgggcgggcaatcattgtaggcaatcagcttttgatgtaccgactagattattaaacatcaccataaccactgatgcttagaccttgcgtgctttaatttcttttcagcaacttgaaatattttatatggaagtcctttaaccataaataatcatgcgccattgatttttttttcatttttcgtgccatcaatgagctaccgccaattaataacctatcccccggattcccccccccccgcatcgcccacgcgctggcgacacggggggcgaaaccctagcggcgccgccgcctttcctctcccccctccccccacctcgccgccggaaagccggcgggcgagccatgatggcggcggcggggcctccttcatggcggtgacccttcccagcgcgcgagaggcggcgaacggcggcagttggggagcaacagcggcggccgatcccggcgaggagacggcagatccggcgtcaccttcgccggatctggccatcccctggccggatccggccggagtgggtgctggtggcggaggaggccgcggcgcggcgacgcgacaagggcggcggcgacggcacggtgtccgcagcggaggcggcagtgacggcgcggggacgcggcagcggtgacggcgtggcatctggtggcggccgccacgatggcgagatgcacgcgggcggcggtgctcgcgccgcccggggtgagcgacggttgcggtgccgccggccctggtggcagcgggccgagcaacaacgtcaacggccgcgcgaggctcgcacacagcggctaccgacagtgctggttgtgatgggcaac

SEQ ID NO: 19246 - DNA, 11454 bp, Oryza sativa
gcagccgcggctgcgacctgaggtaacagcggcaatgccgtcggtgcggaggcagaggcctcggagctagtcgcagcggcggcgtcatcggctgctgtggcacggtggaaggaggcacgatggtgcgttcggcagcagcggctgcggtggcggtgaccacggtcgccggaggcgccggaggcatgggggcctcggacggctagctaagggggtggtagacggctacatcgggccggcacggcattgtttggaggaggggtcggagaccggcttggcgaagagtggcgcagtcaatgacagtggagccggctcggcgcgagaggcgcgagcggtggagttggaggccgccttggcacgagaggcgcggccgatggagggaggccggattggcgcgagaggcgcgtccggtggaggaggccggcttggcgcgagaggcgcggccggcggtggaggaggcgacctcggtgtgaggaggagctgccggtgggtgtggcgagtctttggtgcatgaagactggccggcgggggacgccggtgcaagggtcccgcatgtcagcagagctggagaggtggtggagcatcggtgtgtcagccaaggattcacaagggtgatcttgtctttgttcctttgttggtctagcggcagtcagtcacgcttagcggcggccggtctggtactagccttctcctggttgtgtgttggcgctgtcggtgcgtgggtggtggtatattttttttctttttgctggttacgaccctccagggttgtaatcttgtaattttttcctgctctatcaatagaactttgcaccgtctcgtgcgagtcgttaaaaaaaattaatagcctatccgaactggccgtagttttttttttctagtgacactctgatcaggagaaatcaacccggctattgttaacatctgccagttttggactgtagtaagtgtttaagttatgcattttgtccctcggttatttttcaataatagaatataagtttcatcctctgtactactatgtccagccatggacactaacacctgaacctgttcgaccatataccatatccctgcaaacgggcaacaccatgtcacagtctagtgatcttcaggtgcaaacctgcaattggggctctgtttaaaggactgcaaatgtgaagggaaggatcatactgcaaaatcattgctatggaagacatacgacagcacaagctacgatgctatgaatgcgtagtcagtcacaactctgcgagggtatatttctcccgtcaaaaaaaaaaaaacaatcatgctggataacgtgttcttcatctgtcccataaaaaacttaatattaggtttgtatctggacatatatttatattcagattcaaaattaggattgggttttttatgggacagagaaagtatgtataaatacatctttagaaatagatttttcatttttacggggggagtacttacaaatgaaaatacaccagggtgtgcataattgtgggcaccagatttaaatattggtagtatatgtaccatcgatatggattcggcagtggaaatatctatatgtatctcaccgcaacactttttgttctttcgctaatttccttatataatgcaaagcggagagagaatacttgtttgacaagtttagagcatctaagtcagtattatcgattgcaaagttataaaagaaaatttaacaattaataactttgttgagctacctgttcacccctcctaccaaatatcactcatcagccactaataatcaattcaacaacagagccaaaggattaaaaattcacaatccgtctccatccctagctaaaaaaaaaattgctcgcttaccaagttaccatgattaacatttcttttatatatagtaccagtagctgccaagcaaagtcacattatgggcatgtttggattcttcaggctattaaatatccttacagaatcttgctatttagtagtattaaacgtaaattactaacaaaactcattccataacctctaggttattttgcgagacgaatctaacgaggtatattaatccataattagtggatgattactgtagcatcattgtagcaaatcatggattaatatacctcgttagattcgtcttacaaaatagcctaggacttataaaataggttttgttagtaatctacgtttaatactcctcaataacaagattccaaagagtccatcgaatagctcaacgaccagcttgctttctggtatcttagcacaaacaatcatgtcagtctactaataagtgaggaaaatatcttatacacataggttttcccaacacacttcgtgcacatttttctaatagccgtaacaaaatggataaaattctgacatatcattactcttaaaattgtaagaatttttttctatagataaaatataatgaatttaattatgagacttacattgatcggttttccgatttcttcggtctccacatattaaaacacatgaatccgaacaccgaatcttcacctattataaaagttttaagatatttttgccgaagactttcatacgtcgcgcagtctgattccctccagtatgtgaaacggacaactctagggtttgctatatggcttgattccgagatcgatacgatgcgattttgctctaattcttggaaaagggaaatagaaggagataaggatcaaaacccctcaatcaatttcggattatctccgcgaatgcggatggatttcatcgaaggaggcggtggtttctagcggcgtcgggaagctgtggagtcggacagaggtaggagacgacactgtggcattgggacccacgtgacattgggacccacgtgacagggagaggagaagggattctgattagactttctggttgtttgatgggccagatgcgcgctttcaggccgaggtggaagggaggagtatgggctaaagaaaaaatgggctcaaaatggcccaggagaaaagagggttttcatttagattttcatttaaataaatgctaaaataatgtttgtattattaaaattagcaatggagctctgaaaatactgaaaatttttcacatagtgtaattaatcatggagaatttaataaaaattaaatccagccatagtttatttggaaaattctatttccacatttaccgtgacttttatgaccctttcttttcttcaacatcgtataaatgtattccagtaaaaaaacatcggatacatctatagttgcgattttatattttaattaattacataatgtaaatatttctcaaccttttcttaaatttctcatgttttttcccattgcaatgcacaggcattttttctagtaataaaaacagaaaccgaaagaaaagaccgatcaccgaaaaaccgacagtttggttctgttacggtgcggtccggttcggctttcggttgtcaattttttatgcccacccctataatcctgctgtcctggtctcttccctaacatatctctttcctctcctcctcaagtttggtctccactccagtgcaccaccgtagaatccatcacactactacataaatgatattcttgtacgctgggccctgttgtttctaggcggaccatgattgggaccgcatgagataatggggcaaccggcgccgggcggacgcccgcacgggaaaatagattatccagtgcgggcatcttaatccaaccgcacaggataatcctcattatcccgtgcggttgacttaagtggatcgcacagaaaaatcgattttcgcgtgtgggctttttaagtgaaccgcacagccatataaaatatcccttcctattttccctctcacgcacttcaaatttttcacaccctctctcctcccctcccctctctctcctttctctctcttcctctttcctcccctcactgagcggcctctttcctctcctcccctcctctcctcaccgagcgcacggggctccacgggcgccgccgctgatggcgcgggaggcgacgcagctgctatcggcggagcggtggcgaaggcaagcttgcggtgaatacaatgacgcccatcgacggcagtgcgatcaaccagccatgtaggtgaaaacaccagtcgacggcagcggaggcaagccggtggtgaagacgtagatgcccatcaatggcggtgtgaccagccaaccgtatagacggagacaccaatcagcggtggcgcaggcagccggtcggtgaatatgtagatgccaaacaacagttgtgtgaccaacaacttgtagaggcggagacagcagatggcgacagtgaaggcaaccggtcagtaaagatgtagacgcccaacaacggtggtgtaaccatccaaccgtgtaatcaaggacaccagtcggcagcggaagtaggcaggccgacggtgaagacgttgatgcccaacaacggtgatatgacaaccaaaccgtataggcgaggacactagtcggcagcggcaaaggcaagccggtggtgaagacgtagacgcccatcaacagtcatgtgaccatccaaccgtgtaggcgagacaccagacggcggtgacgaaagtaggccggcagtgatgttctgactgatccatttccgacgcgtaggagataagcttaaagccatgaatccctattatgcatatctggatttggatcttgcagaacaaacatataggctaagtagtatttgatgcaaatacagtacttgagaaaaaatcaagtattttaaaatgtttataaatatgtatttcttctgtcgtcaattttgatttcctcgaacagatggctccttacgtttaaacactctgcccgactagtgattgcccccacgcaccgggagtcatccaaggcacttcccagacatgcaaatgagtgacatgagttcgtcattaatggaacaaagtttcacggatcagaatttactactcaggtacttttgcaattgtcaagagcagaaaataaattatctgacctctatgcttttgattttttttttcgagtaatacttagcaccttgtgttactcggtctatccaacaagacccgggtgctaggaatcggtccaaaggcaactatccatcgacaaaccaaacggaaagcatagaaagatagaattccataactcgatagacacttttgtacttagattatgtcgcaagcaatcaagataaatattatgaaatttgttgaaaaaatatgatataacatctgtagcccccgactcactagtcaacagtgaaccagttgatgtagtgaggtagaggaaaaggaaaatatcacatagagaataaaattaatgatgagttagctttttcgtattcccttggtgacagtagaagtagccgatgtggaaacgaagtagtccatcaatggtgacgaaaactccagtcagcggtagcggaagcaagcctatggtatagatgatgaggcccattaacggtggcagaatccgtcaacctcataggtgggacacgatgctaatgaaagcgagaccaagctactcctcattgaagccatcaatggctgccgcccgagcctcgagggtctcaccgtcgagcagattaccagcctcggatggatggcaaatgcacgcctcaagattgtcaacgaccgcctcaagaagctccatgaggaaggcctcataccagcatccgtgtcattgttgggcaccgaggtaccaacccagagggagggatggctgatggatgttgcaaggggcattggctcaatggggtacaatcggttcagaggtagtagcggaagcggcactgctggatacaatggtgacctggcttagcctttcagcagtgttgcaggattctcacaagccaatcaggaattttcagtcccacccaagtaatgcaagattcattatcattttcctgcctggccaacatggcaaaggtggactttttctgagatgatattttgccagagaaaccatggtcaactatcgattttggagagtgtcaatcactcctttatttacatcccaatatatcattcctttctattttgtatcccatcatcccatttcctttttttaatcataatatcccttttcccttttttagatacctacaaactattcttggttcatgtatttattgcatctgaattaccagcttaatgcttataaacaatgaaattcctatctagaaaatgagctactagaaaaacaagatctgagtggatcaattgaaaaaagatctatgttcaacacaagaaaaagaaaaatcttaagtgcaaggaaaatgggttttttgtcgattcagcctacagtaccatatgaaatagttgaagcatgaaacatagtaaaactttaattttcccacaggatctcatgccagaagatgaatcttttcccacgatatttgttgtcctaacgaggcagacatgtttttcctatctttctttgcatcgtgttggtttcaggtgacaaaccacatgtgcactattcagtggcagacgcaggattaaaaaagagttggggcggaaatgctcgcttcataaggacaactaaacacaacaaataccatatttatattgtaatcgtataaaaaaatagtataatcaataaattcaggcagacaaaaaaaattgcgccatacataattcattatacaccaaaagataacaataaacatgtcaatttgtaaatatgagtcaattcataaagcatggtggataaaatctttaaataataataaatatatgagaagacataccgctgataaatcactgagcctttctaaggaatctaggaggcttagacaattctattcgttcatggcctaactgatgaagatgaggttggctgcctagccggctagccaccgacaggctgggccactggggtagtgcaggcgcctaggcggcttgtgcgatggcaagctgctgcctgctggcctggccgtgcgtgtggcgccgccgcggggatggtcggagggtcgcggggacgggcggacgaccggaggacggcgtcgcattggcgcgtgcggcaccgtctcgcagagcaggattgagcggcgtcggcgaagtggcagcgaataggcggaagttgaactgtgcgcgtgcggagtggcagagacaacagcgcagagccgatcgaggcctggcagatgaggagtcgtgtgcagcttgtgtcacttgggctttacttatgggctaattgtggataagaagtggtggtaggcagccccaaaggggtggggtggggtggggtggggcggcgcgggctgtagctgggctggccgacctaccctgcccaatgggtggttccgcccctggcgctatatttggaatgcaaccacgcacaacggacctgattaaagcatttatgtggtacgagtgcttcatattgccgatatattttgtgttttttatgaaagaacatacagtttgttggacaaaatattatctcagcgaacatggcaagtgctccctccatgggagacaaggagagagctcaaccttgaagacctgtagggaggaggtgggagcttgaggaaacaagaggtggtagtgtggagaggatgagaatgggtcttccccaccttttgcccacttgagagtttaggctatgaattttagtttggatctcttgcatgtcctttccgctagttgactgttaaattcttatgaaaaaacacattttgccctttgctacgaagaagcatataaattaatagagtgtattattggagcgtaaaaaattgttagatgggactattatatttatgagttagttatgcaccataatatttgcgataaatatacatttagatatgacataaaaaaatacttaattattttttattgcaagttgtttatgtttcatataaatatatttctcttatacaacaatctattgtattattattaaaacacatatgtgttaacagtaaaatttggtaagcccctaagagaataattacgtcgccaatagtcggattcctgctatattcggttaaggaaattaatcgattaaaggaaacttatccaaaagtgtccgagttcgaggaggatgcggtatggcaagttatctattaattaggaatagtttattagtttccttttatctttagaaaagtgtgtttggtgtcctataaggactttatgttttccttttatctttagaaaagtttctttcttgtcctacaaggactagtatctacctatgggtataaatatgcacacccagggtcattgtaatatctccacgatcaatacaattcggtgcatcgccaccttttacctttcctactttattttatttatcatggctcgacgacggtgtggcggcggcacggcgagcaatgcagccgcggccgagccccctcgacgacaatgacagctgacctcgacgacgacaacgacggcacgacagtggtgagctcgtgacaacgattttggccttggaggaaagtagacgctattgtccaattcatcaaatctgaattgattggttgataactctgaactctcagacatgttgattaaatcctggacttgatacttgagaaacctggagtagaccgtggcatcagctgagggccagagttgtcgctcaaaatgttggagttgcctgctctagagcgaggatgaagataatgactcctggagttgactcgttagctgattaattgattgcttcattttgaaataaagcttgtcgaattttgagccttgtatttgtggagctcctgactatgcttagttgaaaaacaacagatcatagagtcaaaaaccgttgcttgagtgaagatatgcgttgaggatgtccgagtagaaatcttgaagaattcagcaccacatgtagtagtagtttaatgcggtgtcgaatctggtagcacatgccaagatatcgatcctgttgaagacatcctggttggtgaagtagtaaagctcgcaatgtagaggcaatagagttttcggatgccgaagacaatgaagatgaagtcgtcccaaaattataacagagttgcacagccgtggtaacgtgaacatgagccggcagcaagagaggtaaaccggtgatgaagacgcgtagtggaagcgaggagatgagtcggcagcggacgagacaactggtggggaagaagataacgcccatcaacgcagccgtggaggtgaagaaacaaatcggtgttagacaaggcggcaagccatgaagtcgaaagtgtcaagcaatgacgacggagttgtgcacccatggcggtgagataattagtcggcaacagaagaagcagccggaagtgaagacgatgatgcgcatcagaagcggtgtatcaggccagtcatgaaggcgaagacactagtcagcggcgatgaaggctagccggtggtgaagacgaaggtgcccatcagcagaggcatagcaggccagtcgtgaagttgaagacaccagtcgacggcgagtaggcggctggtcaatgaagacttagacgcccaacaacgatggtgtgaccatgcaaccgtgaaggcgaggacaccagtcggcgatgatgaaggcaagccggtcggtgaagacgtaggcgcccaacaacgttggtgtgatcaaccaaccgagaaggcgaggacatcagtcgtcagagacaaaggcgagccggtcggtgaagacatagatgcccatcaacggtggtgtgatcatccaaccatcaaggcatgccggtggtaatgttctgactgatacattcccgaagcgtaggagataaacttatagccatgaatccctactatgcacatctggatttggatccaggagaataaacatgtaggatgagtagtatctgatgtaaataccgtacttgaggaaatttcaagtattttagaatatttagaaatatgtatttatcctcgtatcaattttaatttccccgaggagataactccttgcgtttaaacactctgcctgattagtcatagccccctagcaccgggagtcggccaaggcacttcccagacatgcatatgagtgacataaattcgtcattaatggaacaaagtttcacggatcagaatttactactcgggtatttttgcaatttgtaagagtagaaaacaaattatcttatctctatgcttttgatttcttccgagtaatacttagcaccttgcgttatacactccatccaatgagcccctgagtgcaaggaatcggcccaaaagcaactatccattgataaaccaaacggaaaacatagggatatagagctccataactcgataggtatttttaatttgattatttcacaagcaatcaagataaatattatgaaaattgttgaaaaaaaagatataatgtagcccctgactcactacttaatggagaaccaattgatctagtgaggcaaaggaaaagaaaaatatcatataaataataaaataaatgatgacgtagctttttggtattccccttggtgacaacagaagtggccgatgtgggaacaatatcgtccatcaatggtgacgaagataccaaccgtggaagtagctgagatagcggccggtggtgaagataaaatgccatcgacggtgatgaagataggccggtgataaagacgtggatgtccaacaatggtggtgtgaccaaccaaccatgtaggcgaggacaccaatcgacgacggtgaaggcaaaccggtggtgaagaaacttgtcggcggtcgcggcggcggccgtcttggccggtagagaccatggcgaatttggatgtagctccaacagtaattagatgcatccacacaaacagatcattaaaccgatccatgctcttgccatgcgcgcgtacaagtcacagatccgagtccagatcaaatcctagtccgagggaatcgggctcgggcaactatggtacgtgcaaaataataaaccacagatcaaattgagattagtagtaataaaaagtatagatgtacatgtaaacgcatgcttttgcatactcctgatggcatggaggatcatattgacggcgccatgactggttgatgcatgccgacttggatcccggccagaacaaccgatagttgacgcgcgtgtgggtgtgacggcacagtcaaaggctgtcatgaacagccggttgatcttggtcggcatatacgaacatgcaaaagaaagcaattagtagattaatctgttattaaacggagaaacatatagacttgtatatgtaagagtattaaaaaattaaagatgtttccttcgtccgttaaaattaaaaaagtagcgaaaaaacaacagaaaacctagacaacggtatcccgttggaacgggatacccttatatgagacaagacagtacctgatacctgatacctgttgtgttaccagctgcatggtacccgatacctgtgaaacctgttacccggtacctgtgatacctaggacctgatacctgtgatactcgtgcaagacaattgttaatatgtctatcccgttgcaacgggatcccgttt

SEQ ID NO: 19247 - DNA, 1194 bp, Oryza sativa
tggtcacactaccgttcatgggcgtccacgtcttcaccggccggttttccttcgctgccgcccatggtgtctttactttcacggctggcctattttgccgccgttgaaggacgttgtcacgtcccaaaacgaccctaaaatatatcctttaaattatgcctagaataattaaaatccgtgtgaaagcctccaaaaattaaaatgtgcaaagtaaaagtcaaataaggcttagaggatttttgtatatttcctaaaagcctaaaatgtgtaaataaattttagtggaattttcagagcacaaataataattgttaagaaataaacaaagttgaaaaggttttataaaaagaaaaaaaaccctaaaaccctccctccctctctttggccggctcggcccacttccctcctcctctctcctcttcccccgcggcccactcggcccctccccgcgcgcacgccgctgacgggcgggcccgcccgccaccgtcgctgatgggtggggcccacctgtcatctccttcctcccgccgctcccgccgcctcgcccgcgcctagcgccgctgccgccacgaatcccaccgcctcccgtcgtccccgcgtgaaatcaatagtggggaattactctccgtgatcccttctccctttccccccatttttccctctctctcttgcattcaagcgggcggatttgctcccgcaaatctcgccggcgccattgatggcggccggacctcccggccggtttccttcctctcccggccgccctctcctccttccaaccctatttaaaccctccccgcgcctccctcgcccgtttccgccccttgccacaccgtctcctcactggcatcgagctcgcaccgtcgccctctctctcctccgtcgacgacgaccttcggccggctctctccactcgccgggaccgtttcccgccccggcgtcgcgtcctccggcttcgccgcaccgtcgccgtccccgttgacccccttgtcgagctcgccgaccgccggtgcgccgcggtccccgtcgacccgagcagcgccgccgccttcctccgctccggccgcctttttcgtcgtcgccgtcgacctagggtgagccgtggaccgccgcctcgtttccccctttccctcccctctctcggccgccgctccgccgtgcctatagccgccgccggtgaccataggggagcgg

SEQ ID NO: 19248 - DNA, 894 bp, Oryza sativa
taacagcacaaatcagttgggcagagtttgcgcgaaccttttgatgagccactcagttcgaaattggactcctggagctcagcaatccgatccctcagatcgtgttcattcttcttggcaagttctctggcctcgtgcagttgactcctggtggcttcgagggttccaagatgaggaactagtctctctagggttgcggttttcgcctcgttcctaagatgaatcctctgcggagcagtttaatcagtgctcgagccagacggtaaacaagatggctgaggtcaggcgtcaaggaacttacatttacaatgcgagtcgcttggttgagtgcctttttcagtaggcatacctcttcatcttctttttgccggtttattacaattccttgaggttgcaagttgtcatcccaccacttgaccagaataggagggcacgaatctttggctgcttgtatacgatgaatttctttttcatcaccgatcattggtcctaatgcatccattgacaaaggttagacaatcgatcagagttatttgggtcaacatggtttcagacaaagtgtttacctgtaatgatttttggacaaggacgagtggattcggatacttttaaaggggatccagatctccggtcattgctggcgtcttgtctgcgagggttgtctgcttgggtttcgacttctggaatctcttggcttggccctgcgtccgactggtttccagtcgggggctcctgattaactccggcttcggcttcggccgactggattccagtcgggggttgatcaccggattctacattatcggttgccggttgattgtcactcggatgatcctcagcagttggctcggtttctttggaagaacttgtgtccacgttagtcgggtcagagtc

SEQ ID NO: 19249 - DNA, 1080 bp, Oryza sativa
cgcgcttttcaagtttttttatgggagcacgtacatcggtaggcatgcaaaaatagggcaaaacgtgtgagtacacgtacgtgtttggcgggagttttttttaatgagttctctaaactgttattgaatttaaaatatgattaattagtttttggctggaagcatacaaactaggataaaatatctaatgaacgttgtctagtttgaatgtgtaggaaaatgtgattatccacgttaattttatatgtggctatctatttagatttagttgttatgtaaatattaagaagtttaagagataatatgtaaaaattgtaatgggagtatgtgttgatggcagcttcaataccaccaccattgaattctttttagaggagtatagataatatcttattgggagtatattaatcgatgtttcaactcacatacatcttgtttctaaaattgtccatttcaatcaaagtaaaaaaataagtttgctatacatttattattgaaacgctcagttaggaaaaaaccaaactagacataaatgagtaaaacattacgacaagttttttcttttaatggtatgcaaacttaaatgtaagctagatttccagcacctcggtgcaataatccagagagtgccatgatgtaaaaataacttggccagcactatctcttaggatcattccaattcctcaaactccgatgcgccgtcattcttctgctggccctgcattgcgccggggtattcgacggcacctgacatgttgaaaccagagccgaacctgaactccgatgcgccattgatgtcgcccatctggttaccgaatggagtatcgtcgcggatgaagaactgctgctgtgccggggtggtctgctgcggttgctgcatcatgccattgacatcttcgaacacacctccgttgctgccgccgatgccacttccctgtccaaaaaagccttcttcaatctgtatccttgggttgactgcattaggcctctccatgatcgtggcattgtcgttgctaaggttcttgttggccacgaagttgttgtcgtacatgttcatcagctctgtaattgacctctggc

SEQ ID NO: 19250 - DNA, 39046 bp, Oryza sativa
ggaacagattttaccggtgcactgtaccactgtgcacagcacagtcacacaacctgtgacctgcccagcagcagccagtactactaggggtctaggaggacgcatatcggcatatggggaggtaggctagctaggcctaggagtggtttggcccaacttggtaggcaccagaccaccagtcaagtcaggggaatccagatgcctgcctgcccgttatcatcatggggcgcgcgcccccgagagcgcgcgcacacggcgagtgcgcgccacggaatatgctgcctccgcgcgcaacgcgacttggtccatccatcctttgcttccccaccgagtcatcggtcgcccaccaacgctgcgcccacccaccaaacctttccctgcgctgatcggacggtccccagccgatccgatccccggatcaccgatccggcgacatgcctcccctccatcatccgccgatcgatacacgcgccaccgaacggcaggtgaaagatttacgcacgccgcccgcccaacagccaaacggtagcagtacacgatcatcccgtctgatgcgcgcgttcgccccaccacctcctcctcctcgatagatcgatcggtcgtccgtgtccccactccgctcatcaccgagaggcgactgcattgatgatcgatcgtagccagcgacgagacgacggggctagcgcggcgctgtgtcgatccagccaggctgggtcgcgccgcgccacgtacgtacgggctctctcgtcaaacgcgtttgatcgatccgtccccccgctaagccgccgtaccccccctgttgctttcgggcaaggcaggcgggcgcgagcggcggcagccgggcaccacctgccaacctgtgtgcatgcatgcgccccagctgcacgggggcttgaaaccgaatcgcgtcgcgtcttcttctcactcgcattacctcatcagccgcgcgctctgcaggcgtcaatccggcacgccacatcgtccgtcagcgcggttcagctagcaaaccaatggcgcgtacgtgcacgcacgcacgcacgcgcacggagagagaggatccttggtgcatgcacgggctaattcgctccagtagctgacgcttttgttaggccggtgatgacctgatgacgaggagaagaagatcgatcgaactaattttgagattgattattgcggggtaattcgatctcgcgcgccacacgttttccgttttgtttatgcgcagttgatactgtccttttgctccacctcttttggtcattttattagtgccctcttgacgctaaacaatgattaggggttgctttctcacctctgtttcgtttttaagctcatagggcttgtggccggtccaaacgactcgaccaataaacaacatcctatacaagcccaaataaagaatggaagggtcctaagcacgtgttagcacgcccgtgttgcggaataagtagtgattaactttagtgagttgttctctaatctcgtcatcaaacttaaaaattgtctatataaaatgtctttttaggttaattatagagtttaagcttttgggggcaattttaggtcaacaataagctattaatggattgatttttcaaggtcgttacaattgaactttgaccatcattctcttccatttcgaatatgctatgaacgacaactatgaaactagaatcttgtacatggaagtattttcaaacatgtcaatactattttaacggcagtaaatatggatgcttccagactgactattctaaaatcacaaagtttaaatttagaacacatcacgcacttctcatatttatccacagatcaggatgcctcaagaatgccccaaaggcaaattgaccatttcaagtcacattagccatttccttttcttatattatcttgcatggaactctttgcataaaactattataaggggttacttagggcagattaagcagatctcgagaaggatttgtagccgacagagccctgatttggtggcctcacaaggcctaatccttactacctttcaactgactcaactgttcacctttccctagagtttctccatccccaaactccccaacgtttttcaccccaagtcaccccaagatttgtcttccaagggagaagaagagaagaaaatggtcccagtagatgaggcttttcttgtggccaagcgactgtggatccgttgccacgttaactcggcaagtgctgtcgactaagctgtccctgtccctgatctctatctctctatctatctatccccatgatagggggcgtccctgttagcatgtgaggaggggtcacaagtgacaagtcccaccaccttcacaggctaagggataagatgaggacggatgataagtgccaccttgcaagcaataaagggccatgggagatatggagatggaggagagatggggttctttggagttgtgatcaaacaagggaccatccatcaatccatccgaaattcatcttcttccctttttaagataagccatcaagggaagcttagctttggactgcctaacttttcttagggttgcagctttgcattgacccggctttacgaaaagctgagactatcaaatcctagctttccaagcatctttgatgtgaaagacattgagatcattgacgggaaacaagagaagcaactcgaacaggatatgtcttttttaccaccaatgagggaatggagatgggatcttgggttagtgccactggcaaagtggcaacatcaatatcgaagtgaattggagtccaggtaaattgaacatttcttctgatgaactggcagaaacaaaagtatacctgtctagttaccatcttgacaaaatttccaggcatgaaagatacagcgggaggaaaattttccacaggttaggttgatatttaaccccaactggaaattgacatctatagaggaagacggccaaatgtaccgcagcaatcaaacatgaaacatgtataggcaaaacatgaacatcagtagaaggcttaccaggtagaagtagagccgtagagttactcaagagagcacttcatacattcaccggatgataaagatacaaaccacatacccaaacaagcacaggtgacttaacaaccagacatatgaacagcatttaactaacaaattaaactagaaataacattaagtttccataggaggtttactggctggacggacatacatgtataaaccagttccaagttccagccattttgcaactaatgcaaaacctatatgagaaagacctatagaattaccgggttcacaggagacgcttccaccatggaagcagagggatgaccatggtgaactttaaaagcttaaggtgctctttctttaaacgctacaagtttattcttcagtactctcagtagtaccaattcgagccgtcattcttctgctggccctgcattgcgccggggtattcgacggcacctgacatgttgaaaccagagccgaacctgaactccgatgcgccattgatgtcgcccatctggttaccgaatggagtatcgtcgcggatgaagaactgctgctgtgccggggtggtctgctgcggttgctgcatcatgccattgacatcttcgaacacacctccgttgctgccgccgatgccacttccctgtccaaaaaagccttcttcaatctgtatccttgggttgactgcattaggcctctccatgatcgtggcattgtcgttgctaaggttcttgttggccacgaagttgttgtcgtacatgttcatcagctctgtaattgacctctggccatccatgggcaggccgaaatccagattgttcagagcctggttcggcgtgttgtaggttgccgggaagatggccggtggcgatggcttgttctccgtgctctgctggagtggatcattgtacttgcaagtgtattggtggctgttgcgcgcgttccggtcaaggaacccgtatccatagtcgctatgcgggcactggacattgtggcaggtgtagacacggttgttcagcatcagctcaggctccgcgccagacgcgctcctcttctggatgaactcgacatcggtggcctcctccttcatggacgccggcatgaggaacttgtcgttcagcatagccgcgccgaggttgaacgcggtcgggtcggcgacaacaacagccttctggttgccggcctcgtcgcccttgcagtcgtcgacgacgtcgacgtcgtactcacttgagctggcgttgaacgatatggcgctggtgatgccgccggtaggtgccggagggcgggcaccggggttcagcttcaggtacagctcctcttcctgcttgacgacggccagccaggtggagatctccttggcggtcatcttgtcctggaggcacttggactgccggaccagccggcggatcttctcgatgtccggcgacatgtgcttgatgacagcggtgagcacgctgaccttccaggccttcttgaggtcatggggcttcttgtacggaggcgggccctggtccttggggatgccgagctccggccaccactcctcgtcgccggtgggccaccacggcggagggacgcccttctcgagcgggtaccgccgctgcggagggtcgcagtgctgcatgagcgccgagagcagcgacccgagggtggtgtcctgcagctcctgcagcgagtgcgggctcccggtgccggaggcgagctcgctctcgaagcccgggacggcgttgtcggcctggtacttggcgatggcggcggggccgttgcggtcgaagcggaccttctccttccaccagccgcggaggttgtcggaggcgccgctcaccggcttgcccttctccgggatgatcccgtacacgaacccctgcgcgcggcacacctccatcatcttgagcatgtacttgaggatgccgtcctgcgcgcgcgacatcttcttccgccgcgcctgctcctgcgactgccgcggcttggacgggtcgcccacgacgccgcccgcggggtccttgccccggctcagctgcagctccttgagccgcttcagcttcatgcggtcgcgccacatgcggcgctccagctcctcgatgtcctccacgtcgtcgtcgctgtcgtcctcaccggcgtccgggaagctctccggcggcgggtccacgaggtcgccctcccccatcacgcactgctcccccgacgacgtctgcggcacgagcgcgccgaagccgaggttcttgtcgccgccgttctgctgcaggagatccacgaagttgtgcacgccggggaacatcatgccctggtccatcaccagaccacctcccatcatcgcaacgcacaacctcgaaataattcgctcacaggtagacgacgactcttcttgtaccacttctactcaagtagtaattcacctgcacacaagcaagagaagaagctgatgttaattacagaaatcaaaaccaagtttaagcaactgattacttcgtctaaacgcaataagtgttactactacctccttaactgagaatacatgcgcaacacgactacggttaccgcagcatcctaatgcggcaattacgccattaccaaaaataaagaggcagtactggtttgtttcccttcagaaaacattctaagatctagaaagccaggagaccaggagattatcgcgcgagtaaaattaggtttgcctattgaagcaagggccagagcctaattttgcatgtgtttggtgaaacagagagatctttatctgatcagacatatctcctgcaatcctctcacagagttaagagcacgcaattaacagtcatataggacatggttatcttttgttgtgacataatcatactacacagcataaaggtatcatgattcagacatgatcataaataaagtactaacggaagaattagtcaaagccgaagcatgaaaacattttgtgatgcacgggattagctgaaacggtattttcatgctgctttgaaacaagtagggatcaaaagaaacttaaacatgtgaaatttctccttttcttatcctttccgtgaagtattttgaaacacatgaaacaacaagccttgatcagatcaaagtgggagatgaaaaaggaatagaaaagcacgggaaaaacatttcagaaaaaggatatatttttatggattattttttcggtctaccacgaccggcatggactgttggaaacaagaacatgtacccatgtgcttatcaaaaggaatcggaggccatctaaaagaacagaagaaaacaagagacgaaaatggatcaagaacacatcaaatggagaacagaggaaaacatacaccgccttagaggaagcatcaatgattgtttttggccataaactcgatgcaaaacaagatgcttccttacacccaaccacttaacatttccagagcaggatttacaacatgtattccttaaattaggttaatctctgagatctaatgaacacaacaagagaaaactagtagaaaatttctaagtttttttccctttctcctttggctggcagcaaatcgtataatctgaaaaaagctaagctttgacctctgccatggatttactcaagcttggcagaaacaattctacgcacaagaacagaaaatcacggaataaaattggaagggaataaagggcaacgaagaagtagccaaacaggaattggctaccgcaggcagctctagcatccacgaaatatctgaaaaagaggacaaaagatctacccaaacagatcacagaccaccaacctatcatgaacacaaccacatcctctccaagaaaaaaaaagaaaaaaaaagaaaaaaactcgaacacaagcaaccatcaacaggaggacatggagaacagcaagcccacaacagaaagagaaggggatagcagcaagcaagcaaaggcgagatcgagctccctacctctccctgccgatctcccacttgctgttttcccttccccaagcccgctagctgttatttctcctttgccatgaccttggaggagaggagaaagggagagagagagagccaggcacgagtggggaagataagaacagcggagccaaagccagggccaaagccaaggcgcccagcgcgccggggggcaaaaaagtaatcggcaagtggagggaagggtgtgccgaaatgggtggtggcttgggtgcaacagcgacagggaccttctcctccccctcccccttttataatcccgccctaaaactagtcttcctcccacgaacgaaccgccctgcgccgctgcgctgcggcggcggcggcggctcgctccggtaagccggtaactgcgttgctttgggagggtgaaaaggtgaaacacaggcatctgtccgtgacatgtggggtcccaggatcagagagctaatagctaggtgtactgtgtccaggccctccaggggctgcagggaggccggtttaccgttttgccctcggtagggttctgtttagtactgtatgtagtacagtatcagattggttctccctcccggaggctacatgggggagagactgattttctgcgcgcttttcaagtttttttatgggagcacgtacatcggtaggcatgcaaaaatagggcaaaacgtgtgagtacacgtacgtgtttggcgggagttttttttaatgagttctctaaactgttattgaatttaaaatatgattaattagtttttggctggaagcatacaaactaggataaaatatctaatgaacgttgtctagtttgaatgtgtaggaaaatgtgattatccacgttaattttatatgtggctatctatttagatttagttgttatgtaaatattaagaagtttaagagataatatgtaaaaattgtaatgggagtatgtgttgatggcagcttcaataccaccaccattgaattctttttagaggagtatagataatatcttattgggagtatattaatcgatgtttcaactcacatacatcttgtttctaaaattgtccatttcaatcaaagtaaaaaaataagtttgctatacatttattattgaaacgctcagttaggaaaaaaccaaactagacataaatgagtaaaacattacgacaagttttttcttttaatggtatgcaaacttaaatgtaagctagattttgttaatttgtagaatatactacaaactataattgtttggccagcaaacactaagtttagtgatcaatttactcagacaatttaatatcctactgtcattgtaacatactataccatttacaaagagagtaaagtactcaaatgttgtttaattcactgccaaacatttcctacttttttcacatcacaaaaaatcaccttttggtttatagccatatttgtgctccactcaatctacaaaatagagcatccttcatattgctagctaaggtgtgctccatttttatataccataggcaacttaaacatagcaaacttatatatacttaaggctaagttcgggagagcggttgggctaagctttttagtgacacctgaaatgagataaacctttgatgcatggttaatcgagtattaattattacagatttgaaaaatagataacttttatttttttacatgaaacacagtttagctgttcgggatgtgtccttacaaagaacgagaaagtagtcaatcataaaatcagtttagaactcaccactagagcaagtactatagacctcaatgctcttgcccccaagatgcccgatcacatgagatggagaagagaggagtcacctcttatgtatggggtaacatatatacatacttcttagtgcaagtttaataataaagccaattactagtagttccaaaaattaaaacatcatctatatccaacctaaaaacactcatacagtagtaagctgtaaacatatattgcattattaatatctaatccacccaatagtttatcggagctcgtggtgcagttggctacaaatctatagcccgcttttttttctatctcctctcctttttcttccgcataaatacaaatatgatgttgcaacttatatagcttgcttacatcatcttgttgtactcgctcttaaagagatgagaaatagaccaataaattgaatgaaaataaataaagtaaaattattataatatattaggacaaatgtattaaagataatatgttgtatgtgttacctcttaattaatgagcattaggcagagttttcttagggtgttggaacccttctctttggtacacaaaacaaaccgatgtattagcacgtgattacatatgtactagctaaagagattttttaaaccaactttcctataaaattttttttgaaaaaaatatatcactcgacttatgagctggaaagtttaagagtaaacaaatatgcagatttttcgtttggtatttttttaaaaccataagtcactattgcactgttaagccaaagttaggttggagggtttttttttttttgcttaattgaggtgaggaataactcaaccattaagtttaggttttcaaagttatcggtctataaaacatataagaaaaagatgaattaaaagactaaaccaataaacccaagtctaaaaaagaggaccttagcacttcaagaaaaaaatatattaacatacatgtaaaaaatgagagagtaaattgcgaaagtgtagttaaaaacgcacagacttgctcctagtccatcaaacgaacagaaccaaataggtgcatgcgagtcctaattctttcggttactgctgagctcagtagcacctactacagctagacaatccgcacaagatccagcggctacagcacagcaaggacagcgctagcgctagcagcagcagtgcgagcgctcacagctgctacggagggcaaaacggtcatcggcgaagccacactttcctcatcaaatccggttaactttgacggccttcgattccgcagccgccgccgcagcagcgcgatcctgaagcaccaccacgtgctgccatatgggcttgggccacgtgtcctgaacaaacccgggcccactccctcggccctgtgtggctttacacgcacgcccacctcactcgggccccacacaaactcgggttcacacctccccgggaacgcgcgtactacgcctcggtagattttctaccgcagtaaaaagatccaacattaaccacgctagtgtggagacagagagtacggtattaatcgcactgcaggtaaattattagagcaagtttaatagtatagtccactactagctccaattcatttataactaatataatagataatttatacaataattgcttactatactattagtatatgatcacacctgttctacacacattgtgtcttgaagtccgtgctgcagctggctacagatctgtagcctgctgctcttctctcttatcttttatcttattaaaatatgtttgtagccagctaatagtctattattgtatcagctcttaatcgatcgagtttgtgcaacagtgcaagttaacacggaccttaatcagagccagatgctgttgcattgtactcctggtacatttgtgtgcttttaacttggagtactgctggttcttgttttcctcggaacaacttgcattagtactgctactgcttcagataccgttggccacagcaatacagggctacaggaatctgatagtttgatcttgttcaggcaccgggaaataattgggggcgacggatttaattacggtttccgcaacgatcttgtatttttttttcctcttcgccatttaagttgtactactcccccaatcatgtcctggttagatatcaattttttccttttgcaggtaatacttcttccgtcccacaatataaaaagttctagagttggatacggttgttaagggggtctccaaaaataagtctctaaggtagggacttattttttagagatagtggtagaagtgagtggtagatgattgtgattggctgagtagtggagataggtgggaaaattgaatgttggagggttgtgattggttaggaagagaatgttggtggagaagttatattttgggacaaatactaagggctaaaagttgctatattttgaaacggaggaggaagtagtttttttggggttagatatgttttttctttggccattctgatgtgcccatttgcttgtacatatgctccatttttctaggtcatgtggatcgatacagtagggtgtagtacggtgtccactgtcttagacatgaatagaaaatgaccggacatacgtatgcctcctatttggagtagtagacgtggttgacgtattttgtgtactgcttcatgaaaactaccacatccagaatttccttcctagaactgtatagctataactcaatggtacacttccagctagcagagtacagtaaaaaggttactagtagaatagcgtactccaactttttctctacaaatggcactactactggagtgctactctaactccacgtggactatactgtagtagtaagctcgagttttttttttacttgctttcgtcagacgagcaaccacgcgcagtactagtcgagatgcgggggggatataccgccggtgaaatggtcgccggggcctatccaggccgtacacgtaaaggcgtggggtgggtcgtggtcacatctcgggccgtccgtcgtgaccaccaatccgatctaccgcacgtgctcatcgtgcttcttgggcggtgaacacgtgtggccgtctcggtagcatcacctggtcccgtggaacgcacttcagatcggctttggagtggtccgcggttgaaatgcatgatgccagcgcgtgtacagttttgtactgcacacgagtttgggcacacacggtcggtaactttgctggagcacgcagtaactaacctggagaaatattgctgctggtcgtgaggtgtttttttttggacataggctgatgagacgtggtgaatgaaaagggaaaactaaatgactttggagtaagatttttttttccatttctgttcttagtggtgtccaatagtttgagtgacaaaagcgacggaaaattaatggaaaaatttaagtttcaaatttagagcttagctatggcttataatccgtagctcaaacaggcatgacgacaatatatgctctattcaggacagctaaaatttttgacaattaactggtgactgagtgataatttagagaacctagcttccgataaccaatttattttctagaaattataactattactctatacgtcttaaaaactggttggtttagcctaaaagtttatcccatgaaaactatagttttaggttcgggtttggagtgacaacttcctcgttttctggaacggtttgctttttagaaaaccttttttatagaagtattttttttaaaaaaataaatctatttgtttaaactttgtaattatgaacattcaatgaattattcgttctaaaaacattcagttaattatttgctaatggcttatctcgttttatataccacggagttactgcggccaacactcgaaatgaactacaccttaatactacttcatcttgtttttagctatctaaccaatagtacccatctcctcctaatttccttcctctactcgttctctccacatggacaaaagggtatgttagtcatttatttatttattttatatgtttttgaatttctaaaataaaataatagtctttgagggacggatggagtaaagtattagaattcaggtgagaatttaaactatttgggagagatcaaattctaggagtagttgtagacatgtagttgtcagaaactctctgaaactgacccatggttttacttgagtgaaaacagcgtgtacaatctttgatgagatgcagaggaggttgtatttttgactaggaaaaaattccaccatttttccatgtttgaataaagaatgctcttactttaattcaaagagtactactcttagcatatggagtacaatcagttgacctatagatataaacatgtgtagtcaaccgcggccattgtatcgatataaattgatatgtcgcattgtcaatttgaaaaagtaccaagttgatgaaaaagaaaaaaaaactggaaaaagaaacaggcagccgacaacctgaaagaaatttcagtcgatgtgctggctagctcttaatttcatagtttgtccgagcacgattcttagcccttgtttagttccaaactttttctttaaacttccaacttttccatcacatcaaaacttttatacacacataaactttcaaatttttcatcacatcgtttcaattttaaccaaactttcaattttgacgtgaactaaacacacccttaattatccagctactagtaattctgactgaaatactcctacgctccatttatttatattttctatttttcagaccgagggattaatatgtattttacatatatagatgggaggagtggagtttgctcagcctcactactattttttttattcgccactgactagctgcacgtacatgctgcataattacgcttctaggtacgtcaagacactcaagacgtgaacagaaaagtcaaatcgtatgagtcaaaactattgaattacaagcgggtataatcttctcacgcaaaaaaccccgatattttcttcactgacgacaatatttttttatcgttttacttgtagatgcacgatcaaacctgacctattattcaactttatgacctgataaacctgtaatattatgaaagaaattttatactgatctatggataatattttcagtgtacagtctagtaacaaatgtcacttagttcgtcgaaaaatataagagactttaaggatttatatgagcattacttatccagatgtatcctaaaattcctttattagaacaaaattagtaaatgtattaatattttaagttttaattttatatacataagaaaaatgattagctacccaacatggccgacatctacatataggatgcacaacaaccataaagtttgactttaaaaaatctgagcaagggacaaaactttgcatgagatgaaataagcaaaagcttggtaggggatatatacaaaaccctctctgagagtgcctcgtcttttcgcttgcgcttatacttatcagccacattttaaatttttgaccttaaatttaaagttaatttcagggttttttcatcgaagtttattttttagcatttgcttttagatcgctaagaacacatatataaaatttttatttacaaattatttttcaattgaaaatatgtcgtttcgcgtatccggagggtctggaaatcggcaaatcatgtactatgtaaaaacatacttggtataaaacataacacaataaaaataaatcacatattaagtggttaaaaaatatcttgtcgatcgactccaataaccacaatatcttggacagacactgcactaaggataaaaaaaaggtaaattgaatccatatgtaaatgtgtttattcaaataaatatcgttacaataaatgtgtttatccatgtaactgaaactgtacaaaattaggaccatactactgtcatcatattttccatccatctcttttttttcccgttttattccttctttctcccgtctaatacccctaaacattggtttagggacccatataacagttccatcttcctttatcctcccatattttctcttcctccatctctgtcctctctccagctgataccgcaggcggtgaggagggcgccagcaagggaggcggcccaagaaaaagatgccaattgcagccgctcccgccgccgcgcaggtgcacaatgttgtgctgcggcatgcctccccgacgtcgcaaccccgcgcggcgacatggtgagagcagtcgccgttaaacccgagctatgtaggcgatccagtcggtctccggcaccggtgcatatgtgagtgggtgcttcaaaacccaccgtaggtgccaaggccgacaagccacggttagacctaatttatagaataacatagcaatatttataccaccaaattaattttattaaatccacaattgaatatattttttttggtgctataaaaatattgctatgttttttctataaatattcccaacctttatgaagtttaagataggataaaaccgaaattctgaaacggatgggattggagaagggctacatttcagcgtccgcacggacgcacacaacctgactattgttcttagctaggctagctagcaaaagcattaacccacaattaggggcgcattaaccattggttggatatgattgaatctaggccgtcaaattgctggtatataaaattcagatggctaaattttggcgcatggctcatgagcacaaataccgtgtggagaatatagagaatctatcgcttaattggtccatgatatgagaatacatagaaaaaattaactataatatactcttgagttctacacaatctagatttattaatatcagtatgaatgttgaaaatgatagacattataaaacagagaaaatatgtcacattctattctaatttttttttacggaggaagtattacaataccatctcagcatgatctgaaattcactaggccagtaggcagtagctagttgcggcgtcttgtttatttatgatttggttggtgacagtggaagcaatcattcatccttatctcagtttcggatctcgccctgaacctgtcgccccctggccattcagacaacacgaagcgctggagccatcatctcaactggtagattcacctcaaaatctactagcagtagcagattgcatggattttggagcagtgatttactaccacaatctagaactcgggacgatgaaattccgtcttcaataggagtaggaaatcaaatgagtggcaatcgggtccccatgtgctgtacgccagtttcaattccttcttgatcggatttctgacacgtgctcattactcctccattcgtctcgatcggtttccagtctgtccgtgccacctcaccgaaggaagaggacacagatccgagctggtgctttcgcgcaaccctaccaacgtggtaactcaaccctttcattgcactgagtacggagtatcttttcaattttacatcggaccacccacttaactctaacgaacttgtcaatcctagtatctgatataccagctgaaataaatgattagtatttgatttttttaatatctatttaatttacgtatataaacaaataaattaactcatacgaaattaaaaagctattttagaaaagtattccaagaaaattttacatatatatttttttcacgaaacacattgattacaatttgactatatcgagtagcagtatttgttcctctctaacctcctctcatcttctcaagtattgatattgggtaacgtaatttcgccaacctttctcttaacaagtggcatgtgttagtagcattttgtccgtgagtccatccatacaaaatggaaagccggatgttataattttccacctaaaatatacaaataaaatggaagataaattaggtgtacgctgctcatttattttctttttgggagctgtagtagtctcgacagttggctggacaactgtacattgccgttaaaacccaagcataaattaactgattattgtgacctcacatctcactgacttttttccagtaatcgtgacgcgccacctttttgcggcaaacattttcctagtacgcaaggctcgaaatcaactttctagtgtaagcaagataacatagttttataccgggtgattgcgatagaaagtaattcttcttgtcaagtgcatgccttccacccttggtaaattcctcgaccacttaaacaaattatgcttaacgcacaaggcggctgatagattatgctatggggcacccctagtgtcttccatcatcatattagtagtagctaaaatgatttatcgccatcaccatcacgtgggaaatagcaaatgccaaatgcattgtcaatctatactcctaagaaagaggaaagagcgcgcggctgtttgatcctatctgaacccctgatagcgtagtttaatcagtaatctctggcattgtgggtgctctctttttttcctttttatgtatactctgttttaagaactttcagctattctgacttgctgagcaaatatgataactgatatgcaacatccacccaaactctctccaagttgtgccgccatttttttttctttttgtcctacagaaattcttgtgagatcaaacttccaagcagtccaaatgtgcccatttacttactttggggctttctatatactagcaggtaggagtactcatcacgcagggagcaaagcaaagcttgccactcactgccatggcaccgccccaccgagagactccgcgactgcaaaaaccccaagacggcgagctcccggcggaccggtcgggccttttagccggccaccgcccacgcggggtgcgtggaccagttcgccgctgttcgacgatgcgaggtctcgagaccagagatgcggtttggtgtcggcaggtgatattgttgggcctttttcacgcggtttcgatccgtcaaagtttcctcacacatgctacatccacaacaaaaaagaaaggccaccttttgttgttgtagtagtagaagtattttctgaagaacctttcctgtcctgtaaaaatattgcagaaaggagaaaggttaagctgtggcaagcagggagacaaaatgtatttggggatgaggaatagttctacagactacagtcgtcatccagaatatgctgaacggcaagtcttcgaattgaatacgtatagttgaagttgttcttttctccaatagagcatggggtcaattccctgcgtgttctctgatagagtagaaaagaagtggttacgttactgcttaatcagggttttaacaaagctgatggaaaccgctcggttttgcacaaatcggttaagtaaaaaaaaaactcaattttgacaaaatttagtcgaatttcacaagtattaattcagctatttcgtgaaaactaagaaaactgctctggagtttttgaaggcgttttttttagagtcaatccattttatgacatcgacaaaacgcgggttctacaatatgccactgacaaaactcagttccacactataccatcgaatgactcattttcttccttatatgccatcgacgttagtcaaccgccgttaaaagatgaaaaatgaccattttacccctagcataaaattgagattttgcataatgccatatcgcggtaaaaaaatcttggatgataaaaagacaagcaatttcaatttttcatcaatgagaataaatagtgaatcatgatcagtgaaatcgatgaggatgcatcgtaccctaggggtaaaatagacatttttttgctcttaacagaatttgactaactgttgactggcggcgatggcatgtaaggaagaaaagtagttgttcgatggtatattatagaactgagctttatcaatggtatattgttgaatccatgctttgtcaatggcatagaatggattatctctttttttttaaccctgctgcttactccctccatcctataaaaaaccaacctaatactggatgtgatacatcctagtactactaatctggacatacctctgtccagattcattgtactagaatgcgtcacatccaattctagattcgtttttttggacggagggagtacatctttgttaacataatctgatgtgagactggtcaccaaatatatatatttgcacttcctgaattttgtgtgctctctttgtgggtagtgttacgtgctatttattgagcggatatttgtaataagtggttgtaacttctttgaagtaaaggtcgagctttattctatctaaaaatatatttggtcactaaataattgtacgaacatatacaggagaaagtcaacactagcaactttataattgccacgagtgtcaactgtacgtacacaatgacagtaatgattgtggcagtctattgtttataacgcactactgtgctagctgtatagaatacgtatctatatacctcgagtttacgtattatacacctcaaatacttgatttggtgacatatactgtaccagtttgatccactctctttctgaagggagacgggcaatttttcgttagacgatgacggcgacggagaggtggtctctatacgcacgcacatacataagcgtgtgtatattcacggatttagtcgagttttttctatgtcttcttttgattcaccaaacgaagcattggtccttttgaaattagcaagggggtaatcatttaggtgagccattagggcgcttgaagggtcacttatgaatatagtacaatcatgctcctaatacacacgctactcttgatttgcaggaacactgtcggaaactgcacagtatttcttgatttgcgaatggtagagtttactacacatgtggcaacaccagggattaatctacctctatcactgtcctgactgaatactcgagacacctcctcttgaaacattcagaactcgaggtaattaagctgaatgagtactattatatcgataaaacaatggattgccatggcttgaagatgagttgccggcaattgagggacctgatcctgcgcgacgcgacgccccagaagggatttctctttgttatccactgccccctctcgagtcgagataaaaaaccacatgccgcttgccgtcttcctgcccaattgaactccggagagcgcgcgcgccggccatggcggcaagccaatacatggacaggttcactgaacaactgcctgccactggcagagacagcagcgagtcacacggagcgggcaaagcgaagcccggcgcgcgcgagcgatgatttgtcaatggccaattggcaggcgccgtgctccctcccgctcgggcagcggctgcgcctgaggggatcgttacacgtgtagccgagatcctgagtagatttcactgttccatcttcgagaggtaaggtagcccgcacgcgtagggattcggattccgtgtctcggtcgcgcctacctgtccatgttcactgttcaggacttcagagaaatactactcctagcgttggtttccgtcgcggacgatctagtagagatctcgtgttcgaccatctctgcatctttgctgagtaaatttaccctgatctcgtgatcgaagtaattaaaccggactctaaagttccacctttcatctgctccgctacccgtatcttgtcagaatacttgtgtggcatagtagtccccacactttcactaggttcctgtacacatccatgagagataatgatctgaacatcgagttaaaccggcgcataaatttcacaagggtgtacgtcaaaaaaatatcacaatgaagaggcattaggttcagagattccatccacggggatgcgttgtggaactggagccgtccgtaaagagaaataattaatccccacgagtttgggccttgcgactaaaccacctaaatgctaaacggcctatgaaaaagttcactttagatccctcactgggtataacacattcttcatctcttaaaacaggtgtaaatatagtcccaaggtggtttggacaacggtattggctgacgtgataccacatgacactattgacttgatcttcatctaacgtggcatctacgtgatataagaatcagaaaatataaataaaaatagtcccacatgctaggcacaaaggaaaataatatagaaaccctaagcccacatgtcatcccaaccattccttctttctttcctctttattttctctctccatcgtcctctctatcctctctctggttgacccctccccttgacggcctcagttggtcggccaagatagcggcgccgacggcagagagaagtgggcacccagatgacagcaatagtcggccatcccaaccgtttcgttgtcaatactagcatccagtgtggctgccggcctccgctcctccttaatccctctccaccctggtgtcggcgtcaagctccctttccgccttcctctccggtgggacgtgtgggtcgaggaaattgagaaggcggcggttgatggtgctagagcggcaggtggggggaggttgggggagcggtgttctggtggagggcaaggcattgggggcttgagctccagtgtcagccagctccagcggaggcccacgcgcatggagatgggtggatttggcggcatagtcgctggaggagcgagcatggttggggagagcaaatctggcagtggggcgaggcgctgggggctcgagctccggcccgttgtcgatggggatgcaatggcgctcaccagggcaaaacctccttgggtagccatgttccctttctccatcgctaccgacaggtacatgcgaccgctgaggttgcggtcgacgttgtacatggcatccttccacttgatgcaacaacgcggggtggatgatcaggacggagctcttgttgtcgtagctcctgcggcaggccttgagagagggcgagcgacgcggcggccaacatcgagctcctctgcctagctagtagaaggcctccacccgttgctgcactcctccgccgtgcgtccataggtccacacacacacacacagagggagagtgagagagagagagagaatggaggagtagagatgggtccctctgatatatgggtcctatatatttttaatttttttcatgctgattaggattccacgtcagccaaaccatcaaaaaaacgactaagagactcgattcatactggttttgatagttgagagatgctctatacctagtattgcggttggatgacatgaattaaaacttgacccataactgtaaggtggactttttccaacgatctataatggctgtctcaggaaagggtccaatacgcagaacacggccacagaatctcgacccctttgctataggaataagttcactttgggtcttaatatatcacgaagtatgaaattcgtccataaaccgaaataccatatacaacacctccctcccttgcctctcaataccactgcaaataatgtcctatggtggtacctacgtggatggtttgacttgatccttatctcacgtggcactctctatctcatccttccttcgctatcaatgaggagtcaacgccatgtgggacgatgaccaaagtcaaaccatccacgtaggcgccatgtcagctgaaaccaccatccagatcgccttgtggccttatccacaatagttttgagagttgaggaacacgttgtttctggtatttcggtttagggacgaacatctgacttggtgacaaattgagggaagtaaattgaacttatttatttgttgtacttcactacatgggctcagaggatcagcttgttaagttgggccttccttcccttttcccaggcctatcggcgctgccagcgctatcttaacccagcccattcatattggattttccttttttttgacaactatccatattggatactgtactagtttcctggcaggtaggagaagaagcagacaaaactggagagaccaaccaaacggtcgccctgttggccacctcgcgtcgacaacgacggtccaccagccgccggcgcagccccaccgtacctgagccagccaggcaacgcaggcacggccgaaacgcacaaaaccaggtcacatactcacacgaatacacgatcgacggcgtgcacgcaaggcccccttgcccccgtaccacgctgttccccgcgaggccgtgtgtgtattgtacacgcatcgctggctgccgatggcatggcacacgcgcaccgcagcaaccgatcgctggcgatccacacagcgagcagagtagcagcagcggccacagctcgcaggctcacatgccgcccgtgcccgcgcgcgcgcgatgcaccaaccacctagcctgctagccgaggcggcgttaaccatgtcacgcgtcttgctgccccggtcggttgctcccccgcgccgaagctgctcggctcggctccgctagctcgctcgggcgtcgccatcacgcgccacccaccggacgagggtggcatcgggcatggcggacgctgctcgcggcgatgacgcgatctaagccgtgggcaatgtcacggaagaattctgagaggaattgaatcgacgaacggtgtacatgcatgtacaggtcagatgtgtgctgcttgccggtgtgacggggtagttttacaggagcagcagcgaagcggggaacaccaggagcagcagaagaagaatcaggtggcgtcttgtgggtcggtgcgtcgccggaccgccgccgccgctgctgccggtggccgccgttgacggtgcgttggccggcatgccgccggacaaccctgccggatgtttgagacattgtcagtacagtcaaatctcgccgtgtgaaacaagtatacatgagaaatttgatcagacattttcttgccgtgctgctttaattttggcagtgccgacattcggctacccaaaaagggtggtggttcggtcgaatattttgattccttgaaagttctagccactgaatatatcactaacagtacaaacataatcacattatctgatacacctacttgattacgtagattcactttgctcttcactacttcagaaaactcgatttttacatacagtggagtaaaattctgctgtatcgcgtgctagtgctagatgacagttgatttgacaatggaataggtggaggtggagccaggagtactgattcctaacgggagtttgtcaaattaaagatgcaaatgatttgatagttttgagctactagtaacaacgtcctctctccgttccaaaaaaaacaaatattaagattatataggatacattatgctattaatgaatttagatagtgtcacatccagtactaacttagttttttacgggaggagtatgtgtagtataagaatctagtaaactacaggtctttgattagcatgcaattttcaacaaattaaaggttgtgcatttaaactccacattgcaaaaagaaacggaaaaggtgtagcaaaggcggtcaatttacgacagctccgtttaattgattgcacgcggcagagggcggccgtgtcgtacctgactcctccggcacggcgccgcccggcggctcggcgacgggcacaccgagcgcggcgcagagcctgggcgggggcgcgtcgacgcggcagatggtgggcagcgcgagggcgcggacggcgtcgacgcggaccccgtacgcgccgtacccgccgacgagtccgcacaggcaggcggcctcgccgtcgacgacgcccgcgagcgcgccgcagcagcccttgtccggccgggtcagcgtgctccggtactccacgtaggtgaggcacgaggagaggttcagcagcgcgcccgtgcagtcgagctcgccgggccagggcgccggcgccgcccacggcgaggacgctacctgcgcccgcgccgcgcgcggctgcagcgaggtgagcacgaggagcgccaaaacggaggcagcggcggcggccgaggccgcgggcagcataatcatagccatggcgccgattcttgtgcttcttgatatgtgtttgacatgtggagatggggagcgcggcgagcgtgcgtgtgcggctgtgtgtttttgtgttcgtgtgcgtgcgccgagtgacgggggtatgtgtggtactacatatactccatctacaacagcttgggggccatcaacgctagttcgggtacatctcgtcaagccatacttcactggaaaatataaacggataataattgttgaataacagagggagagagagagagaggggaatactgtaaatattggacacgttgtattgagtctcaggggtatatatatatatatatatatatatatatggattgtatcttaagtaaactcagaaagatagagatgaaaactaatcctatcatatcacaacaaatcggatacaatacgatcttatccatgtattctaacatcccccacagtccaagcgtgagcaacgtgaacacttagactagagaagaaagacgagagtgctcaatacggatgataaccctttgtgccatactcgacataaccaaagcgaaggacatgagggacccatgatcgatgaagccatgtgtaaagtagttgtggtcgatgtagtcgaaatcggggagccaatgatgtcgagatagccgagccgcagggtgtgcatggggcaccgtagagtggtcgtgagcgaggacgtgttgaagacgatgacgatgacgtgatgctgcagttgttaaggaagatgacgccgaagagtcgatgttgtcgaaccatgaaggacgagacgtcacatcgggtttgccagacctagagacaactcaggatgaacgcgtgcaacggggttgccaataccgcacaggcgaatgtaggggaccaccatgaattgacaccaatgtcggaggagcctagtagagagggcttccaagatggttgcagcgtgagaacgatgtagagaaagaattgccggagcagcacatggcctctatccacggaatataatggctccttttaaacgtggtattgacaaacaaacaaatagaaaaatataggattttgacaggaatttaagttcaaaacagatgattgtaaaactcatggaaaaacacataaacaatcgtttcaagtaggaaaaatgcagaaatcgcatgagagagatactcagaaaattttccaaaaggtttgaactcttgctaacttttctccaaaatctctatagaattgtccatccgtagaaatttcaaatgatatgataggattcaatccatcatttcaaaggatttgataggaaatttcctatacgatagaaatcctctaaaatttttatgtttttctacaaatcaaagaggacctaggtatttctaaggagctttagtagatacaaagattaacgtgaaattattttgatgtccctaagattttatcttatcacttcatggatataaagaaaggagaatgctaggggatggaatcccatcccaagcacccgcgatgatatcgtctccgtgattgtgtgccttgtcccctatagcacaggcatcaagcatgcaaaaaaagagcagtgcggcattgggaatgtggcagcggagaacgccttgcctcgttgctccgtcaaggagcatatcactggagaagtggaagggactcgccggagaagagacccatgcccacctcgctcggtcaccagggagcacgtcatcggacgttgctgcagaatgggagttcatttgagaagggcctaaccgccttgtcgtgccaccaaagtacgttttctaagaagaggcccgcaccgccttgttgcgttgccggggagctcattgccagagaggagggtgggggaatagggtcttgcaggagaatggttctgtatcgctggggagcacatcgacctcgccggagaggagagaggcatcggtgaggagaatgtcgtcatcgcccgaaaagggatcaagggagagggaaaggatatcggcctagtattgattgggtattagtaggtaccaatagatatcggttgatacgatagagtaccagatctgatacggacaagtatcagctggtacagataagtattggttgataccaatagggtatccgatttaataccgataagtatcagctagtactaacaagtatcaactgataccggtagggtatcagatttgatattgataccggcagggtatcatatttgatattgacaagtattagtaggtactaatagggtatcagaattcgatacatgcatgatatcatactgtctaatcggaatcctgtaatataacagctcccataaaataatataacgtgtccatatttttcgtaaagtcaatattcgtaacttttgaataattgttaaactaacaatatttagtgtcacacatattcatattttaaagttctttaataatgctagctccaggctagaataccaacaaggactcacaacgagccctattagaactaatattattcttgcttcggtgaactttgttgagcactatttccctatgtcccgtcatgagctcctttgcctctttgactatataagctagtcccgacttatcgctggttttggcctgaagaagttgtaccaccgtactgcagtccgtctctacgacaattagcaggcgcatccattggatccttagggataaaccttctttggatgctaaaaactcagcttccagcacctcggtgcaataatccagagagtgccatgatgtaaaaataacttggccagcactatctcttaggatcattccaattcctccccgatcatcctgagcttcaaaagacccatcaatttcagcttcatccaccttgttcttggtttctcccacttctgaaccggtcctatgtcaggcagcatcaatctcgtagcacgttgtatgacatattgacatagctcaccacatgcttcgccttctccatatctgcttgagggtgttgcttgatttggagtagagtgtcgatgtagctcttgataaacctctgcgagacagccaccggtggtgccgatttgccgtgagtgatttcatttcatacatgctagattcgccaaaacaccattagagacatcatttgtttagggattgaatttgggatgaattgaagagtatcaaagagccacgccatacctgtgtttgcagaattggcttcctgtgaaatatgtcctgcctccctcattgacatccaaagcgcttttgcatgtgggcaacgacacaaagcatgtgaaatatcttccttctctaccccgcagatgacacaatggtttatcacactagattctgctaaaaattgccctgatatgaagtataggtatataaatatttactactccatacaatgttttatcatattagtttgtgctagaaattgccatgcttctagatcccaaatttatgaacttcatctatggacgaattgctgccttcgtggcgtcttccacgggtgacatgttattttcactccttgctgtttatggcatggcagtataacttgtcatgtttgtaagtaataaggagtattatataattgcattcttgttgattttttttctcatatttcgggtttgcaacgcatgtggcctaaacccgactacattattgcataatcatgccattggttggtgagtagagcgaagctgttgtccgtcctcgctgtattgccttcgctgatatatttgttccttggatacctataaatgatgttaatgcaatcataattatatttgtccggtttagaagttcattgagtaacacagccgattaaaattaaaaatggatgttgtaaagtgttgaggtgccaaaaatatctttggcgataaaacgttgtctacagtcgttagtcatattttttctcgaactccagttgtgaccaataagtttctcttgtagaaatattacttgctaggctattgtcagggttagctcaatagctcgtccttcttgataggtcaagtaaattagcgtatagattagcagaacatcatcatatgtttaggattgatcatgcacataaggcgggtacgcaattttaataccttttatgcactaacaaacaaaaaatgtatattacactaacaaaaataggtgcatcagtcggtagcaataacttgttcagcagaccgcaaatggcttacaatttatgaacataggatgcgcgtgaggacatcaaacatgagatgactttaaatgctatcttctgcagctcgtgcaaggtgttactattacacaaaaaggacgagcgtcggacactcggggtaaaattttgccagacagtacaacattattaacactattcagcttgctccatccaagattgaacaaagaatcatgtactaccctcccctaatgccctttttatctagcaaccaaaatgagacaacctccatcacgccaaaaaaagactgtaaaagtagcaacagcgttcctatattcccattcacaactcagaagggcaagaacctggtcactcgtaacacgaagcttgaagtatgtgaacatccttccaaggggcatacagccaaccgcagaagtaccacatgtcctctcacaagtcacgaccattccagttaacatattttactctcctacggtcattccaaaaccaaacttgtagttcttctttgaatggtcaatctgcaccacataacataagttcacaaaagtcactaatctgaaaaactcacttcttgttaacaaaaaatatatacttcatctggtcatgagaacatttgttttggtcatgggggactatgtagacttattcctataaaattatttagattggatgtataaaaactatatgttagatttatctcaagcgttacttaggctgcctttgagccagggacaaagagagaagatttctcttgttctccgcgtgcacgcttcctgaactattaaacggtgtatttttttaaaaaaaaaatctataggaaagttattttaaaaaatcatattaatccatttttgaagtttaaaataattaatacttaactaatcatacgctaatgactcatctcgttttacgtatcttctcaatcttctcctttctcctctcaaacactcccttaatatagtattataagtttatctggtttttcgaacattttgtaatagaaattatagttcaaagttgcgaatatgatacttttatgatcagagggagtataaatacagtggtaagaatagagcaggttagcctgaactgtaatacaactaatacctctgcagaaagaagaaaattaactcccatgttcaatctctcttccaaatatgcagcaacaacaccatttgagtcaaattttccccttagtcggcactgcagtaaaattcattgataaattcaaaactactaaacggaaatatcagaaaacaaggaactgcaggagcaagagtacacagctttgtactattcacagatacccatatacacaaacaggtccatgaagagatgcaaaactggataagctcaagaaagaatacattgctacttgctatttgatagaaacactaacctgcctaagcatatagtcataaccaaagctggaagtaacgtcccttgacatgtgattatacatgaagtcagacgcaagggaaacctgcataccatatccttacaatcagattaaaataaagtgtgaaacttctgttgaaaataatggtggtcttggtggggccctaccttctcggaaactttctggacatagctcaaggcaactataccagtactggcaacctgtagagtacccacctgcaatggcagtaaacagaaaaatcttgctcagtttacaccctcaaggtagctcaattctctttgtacaaaacaagaggttgtgttaattgttaacaatgtcactaaatctgacaactgagcaatgacgaataacagtgcttttacagtgattggtgaaaggaaaggaccagatcttgctaaggattgttttaccgggaatggtgagtttcattcttaagggcctgctttgataggagtggatttgacccagctcccatcggattggagggaaaacactaaagcatacacaaacctgaaggattggatatattcccccattcttctaatcaagccagcattgttttcagtgacattaggggtactgaacaagtaacttgggggaaagtgcaatccaaaatggaagaatctcagtctgaaaagaggacatcaagtacacatgcaaacaggtatacaggattacagggaatgaaaagctacacagttaaacctcaatcaacttgactatcttacagcccaaaacagttctcaatccaaagatgaattgtggaatcgactactgacaaggtctataagctccttaccattttatctgaattatatcgagaagcaaaaccaattcctgacttcctttggtggccaagccagaatatttcagttcccattgacaagttcggcgtaacactctgaaatgcaaaagttcattgtttcactgtcaagaatagacaagatttaacagtgaagattttaatttcacaactgtacttgtgctagataaagaaaattttaactccacaaccatatttgtgcaggtaatttaccataaatataaaccagaaattggtttagtcaggattaacatgtatctgcccactaaactacaaggcaactcaatatgaaccgtgaagcctatatgatccaaatcccaaacaaggtgtacaagaggcaattgtaaattgtgaaccataattgcatagcagcatattgaatgcacaaatgtcagttctgacatgatatttccaaattgatatcaaacgtaatacctcaacttttgtctgtaaccaaatggtatagtttatttccagtcgtaatataaaaggcagaggaaggcgcaaatgaatcaatacagaaaataaacaggccaataagcataaccacaatatcacaaattcaagacaacgagatattaaaccatctttcctgcagaatctaaacaatcaatgaataaacgaacaactaaggagaagcttacatatcatcatttttcttttcagtttacctaaagtcctgaagatgacaatgtgaggcttttaaagataaatgcacgtctgcaagtaaaggtgcttacctgaatataatttgccccatagaacgcattatttccaatttgaaattgagctcggtagtctgtcccctacacagatttgtgaattgtaagaggactacagatatcagatggaagcaatcaaaattaaaaagtagttttctaataagtaattctcacagattattgaaattcacttattggtcaaagaagtgtagtctgaaatactgaccttgtagtcaaagttaaacattccttgggagtaatgcggctcatgagtaagctggggaatgagatttcaaaagccaaataaagaaaaatatcagtcatcacacataagattaaccacaacattcaaattcaggtacctgtgcatttattttcagagtaagatcatctgtcagatcacatttcacacgagcattcagtcttccatctgtcatcacccttcctacaagaattaactgtagacaattccatttcaaaatcacaagttacaaaatacactatgcaaaaaattcataatattcaattccatacagacaaacctttggatctataaaattggcaccgaattcgtaatgtgatgttggaacttttatagtttcagttgactgagatggaacttctaaggaacccataaaaacactgttgatgttgtcagaataaattgcccaaaagaaagtgaaacacatatcaacattatctgtttcccttacctgtggctgagtgagaacttctgatttaatcctttagtgaagtcaaacctcaatccttcaaaaagttcaggtttcaacgacactgaaaatggagaatgtcagcaaactcacaaaagaaatgttcaagagccaaaattcagatagaaaatagcatgtatgcaacaacagatcaaatcgcacaatcagtcctttcaagtttaacactgcaatgagggtagggtaactcatgcagaatgttaaggtgtaactaagattggtgaaaggtattacaaggatggagctatgtttgcagaagctaatgtttatatggtatacatactaagcaatcaaactttagaaggaaactgtgcacgtgagtgtggccacagtgcaatttcttctgtgattgttcgtcattatttaggttcaaatgtaaggagttgaaggcattttcagacaaatatatgtgcacgattatggtggtctgaatgtaagaaactgtagatacattaaaggttttttaccttacactacgctaactatgtttaatcacctaattataaatttgtaatatcctcctttattattcattagacacacaggtttgataaactcataaacattaggaacagccatacagtacttaataagtcattggccattaggtcacttgaaaaaacaggaaagactcaacagcaagaattaaaaaaaaaaagttaaccctgcccctttctaaagcctgaattgcacattgtagcatgacaaggttgctccactcagaagtcggaacaatattgggactagggtagtggcacatggctctgagttctggtagtatgggaggatactaccatagtaccatgtgcaaaaagatattactgcaacactagaaagtgtagtttgcacaaatatcgcatggactaggatttgttgagtgcaatgcaccagtagttaatgtaatctacgtatattacaaatgaatagagaacagtgattccaaatgcctcgagattccagagtaaaacatgctattcacaaattttagacgacaaatgaatcgccaaacaaattctaggactcacaactgaaacaaccaacaaagcactgaagaactacacatttcagattcaacagcaatttggaccaatggaccaccgaacagcatcaagcaaatcagttcgcgaccgagcaacctactataccaccactctatcactaaccacgagataatacgcatcattatgaaacaattcgccaatgccgcagcaattcacacgcggtagcagtcaaaaaatagctaaacaagcgaaggagcggcaaggatgggggcacgaactgagggcctcgcgctggatctcctcgaagggcacggggcaggggaggttgaggtagtccaccttctccacctccttcttcttcccctcctcctcgccgtccggcttcggcgggaggatccccgcgaggccggccccgtacggcggcgcggccatgtggggctgcgctgtgggcggcgggggaggcgcggcggcggaggcggccgaacccatggcggcgaaaaccctagatgtcgggggaggttctggatgggcttttgggtgagggggagcgagcgaggcgtgggctctcgtctcccacctcgcgacgcggcggaggtggaatttttcaccgacccccttttgattttcttttttttcttttcctctctcgcttcagaccttcagtcgcttctcctgccgctgcggcgagtgacgctcttttcatgagttctgggagggttcctttcaatgggagaaatgaaaagaaaccctcccaaaactataattaattaattataatgtataatcactgtgtaattagaacagtacaccataattacactatataattatattggatgtgtgcatagcaaaataagattggtatgtactagctcattatggctgcatggccttaaccataagattgtgggttcgtttctcatctcttgtgttagcatttcttttttctccgccagattgcatacatttcaaggtgaatagtatgatcaagaaaatcaagtgaaaggctaagtaaatattcggaatgagacatagcaaaagcgttctctattttcatggtttgttctctatttccatggtttgatttttggcagaattgcgtaaaccaccttaattatcattataattttaagtttcttacccataacctgttttattgtaaaagcccgcccacccacccaatattagcgcgcctgggtagttcatttagcatatttcttccaatgtagatccgttgccaattgtcttttgtgcttagcgctctcgctgttctcagttgtcttctcgcttcaaactagcctgagaacaagctcgagtcgagttcacctcatagtcacgctaaacgagcctgacctgattattatgatctgctgtgaattcatgtcaaaaaaaaaatataattattatttattttattttgagttattttatcactataagtactttaaacatgatttatatattatatatttacagaaaattttcaaataagatggatgatagttaacgacgttatctattaagcaacggtgggagcatgcactagctctttccttcgagtaactaataaagtataaaggggtggtgccaaaacttggaggctagacccacactatagatggccaaatgggccgcccggcctggcacggcccaggcacgactgggcctaggccgaggctacttgggccgtgcctacccatgggctgcacccccccagcccaggcacggcccaacaagactcgggccatgccggaccagcccaaaggcacgataacgcgccgtgcttctctattaaataagtctattttttccctcatctctttgggctatgtcttatatggttggaataagtctatttttcgtccctcatatctttgggttgggtcttatatggctagaataagtctattttataaacctcgtgtctttgggctatacctcaaatagccgaattaagtctatgatgggtccctcaactattttctttggtcgtgtcgggctgtgtcggcccacggtgccaagggagcagcccaggcacagccccgctgtcagcgaaattgctaatcagcgaatggtcgcgcgccctccccccgcgcggcgcagccacgtggcgcgcgtggagagggggaggggcggcaggagggcacgggaggactcgtgagcgtggttttttttttttttggttttttcgtttctctttcggttttctttggttaattcccggttttgtcgtttccttcgttttttaagtatatacttaacttttgatttttgacctacatacttatacaaagtttgtatacgtgtgtatatattacaaactttgtatatgttgtatacaaagtttatatacgtcatatacaaatacaaactttgcatacgatatatacaaagtagacgtatacaaactttatatacgatgtatacaaactttgtatatgtgtgtatacgcacatatataaagtttgtatacgtgagtatacgtacgtatatatttgtatacacacgtatataaactttgtatatgtcgtatataaagtttgtatacgtcatatagaaatacaaactttatatactatatatacaaagttatacaaagtttgcatatgcacttatacaaagagagaattcactcagtgccactgagttttcaccacttctacaatataccattgactttgtcaagttgaataatatgccatcatgttttcccgaacgtctactgcataccatcacagtccagaagttgttagttgggcatctgttagagctgtaaaaaaacctatttgcccctaactcattgtacatggttttttttttttttgccgatggacatatgaatacatatagataaactgattgaatcatataacagcctatgattgctagcttcacgcgttggtagagacgtagtgatctgttgactttgaaatgggacatatcggaaaaaaataaatgtacataatgaaaaaatatcaaccccatacagttagatataaaacaagtttgaacatggtgcatggcactgagctcatatagatatagaaatgaataccaaaatattttactaaaattagccaaatccatacagtttagtaagacagcataaatatttaattacattagccaaccccatacagtttagagatgaatcacaagggtccatggatcataaggatcagtacatgttcagccatatgcataccaaaatagaagttcaacacatgatctgcaccgcaaaagttacaagcatatagatggggatgacatagatggccacaaatataaaagagaacatcagcgcagttggcggctggttgcggcgacaactgcggaggtggttgcatcagagatggggccggaagcaccaggacgccggcggtggatgcgaggttggcggcttgtcgcggttgcggcagagttggggacggaagcgccaggacgccggtggtggaggcaaggtcagcgggtggtcgccgtgatgctgggggaggtggtcacgtcggaggggatggtagcgccaagatgctgcccgcggggtcgtagtcggcggccggttgcgcccacgatgccgcatagtcggccggccacggcgatggggagcccggcgactggcagcggccgagcgtcgatggggatcccggcgaccggccgccgccgcgcatcgacggggatgctggggaccggccgcgcccgcgcgtcgatggggatcccagcgaccggccgccgccgcgcgtggatggggagccctgcgctcggccacgcgtcgatggggagcccggcgaccggccgccgccgcgcatcgatggagagcccggcgacctgccgccacagcgcgtcgatggggatcactacacttggcggcgcgtagatggggagctaggtggccggcggcgcgtcggggacttgggcggctggccttccatcgagtcgtcgcctcgctgtgggcagatcgatttgggtgtgcagggttagggttttctgtcaacaggtgctagggtttattagtcaagggcattttagtcattaagaaaaaaaatcaatacaccaaacggatgcaccctaacgacttgtggacggcgatggcacgcagtagacgttcggaaaaacacgatggcatattattcaacttgacaaagtcagtggtatgttgtagaagtggtgaaaactcagtggcactgagtggattctctcttatacaaatgtatacgtatgtatacaaagtttgtataagtgtatatattttatacatcaaaagtgagtatgtatatattcaaagtatacatatgtgtatatttatatgtataaatatatatacatagtatagtagtataaggggtagtatagtatactagtactgtagtatataggggaaggctgaaacttaccgtgtggccgcaggcgcgcgcggtcagtcgccgatcagcagtcccctactgtcgggccaggccggcacgggcacgaccgtgtcaggccgtgcagtgcttgggctgggccaaattaccgtgccttgggccaagctgtcgggcctcgggccatatggccatctataacccacacaactggttgccttaccaactgataagtcttcctttgccgtccttgaacatgtaacgagaaagtcacaaatttgacattggcaaatgacatccctttctggacacaaattttggcgaaagttttagattcatcagttctttctagacacatatccatctcaaattctcaactggagcatcaacctcagtctctccttgcgggatacccagtccttcatagcttgtggatgcacacatgcgtcatgaccacgatcctggggccatcatgcttgtgctacactagcaatctacggcttgggtgttgaagagaacaagtcatacatggcgcatcaaacgcacaagagtacaaaccgcggcctccttttcacccgcggcgagttgcagatttgcagtgcccacttgggcttcttctggtcggcacggtttaattttctcccaagaagacaacgacgcctcgagatgcatggcatggcacgatctgatcttactactactcccgggccttcatggaggaagaaattttcaccggcttgatgatttgattttctcaggctgtatacgtgcagaatcagagtcaattaacaccgtgtttagatcccagttttttctttaaacttccaacttttttcatcacattaaactttcctactcacgtaaacttctaactttttcattatattgttccaatttcaaccaaacttctaatttcaacgtgaacaacatagcagcaggtaaatgttccgataaacacaggagtactattgatagtacttttatcgatcggtgcttggtgaatgaaatggctgtgattctttgaatttgtgatgtcgctttccaagggaaccaatggatatgtcagtcatgatccattctacggagtacgtacttggtttaattgcagccatacaagtgcagcagttactgtacattgtacacatcaagaattaaaattgaggcctgacagagtagaaaatggacagcagcgagtcctatttgcgtgatcgatcgaacctttcagccgaataatttgtggctctgaggtagtgtttggg

SEQ ID NO: 19251 - DNA, 24385 bp, Oryza sativa
ctcccatcccaaacacccacttaatctgattaggcaatcaggcacgtcgtccactcgatcaatcaaatcgcatctttcagctaacttaaggcattctcaaggtctgtttagttggcgaaagaaaatttttgggtgtcacatcagatgtttgactcgatgtcggaagaggttttcagacacgaatagaaaagctaatttcataacttgcctggaaagcgcgagacgaatcttttgagcctaattaatccgtcattagcacatgtagatagcactttatggctaatcatagactaattagactcaaaagattcgtctcgtggtttccccctaactgtgcaattagttttttaatctatatttaatgctccatgcacgtgtccaaagatttgatacgatgttttaaggaaaaaaaatttgggaactaaaccaaacctcagtgtatccaacccaacttggtattagtgtgggcccaagcaacaagaggtagtagtgcatgacagagggcacaatgtttcttgcctgctatggagaataagatggggtccaccaagaaaaaaaatgttatttcctatgtagtagaattgctaccttcctcatctaccatgtaaagctattttttttatttgcttgctacccggtagtagcactacaaccaggtagttgttgttacctccttccataatacgtacaacctggtaataagagtgtattcattgcttactacatgcttctgaaccacattgtggttgccttatgctgagttctttgcttggtggtaggaactcatccctctcgcacgtaaaacgggtggcttattagcgcatgattaattaagtattagcttttaaaaaatgaattaatataaattttaaagcaacttttgcatagaactttttttaaaaaaacacctcgtttagtagtttgaaaagcatgtacaccggtggtgtgcgctcaacccaaacatagttctcaaattggatactattgcaagagaaattggaagatagtgccaaaccccagcccaccttaaatacaaaaggattaggatggcgtcgactgaacttctgccttggaacgattaggtggaaacaaaacacggtagcagcgattcgatcaagcctcaccaccacgcattccattctaacccagtgacaacaaatcaccagatgaccactaccacgaagagcaactgtgcctcacaagcgacgccccatgaaacccatacattgtgtcagccatcaagcaagaaggccgtcgaagatttaccacaaaaatcgatgaacttgttggggccaccttgcttggcatccataaccacgagtacccgaggctagagaataaagcaagctgcaccaacttcgcctatcgagaccaacaagcaggagctaggcgcactcggtttgccacctccagccgtcgtcaccatggagaatggcccgaccacccagatccgccacctctagcttcgtccgctaggccgatcaacgagcaggagccgattgtgctggatccagcgcctctcgtcaccgtgcaaatcgtgtcgactatcccaaatccatccgccttcattgcggggaccgtcgatagagagggtgagctacacgggaacccatttcctagagcacacggacacccacacctacagccaccgctgttgacatcatcttctccaatcgccatggcaattttaccggtgagaaaaaaaaaacaaaatgaatctgagctacacgacaaactactctatactagtactagtatagggaggaggcctgacccttcttccagccctgaccggtgaagaaccgtcggaattggagggagaagaggggtcgagatgtttggaattactgtagagatggtccagacaagttggtagtgatcaccgatcgatcaacatgtccagaagttgctacaccgataatcaaccgatcgatcgatcggaacgttcgttttctagaagttgctgtagccacgtgtccgcacatacacctcctagaagccctccatattcataaaggaagtcgtttagaataatatttaagtcaaatcttaaaaatataaatcataaataactctcaagttgttgagtttgaaaatataaaaattatatgaatatatttgtcttgaaaaatatttttataaaagtatacatatatcacttttcaataaatatttttatagaaataagaagtcaaagaagttgtgttttggagaccgtgccgctgtcttaaacgactttctttacgagtacggaggaagtatgtgttctcctatcagtagtattccatccgtcttataaaaaaccaaactagtatcgaatatgacacatcctaatactattaatttgaatatacatatatcgaggttcatactagaatatattacatccggtattcgttttttatgggacggaggaagcacgtaccaacaaacagatcttcctcccgtaagttggctagctaaaccaccattaccgtacgcgccactgaaagaggagtaagcttacccggcaccgccaggttgtccacgagatctggacaacgacgccgaccggtgcgcgcgtcttcttttgcatctagaaacccaaaaatcgattggctgcccaccgatcgcgtcacgtcagagcgatcatctagaagctagcgagagcgaaatagcgaattccaatcatataggctaagatctctccatttattataggccctgttaccacacttgttcttaattagcttctgttaattaagtttatttcttataccaacatttatttatcccccacaataaaatagataatatgtgacaataacatggtcagtccaccttcaaaatttgtaagaaaaatatagaaaacttgaaaactttcaatcctatcagaaagtttctagaaaaatatttgaaacaaacattcaaccctagcctttcatttgaatttcctatagaatggacaattctatatagattttagagaaaagttagtaagaactttaacttcttaatcttttttctttaaagttctatctatatgatctgattcatgtatttttcatacggtcaactcaaattaataattattttttgtatattttctgtgatttacagtcctttattttatacttatatttctatcaaattaagtttaatgtttttttataactaaattctatgttttttattcctctatctttcaatccccgccttttactgaaaccgtcgctaatctatcttaaacaaagcctgaagtgaacacgtactaaaagtactagtgtactactttgaatctctagatgggagaggaaaacaggagcacgctagaaaactacgggcaattttagatggtttaggcgaaaagggtcggtccagtcatccatctctctggctgctgacagatatagagatctcacagtgtgagtagagagcaagtcaatgagtactccagtatactccatatgcttgagatattcacgtcgacaaagttttgaaacgacagttggccccattggcttttggccgcatggattttgaccgcttcctacaggtcatcatcttacaagtccggctagaggttgcagcagtcacagggccagaaaaccggagcataaaaccagcatagaaattaaattgtccaaaataacatattataaaaacacttaaataacagattataatattttatatattatattcatcacagaatataagaaagtaagatagtataagacacatcatacattcctattgttacaaatctgagcctcttatctcaagttcttatatttttgggatagagtgaatatatgtttagtgacttaaaaatacgatgtaaaaatcaacttaaaattaagtttaaatttttaactaggttgataaccaaaagagcatcgatcaagctgttagtattaggtagctgaaatagatcgtccgatggacctttaaaaataatatgtcattctcatatgtatctcaatcttattaaacaaattgtgctacaagtggtttttgaggattgaatttgatgtcatgaatatgctaattgttttgcttattatgttgacaatcatggatctgacttattaatgttgttctgttgtcttaatgtcagcagtcgatatcgttaggtttataaatggacaatatatatgcatcataagttgccacgttgttagttttcttactataatacatgtacacttaatattctacttactctctatccatcgttatctcactcccacttgtaaaacaacaactatgatcatgtgtatattaaactccaaaaaaagagcgaccgatgtagcaaaaatcatcatcgcgtctggtgtaaattaccattaattaatttatttattaagaaatatagtaccgcagacgctcacaatgcacgcacactcactcttatgaacacacccacaatttagagaagcaccaaacatgtgtcatgataggatgtgaacgtataactccacctagcatgttttaaatttgcacttacatattacacatatatagttgcatatgtgaatacattttactcctacgtaataagagtttagtgagattaaagatatattattggtctcgtgtcagaacgtaatagcaattacctacataggatgtgtgtgcatgtcttttgtttggttgaagaacttatctttttcaagcttagtatgaaatatgtaaacagctctgtaagtattaggagcctactattgtagcagagactattcgtcgctcctttctactctctccgtttcacaatgtaagttattctagaattttctatatttatattgatgttagattcattaacatcaatataaatgtaaaaaatactaaaataacttacattgtgaaacggaggtagtatctccgaccaagacacaccggccgggtccttagctgttgtgtacttcaagttttcaagcaggtgtcagaaggataattgtcgaggagagtaaccttcatcgggaacattttgagtgggcataaggtatttgagctaatcacgagaagaaagccaaactacatgcgaaggatgtggatgaagctcggccatgatacctggaaggaatattctactagaagaaaccaaggaccattccaactgctcttacaagctagcacaagcataaatgggccagatagccaattgattataccatgatacccttagggttcctagtccaatgagggcaccgttgtaacttcacatgtattttttctagctataaaggctgacttaatcatgcgggggcgtatcatatcatatgtacacaagccctcacgtgtatatatcgtggacatgaactaaaatatataaaaaaatatagaaaaattatacatgtactttcattagtattgcatctacgtgcaaaatcacatcttcaaattcatcttacatagagtaacaaattctgatagaactataaccttaaaactatcattttttgttatgatagattaaaatataataaatttgatattaagattttacctgtatgtgtaatactatacatgtataaatttttaaattttttgataatatttgttatttggtgtgtacgatatgtacacatgatagcttatgtacacaaaacatgttcatgacgcagattacatctttactggaactgtgacagtgaaagccttttttccaacaccagcactttttcgaatgttttcagaaaaaaaaattccgaatgcatttatataaaatagaaaacaataaaaagcctaaaagagttgtccaagtcaggcagaatgggataggcgcttcccgtgggcgatgacgcctttcgcgcttatctttcccgctgctccgcgtcttccagagaagcgagacgaccttggcacccagcttccgtcactcgctcgccgcgctatataaaccccacatccttgcagcggttttgccgcaatcaacaagaacaaacagctatcaccccgcgatccatttgcccaatcagatcaaggcgtgtagatttgattttggttttattactcgcaacctgcacgttgccctcagtcacctggcggcggagagagagatcggagatgagctcggtgtgcgcgaggcccgtcggcgtggggtaccttgtcggcggggcggcgagcagctggtcccagcggcgggggcgtggggtggcggcgccgcgggcgagagtgagggtgtcggcctcggcctcgaccgtggcgccggagaggcgggcggcgacgatgtacgaggtgctggcggtggaggagaccgcgggcgccgaggagatcaaggcggcgtacaggcgcgcggcgcggcggtggcacccggacgcgtgcccggggggagccgagcgcttcatgctggcgcgcgaggcgtacgaggtgctctccgacccggagcggaggcgcggctacgacatccagctccgctgctgcggcgccggcgccggggcccaggcggcgcggcgggccgggttcgccgactgggaggcgcagctcgccgggctccagtggcgggccgcgtcgcgggagacgtgggggagcaggatgcgccaccgtcagccgtctccgtcctgagccgagaatcgcagaattcgcagtggcttttttgaattttgaatttgtgttgagttttctctttttctttcactttttttttcctcttctgtagccttccttgggatgtgtatataccatacggagtattaggatatgatctataggtggtacatggtagtagtatagaagaatgtacaaatttcaaacattttgaattctgatacctactttttgggaggaaaagatctttctaaaagaacttaagaggaaaacagataatgacatttacttaaagaaaacggtggttaattgaccagttttcacgcattctagagaagcaaagtaaagattagagaagttgtgtaccgtcatatggcagccttcaaataatgggaagcgtcacattcacctcagctctagaacatcagaaataaacaaagagaattgtgcagtaataaaaaaatgagtacaactcagaaattatgaagtttggagtgaatccttcttagatttttgttaaaaaaaacgaattctcagatctattgtggaaatgaagacaatctataatgttagtttagtccaaaaaaaaactgaaaataggattctgggactgatccatataccgaggaatctaaataatcacttccacaaaaaaaaaaaaatctttccagtgaactccgcagctaacatgctgcactatagctccaaggagcaatggtatccgtacacatttgcctaaagaaaatacactaaaactgattttcagttgttgataagatttgtgagaaagtctaccatttcccacatccgagcttgtcatttgccacaaccaacgagtcgcatcctatcctatccgtatagtccccttcatgatgttcctccttggtttgtaccatatgtgtgcaaaatttctccgcacagtccccttcacgatgttcctccttgtttgtacatatgcatagtttcactaaccaaaggacggaatcacacaccaattggtaatttggtggtgactggtgagctgctttttggaaaaggattttaccgagcctttagcttttctagtttgtaaactgaaggctgaggccattttctatgcaaaaggatttccagttgatacagcgctcaatgttatgttcctgaaataaacaaggctgatttcagcgtatggatgaatagcaagtgatgccatattggacagaagcaggtcaaagcagcttacctgagtgcagagttggggatttgctcgacaaggcatggaggtccacctgaagatgcatgggccgttaaaacctcccacaagctctatatgtttgcaggaacaagctatgcgaaggtagatagatggttgccagagactcagagttaagcttaccatgtgaccccggtggaacataagcggacgcattgttggagaaccatgtttccggcaaaccatcaacgaaagaagttgataggtcagcattaggcaaaaccgcttgcaacgctgtcacatccataaactgcaaaatggagtgctgttcagataactgatgggcaaaatgccatgctgaccagcactacatacaacagactgtccattttgaagaatgtgttatgctgactctaggtaaatcaataattattcatttattattaaagaatcagattacacggttttcagtatgaaaataagtacttcctctgtcccaaaatataaaaatcaaagcctcaaagcctcttttagctcagcagggagagggccagtgccctatctcctggtcttcggatccttaccctagccaatccacaacaaatgctactctggaaactgtattttgcatctatattggatcatgtgggtgccatgtccgtctccatgagaattatgaaagggttatctactgtttcatcatcaatacgtctattccacatcgtcaaattctaaacatatattcagtccacagtattcaccgtagataggtaagtgacagtagcacaaaacgatattaacagcttccaatcatgtcaacagtaccatccataaaatgcttgatactcaaatgcattgaaagcagggaatgaagaaataactctgtaacatagtggaaattgcaaatgaaccaagccacgggtgtttgcttccagtttctatctcttccattttaaatgtcatttttccctttacatatttaaatatttaaagttgccaatatgatttctggggtgccaaaaaacaggactcggtggtttgactggtttgccatttttggatcctattggctactatgtgcaaaaaagaatagcataccatatctggagaatccgagtcagcatcaaatggaagatcaaatggattcaacggcatctgctgtacagaggcttctccctgtaaacggtggcattatattccagatccagaatcacttcaaggaacagcagaagtgtacagatatgctaaatatctaaattaccacggaagtagtagcaaacagtgatggctcagggaatggagcaaagggttcgctaggagctaatccacccatgaaaatttcttgggaatcattaccacgagattcctacatgacggaaaaatatattaggttgttatggagcaaaggggtacctttgacgttatggagcaagtaaatggattgcttgttgttagggaattgttatcaacattcttgtgctcattagtttgcagctgagcattggacagattgagagtcatagtctcacttgcatcatcgaatgaatgccagagctgcaaaaacacaacaagggacactactaagttctggggaaacggttgacacttaacaggataggtcaaataccagaatagcattgcagcaacaggaaataacttgcttattcacaagtttcataatttactcacctgcaatttattttcatcaattggttctttaggttctatagaactcattagtgaaagatctggcgaggcttgttgggtgctaacacttttggcctcaaaagcactccaagcctgaagaaatgtgaaaaatactatttataagtttaaatgcaaaagtggaatatcatagtagtgtggcacaatcagatttttttttttaaaaaatgaaaaaataattctcgtgcatttgcaaatgatacatgcaaaaacacaatgaccatttttttgaagaatggactgcattttgttgcatgtatgtcctaacatgagagcatatgaaaaaagttttttctagagcaatgcaaatattcctcacctgagaattacttgcatcagaggatgtatatttacaaggtacatcagactgatcagtcacagaagcattattttttgatgtctttgagctctggagccacgttggttgatcattatttggttcaaacgaaaacaaatcaccactcaaagcatgtttatccattacggaaatgccagaaagcccaatcactccaggttgcttttcttctggtggtgtgtcaaatgtagcccacccagcattgtccattgatggagctgctgtgagcattctatcagtggatggagttgccggaggcatgctagcaaaaaaatctactggttgatccaaaccagttacaggttgttgctgcgcaacaggctcattaaggagatctttctgtgcaatgttggcaacatcagagaaagctgtgaaacttggagtaatgcaatccttcgtttgctgagttctatgagcaatatcagattcaaaaaacatatcagctaagcttgatttgcttgattttgtagatgacgaatctatgtttcctgttgatatagttctctgcagaaagcaatcaaaattaatacatgtcttgtttggtatgaaaagaaaggaaaaccaattatttgtttagagtggaatatttaccacctcagattgagtgattccactagaagcctgtatgtttgattgattttgttgcatagaggggctggaacaccctttatcaaggaaattcggtgagtgtggtgtcgttctaaatgtattactgatgcttgaccctgagcagtcagaaattcttggtccagaattctcattggcaaatcggtcttctgacatcctctcatgcaggctctgtggactgtaagcaaatccagacatcttcccatcatgccccctatctgaaccaggtttcctagttagcatcacggattgcttgccattgcgtctttcttcgtattggtaatcataaggtgggctctgagaaaatgaatggtacgaactagcccttctatgctcttgttcattggtcttttgattctgcattgatggaacatgaattagttaagagagaagcattttggcagaatatacgttgagaaaatgaaaacttaaaatttccaaagaatcacaggaaaaaaaacatgaatgaacttctatgaaagtattcattgtcatctacgcatactgaagcagaaattcaaaagctttgtgataacaaatggacaggtaaagaacagttctcatgcagactaactagatgttgtaaattaagctaaacatacctgtttatctcttggaggcctttcagaaaaccttccaccagcataccttctctccacataaacagcttttatgaattccctaagactgtcgacattgctgcaaaaatagtttagcgtaagcatgtactgtgcccactatatatgtattcacaagacaaagtatgtattggtaactttaaaagagaaggatagaaggatgcccttgaaataataaagaagtagcgattaacaaagcataaaaggtgaaaaacaaaaaggacaacaaaatggaggtgttctcagtggctaacgccatactggtaacactatagtgacaaagctttttacctgctatcaggtagcctcattttctgagcatcaaattcctttaagaacgattctctggctctctgcgtcattcagtttaagagtcatgacatgaaccaaaagggggatttccaagctcaaaccaacccaatggatcgccttacttgattcccaccgttctggagggcctcgacctcttgcgtggtgaacgtcgacatagatactgacttcacacggtgcgtgaactcacggctaaaaattccatgaatgtgtcagaataacagaagagaacatataaagctccttcacaaggagaccagaacttgacgactctgagcctctgacacggtaaaaattttcactacaataataaatgaaatgctatgtatgctaagcacgctaatcccacaagactgaaataaataaactgaactgatgaacaggtcaactgaactctcgtcgcatcgacaagcatgaactagaaaataactacgaatactatgtccgctggcacatggatgcaatacactacacaaaattagtccaaaattaacagaggcgagagcccagcactcactggatgccgctgcaggagatgcagacgaatgtccagaagctcgtgcacacgtactgcggcccctggatcagagttccagcacacacggagagggttcagtacaacaaggaaaaaaaaacaaatcactccggatcagaagcacacacacgagaggagatcggcgagcagctgcgagtgtggcggaagggaaaaatccttacgaggccgttgcagttgatgcatctgcggttgggcggcagcttgaggagccccctcacgacccgctcgttcctctcctcctccttcctggacgccgccgccgccatcgaccactcccccccgcacccgcagccacacagatcgaacgacgaatcccgcgatcccgcagccgccgccgcctcctcggaggattggatcgctccctcctccgtggaaaccggcgaggaagtgagagggcgtgaaacggatgcgccggagaagaaggcgctggtagatggcggcgacggcgacggcgagaggcgccggtgcgtttgcttgagccggcgacgcgacgcgatgcggttgggaataacgggtgtggaaatgactagtagtaatagcgtggaattgcaacggcttctttaatttttaaaaaccacgtttagccagacagcctatcgctaatccgcccgcacatctcgttaagagcaggataatagcaaactataagccaagctataaatataatttaaaacaataaaagagcaaaaataaaagtacgggctacagatttataaccagttacagcacgaactataacagtatgggctacaaatttataaccagttgcaacacggactttaagatacgcgtgtgtattacaggtgaggaccagacattaattatacagtatatatttatagatagctattgtataaattggctattaaattgactatagataatttagaatactaaagttgctctaagtactcctctcaatttcgaaacggaaggatttttttaaaaaaagttaaacaaaattccgtgaaaaccctctaaagttttagcgttttgagtaagccattagagcaaggataatagtagagcttacttcttactattagcccattttaaagccaacatatataatagattagttataaggttggctacaactttcttcttctctctatttctcacctatgcatttaatgtatttacctaggagcttgtgttaatctagctcttgcatgagagccaacatccttgattttttgttatatctctcctccatctaagtttatagtaggtttatagctagctattatacttgctcttagcctgattcctcttccaggaaactaaaaacggtgctagccttaagggcattcccaactcaatgactaggatggtgtccatagcattaaataagctgccacctagattgaaaaatgatgtgacaagtgaataaatgaggaaagagaagtaaacaatatcttgcatgagacatggtttctacacaacatccaagacattatgtgagataagtagcattaaatttaagtatggaatagtagtgtttgcattggaagagtagtatctgatgtggagtttatggaaagtgaataaatgaggaaagagaagtaaacaatatcttgcatgagacatggtttctacacaacatccaagacattatgtgagataagtagcattaaatttaagtatggaatagtagtgtttgcattggaagagtagtatctgatgtggagtttatggaaagtgaataaatgaggaaagagaagtaaacaatatcttgcatgagacatggtttctacacaacatccaagacattatgtgagataagtagtattaaatttaagtatataatagtagtgtttgtattggaagagtagtatctagtactagtttgttgatgatgtggagtttatggaaactatgttagtgtcttgggttgggaatgccctaacattagatcatgtagtagtaataaggtcattagcgaagataccgaggaaacggacccaagcaaacagagtacagacagagagcttaatcccatattccccttgtcccaagggtggatctcgctttaacgcttttgccgcttgaattaagcgacacggataacatgtgccttaacatctcgctttgccaagccaaccatgcccggttggcttggcttggctactccgctggagaacgctggtgggcacgagatttggccaaagattaggttgttgagcagctctaccgatgccggtagcctccgcctgttgggtaggagtgtgtggtcaccggctaggcacacacacatgggagagagacgccgtttgctgttgggtttgattgtttgaactgccactccagctacaaataccgtccgcaaccaccaatattaatttaagtaggaaggtataataatcacacatttcaaagaggttgcggaggaccgcgtggtcactcctcggtgaatcatttttattttggtaaaaattgtaataaagaggtagaaattaacaaagtataaaaggtgaaaaacaaaaaggacaaaaaaaaggcgttctcagtggctaatgcatattggtaacactatagtgacaaaactttttacctgctatcaggtagtctcattttctgcgcatcaaattcctttaagaacgattcttctcaattccgaaacgggggaactaaaaaaacctgggctcccatcgaacggcctaataagcccaaaaaaagccaaattttaaattttcaaacttaattttgagattgattttgagatattttcaacgtaatttttttttcagtattggcttttaagtcactaagaacacacacacacacacacatatatatatatatatatatatatatatatatatatatatatatatatatatatatatatatatatatatataagttttacctacaaattcatttttattccctaataagccgttttggcttattaggaaaaaaagccaaacgatggggcctctgaaaactaaactaaatttccgtgaaaatcctgtaaagttctagtgtttcgaacgagccattagcctgattcctcttccaggaaactaaaaatggtgctagtcttaacatgttgtgtcctgtaaggtcattaccgaagactagctggtgcaggcaccaactgaaagtctgaaattaccttcttttggatctaaaaactgactttatgatccttaaaggttccttgaccccattatccatagtcggtacccgtacacgaagcccggaatcgtcaagggcaggatgccgatcttcggtagtgtttggttgctggaatgagatgagatgggatgggacgaacccacttttaggggtgtttggttgaggggtgggtgggatggattggtcctaggagaggaatattcctctcagatccgggaccaatcgatccgggaaaaagagccggacgaactcgtctgcgaccgacgccgcctcatccgcgcccgccgccgccttgcccccgtgaccgccgccgcctccaggaccagccgccgcttcgtccgcgaccgcctccgtctccgcgaccggccgccgcctcgtctgcaaccgcctccgcctccacgaccgactgccgccgctcgtccgcgcctctcctcacctccgcctccgtgcgcggcctccgcctcatccgagaccgccgccgcctcctcgtccggccgccgcctcgtccgcgaccgcctccgcctccgcggccgactgccgccgctcgtccgcgcctctcctcgcctccgcctccgtgcgcggctgccgcctattccgcgaccgccgccacctccgcgtccggcagccgcctcgtcctcaaccgcctccgcctccgcctccgcgaccgaccgccgccgctcgtccgggcctcgcctcgcctccgcgaccgcctccgcctccgtgcgcaaccgccgcctcgtccgcgaccgccgccgtgcgcgcctccgcgtccggccgccgcctcgtctgcacctcctccgcctccgtgaacgaccgccgccgctcgtctgcgagctagccgctgggagccagacggccctaacggtccgtgaaagttctccatcccatcccacctcaatcccttctaccaaacaaaaaactataaccatcccttaccacaaaccaaacagacaactggaaccatcccatcctaaaaaactgggataggtctaacccatcccactttgtccccaaaccaaacacacgcttcagtgatgaggaaggatgccgatcatcagtgatgaggagtccaggatggtgaaggactccatccatagattgtgttggcatcaaccactacacctctttctacatgaaggatcccgggccatggaacctgacgccggtcagttatcaggatgattggcatgttgggtttgtctgtgagttccaaagattccaccccgataattctgaatttctgatacataattcagtatgttgtactactcacctgttaactggatcagttgctcatgcactcacctgtcttctccagatgaacgaaatggcgtgcccattggagctcaagtaagtggcagtcaatgtattgtacagtagtacgttaaacagttaggacaagttgaatttcaagctaaaccatcgcacttcaatagttgaattaattgaattcacacaggaaaactcctactggctttacattgtgccatggggaatcaacaaggctgtgacctatgtaaaggaaacatatggaaaccctatgatgatcctttctgaaaatgttactaattcggcaattctattagaattatccctgtttctcctaataataatcttgttgacaatgaaaagtagtattaaacaagggttactttatgatcaatgttatgctcttgcaggaatggaccaacctggcaacttcaatatcacccagggtgagcatgatactgcaagaatcagatattacagagattacataactgagctcaagaaggtgatagacgatggtgccaaagtgattggatactttgcttggtcactgctcgacaacttcgagtggaggctcgggtacacatcccgtttcggtatcgtctatgtggagttgtggactatagtctataagacgttaaagagttacccccaaggactcaagcgttctggttcaagaacatgctctccagaaagaagaggaactaaagtatgcagactaattatcaaagcctcaaaggcttccagccttccactgtcagaattcagaacaaagctcactctagcgtatgctcatcttagcacgttagtagctataattaaatgtgaaaaataaccaatgtggagattggtagcttcattagcttccgcaatacaaggggaaataaatggagtggacttcattacaaatttgttcatcaggaccaaaggctgactaaagggactattcaaattatccaataattcagtttcaaaaaaaagatccccataattccaattcaacaaacagatttcattcccacagagaagttcagataacatttcactgcaaaagaagtgtctgaaaatggaactcattatactttgagggttccagttcgacatacattaatataaagcattaaaacgtgatgacataaaatccctgagtgtacgattgtttgtctatatttctatccagtaacctatctttacaaatatctatgcacgctctttctaacatgggaactatgatttctcctatggctatacttcttatatgcaagaaggcaatattaaacagtaattaagacaaacaggtagtagaaattacagacatcattcacaaatttcagacatcattttgtggtgtatgcctgtgcaatggccgtcaggttcccaagttcctaacagccactgttgctgtgaactttccctgtgcagagctcgcaacacaataaatagaactaaagagtgatcagtgagcactaatgcaaacttaggtcaggtttaagcactgcttcaaatctgtatgtccaactgggccactggaaattactaagttcactatctcgattcaaaaaatttgcacactataaaagggtaatactactccattctgaatatctcttaagatacaatacaatgagccaccatcattcaacaacacagaacatgcatcgaatttggtattcccgtctcaattcaaacagttagcataagtttcacataccatgtaaacatacggatcactgcggccaccagtgtcattacacctcaagcaccccccatgcttcagcaacctgcagattccacacaaacaatttagcaacatggcaaccatttcaaaaccgcttcaaattggaattaacatgacaaaccatttcaaaaccgcttcatattgaaattaacatgaacaaccattccaaaaccgcttcaaattggaattggaggcggtgtggtactcacaagcgcagggccttgctggtcccagcattgtcgccgacggccgcccggatggccgtctccgttgccgactcgtcgcgccgaacacctaatggagaaacgggagtgttgcgcggaagtagtacctaacagtgggaggaggtggaggcggggacggcgctggcgacgagtcggcgaggaagaggagcacgacggcgccggcgacatcggtgaagttggggaacgccattttcattcattcaagtacttctacccatgctccattttcattcacagccaccctctttgttaaaacacggtatcctcgtgtatgtcatgttacaactttttataaattatacaaagtgtacaagtctcaactctagattcagtgagacagaaggatttctcctccttggttgaatgcaggatctgatagatcaaataaatttaccggtcaattccttcaatcttgtcttcaacctcagagtagagctccctgagcttttccaagttttcctctgatgtctcccagtagcctctgccactggcttctaggaaggtctgaactagcttcctgaatgaattggggttggtgtccatgagcctcttcctcatagcctcatcttcaataaatgtggcatttgcctcctcataaacccagttgtcaacctgtccagatgttgcactccatccaacagtatttgtcagccgcttctcaatctctctaactccctcgtagccacttttcatcatcccctcgtaccacttagggttcagtagctttgtccttgcatcaaggcgcactgtctctgacaatgtcctcacctgtgcatttgctgtggttgtatctgctatgtatgaggaaggtgcccgcccatccttgcgcagtccttgcaccagctttgtcgggtctgagtcaaagtagtggctcacatctgttagtgaaatctctgatgagtctaggttctggaatgtggcatctgctgttgctagagcaagctcaaatgtcttgcgttgctctcgcatgcctgcccctggagcatcacaatcaaatgcaaaagacttgcgactcaggtacatgtcctggagctgcttctcatcagtccatgatgcattctccactgccaagttcacattcgatgagtaagagcctgatgcatttgagaacacccttgttgccgcctctcttaatgaaacgccaagttcccgtgcctgctcttgtgcatgcttacgcacgtagttcatctcttctggctcatccagttcggcaaccatcttcactgcccggtccagtagattcatctgcatcagtgtgttccataagtacattatttcagcaatgatttttccttatatatgcacaaaatctattatattattaaaggaatagaaaaagaagcctccacgttcgctctcatggtctagaaattctcacattaatcggagaaaaaaaaaacagagtccatatagaaatacaatttagaaatagctgaaattcggaattgaaaaataaggaatattaaaagaggagactagagtccatatagaaatacaattaggaaatagctgaaattcggaattaaaaataaggaatattagaacaagagactagagtccatatagaaatacaatttagaaatagctgaaattcggaattaaaaaaataaggaatattagaagaggagactagagtccatatagaaaacaatttagaaatagctgaaattcggaattaaaaaaataaggaatattagaagaggagactagagtccatatagaaatacaattaggaaatagctgaaattcggaattaaaaaaataaggaatattagaagaggagactagagtccatgtagaaatacaattaggaaataactgaaattcagaattaaaaataaggaatattagaagtagaatatagagtcaatatagaaatacaattaggaaataataaaaattcggaattaaaaataagtaatattagaagtagagtatagagtccatataggaatttaaaactaactaaaattcggaataaacataataaaaatgaaaagtagtgtttagagtccgtataaaaatacaatttacaaataactaaaattcgaaattaagaaaaacatgggaagaagagtttaaagtcaatataggaatacagtttagaagtaactgaaatttaaaattaaaaaataaagaatattgaaagatgagtttagagtccacgtagaaatacaattagaaataataaaaattcagaattgaaaaaaatatattaaaagacgagtctagagtccatataggaatatatataatttacaagtaactaaaatttgatattaaaaataattaataactaacacgtatataaaatacaatatgaatattacacattagtagtttcgtaaagttattgcaaaatttaaaattatgttgtcattgtaatatattttaataatataatgagaaaacacatatgctattatagccaccatgctagttctacatatgtaaggctggggcagaattcatacctggttgatgaaaagatctctgaagacacccgagcagttgataacaacgtcaatcctgggacgtccaagctcctcaaggctgacaggttccacacggttgacacggccaaaggtgtcagcaaccgggcgcacaccaatcatccacagcacctgggccaatgactcaccataggtcttgatgttatcggtgccccacaagacaagtgcaattgtctcaggatacttgccaccattgtcaaccttttgccgctccagcagacggtctacaataattttggcgctcttcaaggcagctgtagttgggattgcctgagggtcaagagcatggatgttcttccctgtcgggagaaccttcgggttacggattggatcaccaccagggccaggttcaacatagcttccctcgagggcaagtttcaagcttcccagctcattatctgccacaattagcttcaagcattctcccaagaaagtaaacaaggttctcaatttctctctgtctgctctgatgaacttggtcttggacaagtgttgtacccatggttctgataaaccaaaaccaagcatggtactaagtttgtttgtaacatcaacaacttgccctttgttgtttgtagtcctctcaacaaaggtagtgatggcaccacgtgaagcttctgttatctgcctcaacagttcaacatccgccagtattcccttgtcacttcctctgtacacatcttcaatgttcctgcccactgtctgagcaagtatgttaggcagtgagtatatttcatcctctgggcgatcaagggaagctatgttcaccaaggtggccacagcctcgatggcacttggtggctcacctatcacatgcagaccgcatggtaggaggcgtgattctatttccatgatcttggcatacacctttccaacaataaggtcacgctcatttggtggaagctccacaccttcctcaggcaagggaacatccttgtcaagattacactgttttgcagtgctaatgattgagctcacaatctgcggaccacgtcctgtgtccttgagagattggtaagaagagatgagctctgaaagctgcttgagccccttgtagagaccagcattttcagctggtggtgtcaggtagcttatggtgtttgcatagcttctgcgcttggcaacagttgcttctgatggattgtttgctgcatagtagtagatattggggatgttgccaatgagactgtcaggatagcatgcatcactcatcccaacctgcttccctggcatgaactcaagagacccatgggtaccaaagtgaagaacagcatcagcctggaagatcttctcaacaaaggtgtagtatgctgcaaagccatggtgagggctagcagattttgagaacagaagccgcatcggatctccttcatagccaaaagtgggctgaactccaatgaatacattgccgtactgtttcccatagacaaggaggttttcaccatcagaattaaggttcccaggtggcttgccccagttctcctccagcaaggaggcataggaagtgagtgactggtactcccgcacgttcatgcggtaagcaacattgaggttggggctattgaattgggcctccttatcatgaataacctcctcgatgagggcctcagctgtgtctggaagaccctcaacattgtagccatccttcttcagatcttggaggacggagtagatggagttgaaaacattcaggtatgctgctgtgccaacattgcctttgtctggtgggaagctgaaaacagtgattgccagtttcttctcctcctgcagcagacaaacaaataaggttattgtttctgtgtgctttgcaaacctagtcaccatacaatacttggaatgagtatttcaacttaggaacttttcacgaaactgcaaactagataacataattggattatgggatcatacacataaacttttgactttatgtttacgaatgattgtattgtttcatgatttgaaacttcagtcagtaggcagttttagcatatatgtaatgctacaatatattcatcactgagcttcatgttaaggtatgcatcacagggattatgtggcaagcttgtggcaccgttatgtacatgagttcttcagaggatggaagagttgattgatcgattatacgagtagttctagttctcagttgaacatactttatgcaccttaagtattgagccttttgttctcacatgatgtattgtttcatttgaaggataactttcagttggcagctaatgattgcataacacgtggcttttcattgaacttaatatcatgtgatggtatgcattactggaattttcacatcaggattgcggcatcaaatgtacaagagctcttcatgggatgaatggcgcatgtgcaataccagttttgagcatgacagtgaagttgttaagctaatatgtttgtttagcatgcaatcttaaatccctcaaaaacctcaagaagatatgaaagtgaattcagaactatccagatgtgacgtttgtggttgcctttgctctcaggcagaaacaatgcaattctatacgggtactacaatttatacaggaactgtgtggaattgcgtaccttagttttcctcttcagctctgcccatctgattgctctagtgcagagctgctccaccctcttgtgcaacgcatgtgacttccctgcatcaaacagaggaaaaaacagtttcaggctcagctacaagtacaggattacctgcgaagtaggtgagtgagaccaaaaggaatctggaaatgtccttgcctgttctggggtcacggccggcgaacacaatgggctccatgccaccgtcaagctccgggagcgcaacctgcagcgccacctgaatcgggtgcaggcccaatgtgctgttcagccactcctctgtcgtctggaacacgagcggcagtgccacgatgtacggcacgtcgagcttctgcagcgcggcgatcgccttgggatggtcctgcctcgctggccctccgacgagcgcgaacccggtgagcgacaccaccgcgttcacgaacggctttccggtgatcgggtcgacgaggtaccgctgcgtgggtcccgagaagtccagcccgccggcgaagatcggtatgaccttggcacccttggcctccagctccatgatcacggcgacgtagtgaccgtcgtctccggtgacaatgtggctcctctgcaaaacgaggccgatcaccggcgcgttggggtccttgagcttgtcgttggtgtcgcggcgggtgccgtaccagttgaggtactccttgacgtcgtcgtacatggtgggcgccagcgggtgccagataccagcgtcgaggaagaggacggggtcgtcgtacttgatgtcggcgcccttgagcgccggcacgtaggagacggcgatcatcttgaggaaattctggaggttgtccggcgagcctccgagccagaactggaggctgaggatgtacagccgggcgtcctgcgccttgtcggagggcaagtacttgagcaccttgggcagcgtgcgcaccagcttga

SEQ ID NO: 19252 - DNA, 1186 bp, Oryza sativa
aaccggcatttggtgaggcatttccaacacccgatacacacgaaatcgtggtatttgctcatttcttctacggcggattttctcttccaaccttaagatttttccggggaattctgaacttctacgggattagcttgcatcatctgaatccaaactccatagtgcatattgccaactttattcatgcctgcgaagcttttctgggcattaggcctcatttcgccttgttccgccgcatcttcttcctcaagccccaaccaaacaagagtaaaccatgcgtcgttgggggtgctggtttccaactcaggggaacactaagccaaaaatacttctccatgcccttcaagacctcaaataaaggctggcacgcaaattggttttatgttcaaaaccccgagcctgttcttcccgagtactcctgtcttcctccagtttatcgggatacttggaattcactgccaatgggagacgaagctgcacaagcagtagaactgatcgagaggatgattaagctgaaagatcagggccttcaaggaaaacagatcacccggcactttatcaagtgtcggttagctctaatcaaagaaagatctcgcacagccttcgaatttgacggcaagcatgatccaaaccgtgaagatccagattctcttgacttcaaggtcatgaaggaaaggatgtataagatcttctcaaacgccatcgttgttagctactctcacttgctgccagtcataccgttcaatgcattcaatcctcctccactggtacgtattcatacacttcaacctttctcaaaatatgatcttgctttcttgttgaatcagttaacaatgaaggatattacacccaggaatttgctttgatgaagtcggatcccccaatcgctcaacgccgatcgccccgccatcaaactgggcaagggagcggaggaccaagaattcggtctgaaactcaaccaagtgcttctgatccaatcggccagtcagattctcgaaagaagaagctggttctaagtgacgacgaagccgatgataccgccaggaggcctggagaccgagagacaaccaagaaactaccaaaacaggctactccaaggaagaaaacatccagtcgccctgtgccaaagatcaggaagtcttctaggtgcaactcatataacgacctctcttgcattgatgcgcac

SEQ ID NO: 19253 - DNA, 7367 bp, Oryza sativa
  unsure (1)..(7367): unsure at all n locations
accattcatgtacaattaacatcattctttttaatggatcaagtgttttcatcggaatgagttgcatcgggatgaagctctctgcacagcagacatattctgcagaccaagattatggacctaaatcctaaggagtggtttaaataacagtgagctgaaacagtagtgaagatcgatgcagaagttgagaagcatgtgacaaagaagatgccaaagcttaattagttggggtattgtgatgatctatcttatgcggttcctagtagaaatggactgcataaggattatctgtttcctgtttcttgagcacaaggggatcaatcgaccctccataattcttctcgtgtgtgaaaaactaaaggattgcagtcctcccataaatctgagttcatttcttgaggttcccaacgtcaactccttaatttcctagctaggcatacgcttcctggactactaagcgattcattttttataaaaaagaaatatatgaaagttattgtaaaaatttatattaatctactttttaagtttttttactaatacttgattaatcatgtgctaataaataatattgttttcaatgcatggaagaatattttcaatctctcctcccaaacatagcaagtactactctagtccgaaaaattaaggggcggagtcaagacccagccaccacgggcgagtgccagagctccgcccactgcattattacgtaccctgtttgattaacaaggaaattagtaaagttgtggagattatggataccccatatctatatgacggttgtaatttagtcggatatacggtaccaaatatagatggaatatctctatgaagactcgggttaggttctaaacttgtatgtcaaggaaatacccgggatcttagtcggttacgattgtattttatctataatcccatattccgttaggatatggactgtattttgtaaagcggactccttcccctatataaggagggtccgtgtgcctcttggggggcgattctttttccaatttatacaatcaataacacactaggcggaatcatccccagacaggagtagggtattacttcttgaataagaaggcctgaacctgtataaaattccttgtctccaaacccatccactttcctagcttgatagccacccccttttattattgccgaaatcttgcttcgacagttggcgcgccaggtaggggtagcgtcaagttctcgccgactaagtgcgatgggtttcgtttctggcatcgacgacttcgccttccctcccgggcaggtgttccggtttggcagcctcaacttcatcaccaacgacttcggcaagatctctctccttgactcggattcaaaccagtcggggagagaccaggtccccgtgccgttcggtattccgaactcggccgaggcctactccaagatcatctctcccgactcggcttcaaaccactcggacgagatccaatctactcttccgcgaccagatcaagacgacgggtcctatccctcaatcctgacgaaacttcctgatgatttggccgctgtcttcacagtcaagacatctcccactcgaagatctaagcgagctccggcttcggccccgatccgatctagatccaggaaggttggcgttatactccaacctctcgggacagtctcgacggaagagttggatggctacctcagctcctccggcgtcagttctcgaccaaccgagatcctcgactacgatgatttcggctaccactacgaccacggcgacctcgacaacttcgacgacagctatgaggataactacacgcccctcttcttcggcgtattcaaggctaacaatgaaatggaggaacagcaccaagcccgagaagcggaccaagatcgcgcacgacaagaagctgaacgtcatcgactagaggaagagcgacagcgataggagcgagaacgactacagtgtgagcaacaagatcacgaacggattgcaaaggaggctgaagatcgacgacaacgcgccttggaatctgggcggcgagcgagagagctcattgggcaacaagacgttgatgggacagcggtctttcgcaccccccagcagaacgcggttgcagcaatcactctcctcgacaccctcctcaaggaagacgcactcaaccaagcttatcatgtagtcaacatcttgaaccagacgaagaccatgatcgctgcctcggttccagccaactccgcaagcacccgcaccccaactggtagccgagtccctcatcttcgatctcaagactatcaccagccaagcctcagcattgccggcgtcaaatctagtcgcaggagcaggggacatgatgaacggtccgttcgctcgcctcccgagcgatatagggagcgccaagtcgaacgaccacagtccccacatcgaagatgccccatcgatcttcgcgacaccatcaaccagcgccgcgcacaagaggccatcattcaccggatcgctacgacgacgacgtggacggagttgctgccttcacaagcgatctgtgtcgagtggattggccagccagctttaagccgactggaatcgagaaatatgacggcaccaccaaccctgagtcttggcttaccgtctatagtctcgcaatctgcgcagcaggaggagacagcaaagccatggcgaactatctacctgtggccctagcggattctgcccggtcatggcttcatgggctaccccgcggcacgatcggatcatgggcagagctacgcgaccacttcatcgccaacttccaaggtacttttgaacggcccggtacacacttcgatctctacaacatcgttcagaagtctggagaatctcttcgagattacattcgacgcttctctgagcaacgtaacaagatctccgacatcaccgacgatgttatcatcgccgcctttactaaaggcattcgccacgaggacctagtcggcaagttcggacgcaaacctcccaagacggtcaaacatatgtttgaaaaagccaatgagtatgccaaagccgaagatgctatcacagcgtccaagcagtcgggcaccacttggaagccaaagaaggacacgccgactgcaggagggagcggaagtaacaaccacaaggatcgcaagcgtaagcccgaagaacttgtggccacaacctctccatcttcccgacaacgtccccgcgtcaacaccttcgacaagataatgaactcccaatgtccgcatcaccccaactccaaccacgtggccaaggattgcttcgtctacaaacaatttgcggagcaatacgtgaagaacgcacgtaagccctcagacggagatcaaggcacatcaaagaagaaagatgatgaagacgatgccccgactggttttcaagatcatcgcaaagaacttaatcacatcttcggcggacccctggcttatgaatataagagaaagcagaagctaacagaacgggagatcaatgcagttcagcctaacacgccccaatacctccggtggtcagagatagcaattaaattcgaccgctcagatcatcccgaccgagtggtccacccggggcggtatcctctggtactagacccagtggttcgcaacgtcaagctccgacgaactctcatcgatggtggcagcgcactcaacatccttttcgctaagaccctggacgatatgcagattcctcgcacagaattaaagccgagtaatgcacccttccacggtgttatcccaggattgtcagctacaccacttggccatatcactcttccagttaccttcggcactcgggagaattttcgcacagaaaatgtttgtttcgaagttgctgatttcgagacagcatatcatgctatactcggacgactggctctagccaaattcgtggccgtcccacactacacctacatgatgatcaagatgcctggtcctcgaggggtcatatcactacggaacgacatcaagcaagccgtcacatgtgacaaagaaagttgcgagatggcccaaactcacgagactactctcgcccgcgaagagatccgactggctgcgaccacggcaagcgagggagaagtgcctgcaaccaagctgacgaagaccgaagaaagtgatgccaagacgaaaaagattcccttagatccctccgatcctgataagactgctgtaataggcgctgagttagattgtaaataggaaagcgcgctcatcacctttcttcagaataataaagatatttttgcgtggaaaccatccgatatgcctggtatccccagagaggtgattgagcactctttacatgttaaggaagacgccaaacccatcaagcaacgactccaccgttttgcacaggacaggaaggatgcgatcaaggaggaattaaccaagctgttagcagcaggcttcattaaggaagtccttcatcccgactggctggctaacccagtcctggttcggaaaaagacggggcaatggcgcatgtgtgtcgattataccgacctctacaaatcttgtcccaaagacccttttgggttacctcgcattgaccaggtggttgactcaacggccggctacgagttactcagcttcttggactgttactcgggatatcatcaaatccgactaanagaatccgactgcttgaagacctcgtttattacgccctttggggcctactgctacatcaccatgccctttggattgaagaatgcaggagcgacctatcaacgcatgattcaaagatgtttttcaactcagatcggtcgtaatgttgaagcttatgttgatgatatagtcgtcaagaccaagcagaaggatgatctgattgcggatttagaagaaacctttcaagcatacgtgctttcaagatgaaactaaacccggaaaagtgcatcttcggagtaccatcagggaagttgctcggatttatggtatctcaaagaggcatacaggccaacccagagaaaatcaacgccatcctcaacatgaaaccgccaagctcccaaaaagacgtccaaaagctgactggttgcatggcggcgctcagccggttcgtctcacgactcggcgaatgggggatgcccttcttcaagctgctgaagaagactaacaatttccagtggggacccgaagcacaaaaagcctttgaagacttcaagaaacttcttaccactccaccagttttggcctcaccacatccaccagagccgctactgttatatgtgtcggcgacctcccaggttgtgagtacggtcctggttgtcgagcgtgaagaggaaggccatattcaaaaagtccaacgaccaatttattttgtcagcgaggttttagccgactccaagacaaggtatcctcaggttcaaaagttattatatggtgtcttaattaccatcaggaaattatctcactactttcaaagtcactcggtcacggtggtcacatcgtttccactcggggatatacttcataatcgcgaagcaaacagacggattgcgaagtgggccttagaattgatgtctttggacatatcgttcaaaccacgaacttcgatcaagtcacaagctttagctgatttccttgccgagtggaccgagtgccaagaagacatgccagaggaaaagatggaatattggactatgcattttgatgggtcgaagaggcttacaggcactggagctggggttgttttaatctccccgactggagaaagattgagctacgtattgtggatacatttttctgcgtcccataatgtggcggaatacgaggcgctactccatggactaaggattgcaatatctctaagtattcgccgactaatcgtccgtggatactctcagttggttgtcaatcaagtcatgaaagagtggtcatgtctagatgataatatgaccgcttatcgacaagaggtacgcaagttggaaaataaattcgatggactcgagctcacccatgtcctccgacataacaatgaggcagccgacagactggccaattttggttcaaaacgggaagcagctccttcagatgtgtttgtcgaacacctttacgaaccgaccgtgcccagaaaagagacagtcgaagccatggatattcaaggcgtaagcatgatcgaagccgactggagagaaccgtttataaaatttttgagcaaacaagaactacctcaagacgaaaatgaagccgagcggatttccaggcgcagtagactttacattattcatgagactgagctgtacaagaaaagtccgtcaggaatactgcagcgctgtgtgtctttggaagaagggagacagttgttgaaggatatacattctggtatttgtggtaaccatgccgctgcacggaccattatcggcaaagcttaccggcaaggttttttctagcctacagcggtgtccgacgctgacaagattgtgcgaacatgcgaaggttgtcaattttttgccagacaaattcatttgccagcccaagagttgcaaaccatcccgttgttctggccatttgcggtctgggggcttgacatggtcggcccgtttaaaagggtagtcggtggttacacgcatctctttgtggctatcgacaaattctccaagtggattgaggctaaaccggtcatcacgatcacaacagataaagttagagattttttcatcaacattgtgcatcggtttggggtacctaatcggatcatcactgacaatggcactcaattcactggcggagcatttaaagacttttgtgaagacttcggcattaaaattttttacgcctccgtggcgcaccctatgaataacggacaagtcgagcgcgctaacggcatgatattgcaagggatcaaagcacgagtttttgaccgactacgtccctatgctggcaagtgggtagatcagctgccgtccgtactttggtctttacgcactactcctagtcgggctaccggccagtcgccgttctttttggtttatggcgcagaagcaatgttgccgagtgaagtggaatttgaatcactacgatttcggaacttcaacgaggagggctatgaagagggccgagtagatgacatcaaccgactagaagaagcccgagaagcagctttaattcagtcgactcgatatttgcaagggttacgccgttatcataatcggaatgttcgatcgcgagcctttttagtcggtgacctggttctgaggaaaattcaaacaacacaggatcggcataaattatctcccttatgggaaggacagttcataattgctgaagtcactcggccaggttcttatcgactcaagcgcgaagacggtactctcatcaacaattcttggaatattgaacaccttcgtcgattttatgttaggcatttcgcttgtatc

SEQ ID NO: 19254 - DNA, 1555 bp, Oryza sativa
aggactgaaggtttttaatagcttttgcgggttttaggctcaataaggcttgacaaaggcttttaagaaatcagaagctaagtatggaacaccaagcatagcataaattcatcagtattgtacaaattgagcctccaccgtcattgatcatcaaaatcattgttatatcaatcagtatcagttttttcatcatcagacttattagacccagtcggccgaaggtcgacatattggaatctctcaactacatcagcagcaatcttgtcagccgctttctgcgcatcattgatgaggtcaagagcagcttctttgctcgtcccgtctgcaaagccatcaatggcatcaatgtcaactcttggataaagggatttggtcatcgccaatgccagacttgctcccatacttccagcttctttgatgttcttgaagtaagtatctggagcgactctcagcttgtcgaagatttcggcagcatcaagtgtactcgaaccggcgttattgaagaacatggcctggataagtggagtagcggcattagcgactttatccctggctccttcaagcttgttgatcttgtcaactaagacatcaaattgtgcttgagacttgatcttgcggtctgcgtcaacagattcacattaatgaatcagcatgtagaagataatggcttttgaagtattgattattggtaccttcaacctcctttaaagccgaatccctctgtcttgccagctctgccttgtcattttccagagtttggatatgcttctctagttgagatatcttggcagcttgcactacattaacttcggttaatcaaggttacaaagataacagcacaaattagttgggcagagtttgcgcgaaccttttgatgagccactcagttcgaaattggactcctggagctcagcaatccgatccctcagatcgtgttcattcttcttggcaagttctctggcctcgtgcagttgactcctggtggcttcgagggttccaagatgaggaactagtctctctagggttgcggttttcgcctcgttcctaagatgaatcctctgcggagcagtttaatcagcgctcgagctagacagtaaacaagatggctgaggtcaggcatcaaagaaacttacatttacaatgcgagtcgcttggttgagtccctttttcagcaggcatacctcttcgtcttctttttgccggtttattacaattccttgaggttgcaagttgtcatcccaccacttgaccagaataggagggcacgaatcttcggttgcttatatacggggaatttcttcttcatcatcgatcattggtcctaatgcatccaatgacaaaggttagacaatcgatcagagttatttgggtcaacatggtttcggacaaagtgtttacctgtaatgatttcaggacgaggacgagtggattcggatacttttaaaggggatccagatctccggtcattgctggcgtcttgtccgcgagggttgtttgcttgggtttcgacttctggaatctcttggcttggccctgcgtccgactggtttccagt

SEQ ID NO: 19255 - DNA, 19428 bp, Oryza sativa
tctcacaactaacgtggcgccatgcggcatccaatttggttgctagtgctgcttatcgatcaaaaagtgtgaatacagtggtccacgtgtgaatacagtggaccacgtgtgaatacaatggactgtcacgcaattgtgcatctatctgtgtacatttgatcgtttcttccaatcccgtgcatcacgactctaggtgtttctctcctagggatgaaattaaatggtcgaaactatattatcatttttattgttttatgtaaatagtagcgatagcgatactactgtatatcaagatacctctatacttttataaccaatttaaatgaatacccacttgtataaattacataagaggccagatccagtcgccggggtgccagaactggccaaatgagcacaagatttggtggttcctcccaaggcacgacctgcctcccactatccatcattggtcgcttccctagcactgtcgcctcctcctctacctcaccatctgaattttccgatggcgactcggacggtggtgaggcagaggcggtggtggttgtttcgcatcctagtcgcccctgaggtgggagcgatgcggacggagctcaccttctagagttacggttctatcaatcttatttcaagagaattgaaacacataagaaagaagtggcttattatgaaagctgcgtcctcacggcacctctcctaaaaacacacctaaaaacatgaaaaatggaactatagactatggcgtcgttagtccacttagtgatccaattacaaaactatatgttatttgtccctcgactcacaaaaagaaactcaagttttatacctaggtccgacccacggttcactatttatgatgtggcatcatttttttttggttatattttatttgaagaaaatccgagctagaataataaatccctcaactactgtgaaaattctattatttggtcatattatatttgaagctttcgtcaatttggaaaaagcctggcacctgttgagtcagctagacttgtatccggtgttttggtttagtagacacacattaatggttgtgttatgatgattatgatatggaattttcctttagtgttgatttgcatcaaacaaaaatgaataatcactactggagaaaccatctttaatgggttgtccaaaaaccataatagtctcggttgcttaaaaaaaccagggctaaaaaaatttttagtcgcagttaaaaagggtagcggtattttttctatctcctccctagcgcgtagatcaacaaaaatcaaacagagcaagcgtgtcgatcaattctcaaaaaaaataaagaacaaaaaaaatcagaggcgcccagctcccttatctgttctcctcctccactcctccccatccatctcttcttttcttcctctcctccttctcaactcctcctccagatgcacttctcatttagttttctccttcttctccttctccactcctcccctccccttatctttgacctagctggcaggcgggagggccgcggcggctgcgtcgggggcggccggcgccgggcgggaggccgcggccggcgccggttgggaggcggcggccgacggacaacatgtttttttttcttctcttctctgttctctgtgatgaatgctgacgatgttgtagatgtgaactttttttttctctgttgtctatgatgaatgcttgttgtcctggagatattgtagatgtgaataaatgcaaagaatattgatgctttgatgttgattttattcatttgatttgtgatgatttgggcttttttttattttattcattcgatctatgatgatttgggcgatatgcaaagagtaaaagaacaatgaaaaagaaaaaagaccaaccggataaaaggaaaagaaaaaaaattttttaatcctggttggtaacaccaccggtacagactgttgcacctcccaggatcagcctgatgccgcgcattccaaataaaaacgcaaaataaaagatcatcgggcgcaaccaataaaaaatcgccgcttcattgatttcaatataccaggtactaaatattttcacatatcaaagaacgttgtagttatgttagaactgaaaaaaaatatcggaagaatgggagcataaattaagtgggtcacgttgtatatggagtgtatggtccgatgaacgtgctttgctggatgatggtcttttatattgaatttttacggtataatttattggtagtataaacaatccaatgacgaattagtttcctaccctactgcataaatggttttttcagggcgagaccctctcctctcctttctcactctctcacctcttcttctcactcttctctcctctgcgcagctctcctatctcactctcctcttgcagccagcggtgggcggcgcggccggtagtgggcagcgtggcaagcggcaggcaaggggcactgctggtggcaggtggagggctcgaccggtggcatcaggcggctctgcctccgccggcctcgtgacgggcggcaggcggtgctatcaacggtgggcttccccgcgcatcgacggaggcttcgatagctgatctggcaactgcggcgaatgcaggcgccggcaacggaaaaggcggcaactccctcggcccttccacgcgcggatcgagcgacgggctcgagcgggaggccgggagcggctctcccctgcccttccccatgcggatccggcggtgggctcaagcgggagggtaaatttgtctttccatgttacacatgacgggcagttccgtaaaaacccattcttcactccggtcgaaaggaaaataatcgttagctgtttcgcgatgcccagagaaaagcaggaaagtagcttgtattataccgttttcctctccctgttttgcggttgcaatcttgtggatttatcaccacgtagtatgtacctatgccgaatgtcgatgatcaggaacaagattaattatgcatagctagattaaagtgtgtttaattagagaaaataatcgccaatttgtttattactagtatttattaatgtattagatcgtcgttattctttggttgcgatctatagtgggactaaaaattaaatagtcctgttgtaaccaccaaccgagactaaaaatccatttttagtctcggtttttagtgtaaccgggactattatgattttcgccagactgatcaaatatggtttcttcactagttaataaagaacgtctgcacctggacatacgcactcgcgcactgtgcggagtgaggataaccggctcgatgaaacagagcaaagcaaatagataggggaaaatagaggaagtagagaagggcaaatctgtatatggtaactcaataaaattcagcagaccaagcatgatttcacgttatcaacaaaccatatatgatttctccaggaatttcacaacaaaaccatcgtgaccttctctataattatcattgatggtttttatgcacaaagcaatcatcaacgcaaattatacagaaggtcacatagatgtagtggtggatctagagtcctaacgtgtctatcgttatcatagcatgctaattatatttagaatatagtgttataatatatagacaagcaatttaaacatagcttttgtcgaatgtcatcgctgtcttctgacaccagtggtaacactgtagatccgcctgatagatggtaagcgctaacaaaatattatgttcatgttatcggatattatgataaaatagtaaccaaatttatcccataccttttagtaagttttaactctccaacaaagccatgatagtaatttcatcaaataacaattatcccttgtatatctaatctttatctttatttactacgtagtaaaaaatacatagtagtggtggtgagtcctggataatctaagggccgatattacccttaggatcctcgtgcagatcaaaaggctcagatacccctcatgctgtcccgcaccgcccccacctccgtatcacaccgtccgcccgcatcacaccgcctgcccttggacgcccccgttacctcctccttcatgccacttggcgctgcctccgtggcgcccccggtggctccttcgttgtgctgctgccacctcctccgccgcaatgctactccatcgcttcatagcccctctcctcctccagccctatgctccctgctccgtccggtgcaccgccacttcctatccccatcatgtattccaactttatatctccctactgctgtcatcctccaacttcatatctccctactgctgtcatcctccaggtaattgattctatattggtttggtttatcggatagtccgtggaagatcgagctgctgctaagtcaggatacatacatgtcacagcttaatttttgtttcaggatttataaattatttaataaattattaatagaatttatattaaatgttcattaatttataagtgaagttaaatgtgggaaataaaatttcctaaatataaagcatggatggatttaatttgtattaaattctccatgattaattatactctggaattttcttggatttttcagagctcaattattaattttaataatacaaagaatatttcagtaattattcacatattaaattaatcattaaatgagctggtttcaattttgttaaatactttgagtgttcaagtatattcaagatttttcttggaattacaattgaaagatcatttcagtgattaatttaattgggaaaagtaattaaaatccccttttcctttttgggccgaaacaggaaagttcacctttagtcctcggcccattcttctttctattcggccggccttatcccttccaatagtctagtttgcatccctgcttctatcgggctgtgcaatagaagcccagacaaaagtctgttttgcctccctgacactgttcatcttccagctcggacagagtccgagccagccatgcccgtgtcctgttgccgccgcctcctccttccaaaatccggcctcctcgttgctcctttttccaaattagttgagggaatggaatcctctcaatctcctctacaatttcccaagaaatcccaaaaagtttctatggaaatcctttccaatttcgcggatcaatctttccttttccggcgaagatccttaacattcccgcagtttttcccgtcgatatgggcttggacccgagctcccggtcctatataaaggaccccctagtcgtcctctacctatcccctcaaatcccgtcttccgccgtcgccggaaacgctctccccgcgctcgccttctctctccacctccggccgctgctccagccgccgtgcgccgtcgctgtggtcgtcgccttcggtcgccactgccgccattgggttcacgaggaggagaagaagatcgtcctccacttccccgaagccgaaatccacctgatgaggacataattagctcggatataaccatgactaccttatgtattaatcaaataaaggtgcatatgttctacattagatatatttgttatatatttgaacaaacgctgccacacaatgagtttcgtgtgtttttgtttgcagaggtacttgcttgggcgaaagaaaagagaccgagcgtaaggaatgcatggatgattgaagaagttgattggggaccaaaccaagaccttctgcaagtcttcttttttttttgaaggttttctttcatcttaacacgtcacttttggtccataaaagaaaagagataaagttctacacgttttgatttcggattcaggcctcctgacagcatcaactttaaatggacctagcctctgatctagaaggaattttgaggcctatgagtacttgttggaaagcttatgggtctactttcagatggttttgtccccatgtcaaaattcctaccgagctgccggaaatctgcaaaacaagccacatatctcatccagtccgaatctgatttgggttttgggccttgtaattgtgtcgtgggcttagcccaagggatgtgcgccatagggaaaccctaggacatccctaatcatattaattcagtagccgtcatcgtttagagttgggttttgcttagattatcctgtcaagaacagtttcgccgctagatcggtttgtggaaccccaaattcgagtgcttaattattcatatgcaatttggttacaatctatcttgttcttgcttgtgttctttaattcgcatgcagggattagccttctcggcgaggtaaaccgggtttcggcacttttgataaccagaggagacgtggtgctgcgattacggggctcagtagcgtgttcgttcagaagccggatcgagttgtgtcacgactccacccaaatctttgtttatcaataccaatcggaagatcgggacctaacatccctcatcaccaccggagctccatcagcgccgtcaacccgaagttcaccgtcgcgttttgatatccagcgaggccctgcagcacctcccattgtcgccaagttttgtcaccgcctcctttgggttcgcagctgcgaggtgaaggccgtccactcctccattgtcgctgctcatcgccggaaagtcgtcgctgccgtggaccagtacatcgccaccattcggatctcgtcaccgccatcttccgtcgctctccgtcatcacgtaagtgttggtaaggaccgtcgtctcgtgctctttctcccggtgtgctccctttttgccgctgctccgtagttcaccggtgatcgtcgctcccgtgtctgccgtccagtgatcccgcgtggttgtattatctttgccacgtcgttgcatctctgctgtcacttcaccgccacctagccacttcgttgtctctgctgtgccatgtctaactaaaccctagaatggattcaatctaatccgttggatctcagtcaactctcggttaagattaatctcagccatccaaaatcaatataaatccgttctctcttttcaatggcatattattcatttttaatatatgtcaactaccaaatataatctaattttttccagagattgttttaatcttttatctcagttataaatcatttgtatattgtttaattaatttggaatagtcttttctctaataggattaactggaattaaatcttgtaaaattcataactaattcatataaaatcggaatgaggtcgttctagtctcataattcatctacaatcatgatctacatgtttgtttactttatatgttctgtttatttggtttttattagtctttttcctcgttttgcatgttagcttgtcgttttcgtcgtttcgaaggttcgcgtgtgtgtcgtaagagttcaagaagataattgaagaccaattattgcaaggcaagccacacagatcctaatatacaattcctttgagcatgttgatcctatatttaaagtctctatttatttcaactgtgcatttattttcgaatgtcaccgggtggtgtgaacttattcctttgttatggccaatttgcgttcattactctattccttgataccttgtgttattataattttactagttgagctttgtatatttgttcagctagatgttagacataattgcttagccatgcttagaaacattagcacacaattgggataactaatgttttactattacttaatgatggatatttaattgtagctcacaatggttaatcgtgattggttaattaattaatatgccattaaaacttgataatggtgggttgtgagcacatggttttgatggttgtgctcatgacaattaaggactggttcacgagtttcggttgtgaaacattaaccgtgccaaccacaagccagcatgcgcaacgcctttaccttttgtatagcatggttcattgcggggcaccagattgagaagtggtggagataagcccacgggggtcgctggggagtccatgccttgtttataagggggtgattatgatccaggaacggtgtgctgtggtggattgtattatgcgaggggtactgtcacagctcctttccgaggtaccgtggtggtattgaggcgcatggtaacatgttgtggggctgtgtcttgtgggtacagtggtacacctctggctagagtaaaactattcgaatagccgtgcccgcggtcatgagcggctctaacaatgtctgtcgtgattagtctcacacttttcaccataataaataatgctataactggtaataatttgattagctcctggtttggaatgatacattcctggtttggagatagatctgtacagccgggtatggttgtttagtatggttgggtctgtgtagtatgggtgtgctgttcagtgttgattaatattgatgattaattactctactattttacaattctcgaatgtttgttaaatgctgcttttgtaaatgagccctatattatgccattctttggtatccttgtgcatttgcatatttgctgtgtggcttacggagtattccatgtactcaccttgcaataaacaatcaaacctcagttcaagaaaagttgcgaaggagaagacgtttggcttataccccaattgagctgcctgtgggagtgttgccggagcttcgctagaccgtaattccgctgctattttctcttttcttttgtaagtatgtaatgctgtattattgatgaatctgtatattaaattgtcagtttgtgtaccttgtctgattcctggacgaggatttgacacacaaattagttcagaaattactagtgaatttatgggcgtgacaagttagtatcagagccatctcaactgtaggataagccaaatggtcaaactttaaggactaattttcaaaaaacatgattttgtgaaaatgtttcctttcttccttctccagaattctttgcaaattgctttatcatcctttcctcttcctctttcagcttgagtagttctgaaactagttgttgaaacttgaagaagccaatgtggtctacttatcaagtggatcgaggaatatgaaggtgatgatcgatctgaagtgtccagttgtcaagaaggaatgaagtttggatcctaccttagaacttaaaccgccaaagtgactttgaagtatagttagtagggtagaacgcttttgtttgcttgtgtgtaggtatggttgcattctcatcattgaggaagttcattgatgagtgtgtaattgtactaggttgctcgtttaatcaacttgaacaatataatggtctacacacaccagatcagtgataacctagttaaggtctttatctttagtgtaacccctctccttctatcttctccaaatctgcaacgaatggtgaacactcatgctagtggaagtggaaacaataacaatgaagagaacccaacccttgctcaagttctggctcaacagactcagttaataaacatgatgatgcagcagatgcagaaccatctcaaccaagggaacaacaatgctccaccgccccagaacaagttagctgatttcctttgtgtgaagccgcctaccttttctagcactatcaacctagtggaagcaggtgattggctacacactattgagaagaagttggaattgctccagtgcacagatcaagagaaagttgtgttcgcttcacatcagttgcatggatatgcttcagaatggtgggatcacttccggatgaacagagcagaaggacaaccaatcacttgggaagagtttaccgaaggattgaagaagacacacatacctgcaggagttgttgctttgaagaagcgtgagttcaggacattgaagcaaaaggatcgtaccgtgactaagtttctttatgagttcaaccgtctagcacgttatgctccagaagatgtctgtactgacgaggaaaggcaggagaagatcttggaaggcctgaaggatgaactgtcagttacgttgatctctcatgactatgctgattttcatgagctggttgacaaagcaattcaactggaagataagaagaacaggatggacaaccgtaagagaagaatgactgttttccaggaggcacagggcagtagccagaggcagcatatcaagccatcccaagttggtgaatcaagtctaacatctcaagaacaatcgcaacagttgaacatcggtggtgagatcaattcagagactaatgcaagcaatgaagttaacatcaagcaagctactctatcggagccagttcagcaggatcagtctcaagaaaataacagtagtggaagggagcagcaagtatgtttcaactgttatgagccaggtcacttcgcaagaaagtgtccgaagccgaagcatcagcagccgcaaggtcaagtcaacaacattgtcgtcacaggagccaatgcagtgccagttgcgtcctcaagtgttacagctcagccaccagtttcaaagcagcagtagtcttctttaaagccttagaataattatcggagttatggaataagatagactgcagttgacctatgcccttttctttctagccgttccgaatctcgggacgagattctttgtaaggggggtagatttgtcacagcctgatttttgtttcaggatttataaattttttaataaatttttaatagaatttatattaaatgttcattaatttataagtgaagttaaatgtgggaaataaaatttcctaaatataaagcatggatggatttaatttgtattaaattctccatgattaattatactctggaattttcttggatgtttcagagctcaattattaattttaataatacaaagaatatttcagtaattattcacatattaaattaatcattaaatgagctggtttcaattttgttaaattctttgagtgttcaagtatgttcaagatttttcttggaattatttgagcattggaagtatttttaacaattgaaagatcatttcagtgattaatttaattgggaaaagttggcaatacaccgacgtataattgtattgacgtggatttccttacaaaaaccctaggtatacatatttaattataccctaaggttgatacaagtcctgattcgacacaatatagggccccatcatttggctttttcccaaataagccaaaacggcttattagggaataaaaaaatgaatttgtaggtaaaaattttatatatgtgttcttggtgacttaaaagccaatgcagaaaaaaaaactacgttgaaaatatctcaaaatcaatctcaaaattaattttaaaaatttaaaatttagctttttctttggctgattaggccatccgatgggagccataatatttcctaacaagaaaagaaataactaatcatgtctatttaagagatatactaaggaaaatataaagcagtattgtcgtagttttcaggattcctcattgaactcggcttaatctggataaatttccatctaccaatcagtttctttcattaaccaattccacaaaataatcgtaacaaattttggtgttaacaagaagtcaatgtgatttggaggatatatgaagatcttgtttcgtcgatcaccttaatggatggttcattccaccggtgctcatcgtctagttccatgaacaggcataatgacaatggtttcattgtctaatcagatctctttggttcccatttcttgattctccctttttgctaggaaccatttagttccaagaaaaactatcttagccaaagcaatgtactccctttgtcccgaattataagatctatatatttttttcacgatcttcaatgacttaagttaaccaataatttatttcatattgtatcatcaacaaatatacaattagcattacatggaagtattttataatacgaatgtaatgacataacatatataatacttggtgtagatattgttagtgtaattattaatcaaaagttatcgagtttgattttacttaaaaattaaggctccctataattcaggacagagggagtaagatgaagatgggctattatattgtattgcaaagttccaaaaaaaatctagtttattataacatgagtgatgtcagctatgaaacatgcgaaagtgaataaagccaaaatttaccgcagaagaaaataaaaatgccattttgtaacaacacaagcaagagagaaaaagaaaacctttcatgggtttgtggatcactggtttgcatgctagaaaataggcactgctgatgacaatgcaggaagttgatatctctggtacaggtcattgaactcatgaaaatttcagaacacataaaaaaactaaggggcaattgcttatttgaccctgttttgaactgtaactaccaatttaaccctgctttttaaaatgtgcttatttgaccctccttttaaaaaacgaagcactggtctgaccatattccgtttggatgagttaacggtgttaatttaggcgtaaatagtccattttacccatacttatttaacccagttgcttgtttgacctgcttcttatcctctctctctaatctctctctatctccctcgagcgctgcggcgacggtggcggcagttgcggcggaggaaagagcgacggcggcggcagctgcggagggccgacggctgcggaggagcagcggcgctgggagcgaaggggcggtggcggctcagcgacaccagcggtggtggtagaggggtgttgacgtaaaacacgaggcctgggagatctgctgaactccagtgcaggtccaaaactcgcgttcgggtatgctagcgtggcagttgatttgatcctgcaatcaacaagaaataaagacaaagaaaccgcagttaaacctataaatgatagctgatcggctagatgccgatgacatatcatttatctctgagccgatgtcatatgtaaatcaatcggcagttggaactagataataaaggactaaatctattcgatcggctatacatattaacaatatataattcttatatcgatatatatttaaatcaagtgattgggatagatcagtccctatgccgagacagtataaatcacttagatcgaaatatatattaataatagaactatatatgtttacagcaaatccgatcagatagatctagcatgtatcggctaatactccgatacagctctatgttaagatattaaaacaagcagaatataccaaaccgaagcttaatatacgtagatgcaataatatcttgacataaagagcagatttaacatgtcaacgaagcatatagagcaaatatagttaaaccagataagatcggctgaaactccgattctaccctaatcggcaaccagaaggcaggctagagactaatattctaagcacgacttaatagatcaaactcaactgatgcagcattaagtatgaaaagaagaacaatatgtagacaatcaagctgctggaagtttcatagagtggtggagatcttatataatctaaatcaacgtcaaaatctaacctaattggctgccctctattaacagatgttagccgattgtaggttagatagtgatattgccagagattatgtaagatatatcataactcgatgaattacataaacaagattagagtatcataaagatggaagcactaatcccgagaatgcaagccatcataacaagttttacctcttgttgaagatcgaaaccgatgcagctcaacccaaaagcaagaattcgtcgaaataaaacaaaagcaaaagggtggcgatgcgccgaaattgtattgaacgtgtgtgttaattgattacatggggttcggggtttatttatacacaaaaattacaaactatgtccatatcaaacatgactcgtatctctaacaaactctaagatacaataagtctttatggcagacttttgccctaaacatatctctaagaaaattacataaaatatcctaattaatagatacaattgccttctcaggactctatccaagtgcggcaaccatcttgaagcaccttaattcaacctgatatcgtatacgaagttgtattgtcagaatcggctatatcaacttactcagtccgattcggatccagccgatcctaatcgtagctgatttggactcctgccgattcttgctctgttctcgaatcgatctccgccttcgactccacttcaatctaatcctcttttccgatgctgatattaccaaatttggtcgttaacatatgccccccaagtctggaatatttggtaatgttccggatttgctgtatatcaactccgagcaagtttcgcactttgccgttttccgactgttacagttgtgctttaaatactaaccgtcaccctcgaaaaatttcacaccgtcctcctccgttttcaccgctaaaaccaactttgttctctctctctccagcgatctctccaacacacaaggcgatcccaggcgatttcatttccgatcagatctccgcctatggtgatgtcgtcttccgctagcccgtctaccgcgccatcggcagagtacgctgaggtaagttctcatcggatagatcccttttcctcgcatgaaatcgatttcctcttttctcatcgtgctttctgcttcccgattcctttggatttgcagcacctttccaacctagtcgcgattcccagccggtcgcacgaaaaccactattttcttggcccaatcggcaatattgaccccattgatttcatcattggtgaaaccaacagaatcccctttagactagtgtcacgaccggaaataacccaacgggcgttccttacgtgcgtgtattattccttgttccaggaggcaaggtacaccgaaagttgatacatttcagagtttatcaagcggaagcataaatagttacattattacatgggcggcgaaggcccagcacacaagaagacaaacgggaaacagcggaagacaagggcgacgaccacaggcgcttgactgcaggcacgagctaaacaccaaagccttcatcatcaaggggctccttttctgggtttggcaaaattgagcaagactgagtacaaccaccgtactcaacaagacacacccataagtgcagaataaatgcaagggagtacaagggggttataatataaagggttagggtttgcagtaaacagcattaaaagacacttagttgctcaaagctattttgtaaatacgatcctagagctatacaagattattaatcaaggccgtgaacccacacgaacctgccttaacccaaggcctacgatgattcagaccgaactggcaacccgaccctgggtcccaactcgtcccaagccaacccaggccaaccatttccacattttagttgttaagcaggttttaaaattaaaacactaacttggatacattgctcggcttgcccataaccaagggcgcggctattcgaataggttatactctgatcagaggtgtacatctttacccacaagacagatcttcctcacatgtaaccacgtgccacataccaccatggtatacggacggaagacgtgacatagtttccaacccatcctagccatagacaagagtaccgacccaaccccacctacggccggaacccccgggacaggtaggcaggactgagcccctatcagcaggacaccggccctatgccatgacatctcgactaccgggccgcagctcgtgtagccttcatttgtcctagagatgtccattgacccccgactttgtccatctccatccgtgtacttttgtttataaccagactgagccacaaactaagccttacccactagacatgtggaagtacggtagtgctttgcaacagaggcccgaagaccggtccttatatggccgaggtgctactatcaaaaccatgcaccccgagcccaacctaaaaccattttgaggattttgaatagagggggaggtgtgaatccaattccacaataatccaaccattccatagtgtccaggtgatatgaatatcccaaagtctagagttgtaaaaccacctaatgttacctaattaagcggcgaagcatctacctaaattcatactagtggtaccatgagtagagtgtccactagttggggttttgtttattctagggtgaacaaggtaataataacaataacaataataaggtcataacaaaggtaaataggcatggctagataaaacagtgataacgcgggaatttaagtaaagcgataatgcaataatttaaatcaaaataattttataaactgggattcaatattctcaaggatgatgtgacttgccttgctcactttcccaaacgtcggcttcaacctccacgaagagcggatcttccgaagctgcagcgtctacacgaccaacggaaaagaaaaggcttttactctaacaaactccacataacaagcaggaacaaagcacaaaaatgggttcttgacttcttaaggaaaaattagagacttgaacggtccaattccgagttcaaatggccaagttatggccatttgaagtttatatgctatttaaatgaatatttgcgaatttcttcatttaaattttaatttaaaaaggggtttattgcatcagccgagggggaggggcgcgcggaccgggtccacgggagtggggcccacgtggcagcctcacggtccacggtggaccgggtgcacccgggctcacaccggccggcgccgtgggccccacgcgtcagccgcacccgagggcgcgggcggctgacggccgggccccacgcggcagccactcggcgcgcacgagggcggccacgccggcgcggtcggcgggaggcggcgcgcccgcgccccgatggtcgccggcggcggccatagacgcggcggagcggcggccgagagaggggagggaagggggaaaggaggcgacggtccacggctcaccccggggcgacggcggcgacggaggaggcggccggagcagagggaggcggtggcgcggctcgggttgtcggggacggcggagctccggtggtcggcgaccgaaacggagaggtggacgaggtcggcgaggatgcggcgaagccgaaggaggcagcgctgaggcgggagacggtcccggcgagcggagaaagccggccggaggtcgtcagcgacggaggagagagagagcgacggcgcgagctcgattccggcgaggaggaagggcggtgagaggcggaaacggacggaggaggtgcggggagggtttaaatagggttggaagggggagagagcggccggaggggaaggaaaccagcgcggcgttctcgggttccatcaatggcgtcggcgggattaggggaggatttccaaacgaatccaagggagagagggagggaaaattgaggggaaagggagagggaatcacggggaataattcccccctattgattgcacgcggggacgacgggatgcggcggattcggcggcggcggcggcaggagcggcgggaggaaggggatgacgggtgggccccacccgtcagcgagggtggcgggtgggcccgcccgtcagcggcgcgcgcgcgaggagggaggccgaatgggccgcgggaagaggagaaagagggggagggagatgggccgaattcggcccattagagagaaggagggattttagggtttttctttttataaaatcattttaactttgtttatttcttcttaattattatttgtgctctgaaaattccactaaaatttatttacacattttaggcttttaggaaatatacaaaaatcctctaagccttatttgacttttaactttgcacattttaattgttggaggctttcacacagattttaattattctaggcataatttagaggatgtattttagagtcgttttgggacgtgacaaacctaccccccttaaacggaatctcgacgccgtgattcggaagaactggcgaagagatcgggatgggctgccttcagctcgtcttcacgctcccaagtagcttcttcctcggcgtggttgctccattggaccttgcaaaaacggattacccggttcctggtcctgcgctccatgttgtccaggattttcactagtctctctacgtaggtcaagtcttcgcgaacttcaatctgctctgagtcggcctgctcggacggcactcgaaggcatttcttgagttgcgacacatggaacacatcatgcacgttgcccaaggaggcgggcagctccaactggtaagcgacttctccgcgtcgagcaatgatacggaaaggacccacaaaccgaggtgcgagcttccctttcgtctgaaaccagcgtacgcctcgcagcggcgtgacccggagatacacaaagtcatccactgcgaattccaggttacggcgtcggttatctgcataactcttctgccgagactgggccacctttagattctcccgaatggttctgactttcgcttcagcttctctcaagatatcggtcccgaacacttggctttccccaacttggtcccacaatagcggtgtccggcatttgcgtccatacaacgcttcatagggtgccatttgtatgctggcttggtagctgttattgtaggagaactcggcataggggagactcttatcccaggtcttcccaaaatctagaacacaggcacggagcatatcttctaggatctgatttagacgctcggtctgtccatctgtctgtgggtgatacgcggtgctgaaatttaagcgggtacccaactcttcttggagcttcttccagaagtgagaggtgaattggcttcctctatcagatacaattttcttaggaacgccatggagactcacgatcctagcgaagtagagttcggctagtttgctccctccataggtggtcttcacaggaataaaccgtgctaccttggttagtcgatccacgactacccatatagagtcataaccgccttgggtttttggaagtccggtgatgaaatccatcccaatttcatcccatttccattctggtacttgtagaggttggagaagtccggccggtcgctggtgctccgccttgacacgctggcacacatcacaaagggccacgaactctgcaatttcccgcttcatactaacccaccaatatttttctttcaagtccaagcacatcttagtgctgccaggatggatggaatagggactttcgtgagcttcctgaagtatcaactgtttaagttccctgtcgtctggaacgcatacacgatttccgttccatagggctccatgttcatcttctgtgaaaccagcggctttaccttgtttcatattcttgaggatcccatgcatatctggatcattcttctgagcctcgcggatttgatcgagcaaggtaggcttggcttccagcgtagccaagaatccatggctaacgatgtttaggttcagggcttccatctgttgattaagttccgatggaatgtcacggacgccaagagtgttgcaatggctttttcgacttagagcgtcggcgaccacgt

SEQ ID NO: 19256 - DNA, 3545 bp, Oryza sativa
tgataggcggaaacggacggaggaggtgcggggagggtttaagtagggttggaagggggagagagcggccggaggggaaggaaaccggcgcggcgttctcgggttccatcaatggcgtcggcgggattagcggagggtttccaaacgaatccaagggagagggaatcacggggaataattcccccctattgattgcacgcggggacgacgggatgcggcggattcggcggcggcggcggcgggagcggcgggaggaaggggatgacgggtgggccccacccgtcagcgagggtggcgggtgggcccgcccgtcagcggcgcgcgcgcggggagggaggccgaatgggccgcgggaagaggagagagagagggagggagatgggccgaattcagcccattagagagaaggagggattttatggtttttctttttataaaatcattttaactttctttatttcttcttaatttttatttgtgctctgaaaattccactaaaatttatgtacacattttaggcttttaggaaatatacaaaaatcctctaagccttatttgacttttaactttgcacattttaattgttggaggctttcacacggattttaattattctaggcttaatttagaggatgtattttagagtcgttttgggacgtgacaactaaccaaccctaatctgggtcactggaagaatactttcaaatcttggccatctcttgagaaaaccacccctgagaagagttggaccacctggtaccagcacgtatcggctagtaagaaagttcactgggatgagattgggatcggccaagcgcttgctctcaccatagccaattctgctaaggatgaacctctgatggctgccgccacctatttttggtccaacaccctcaatgccttcttgttcaaccaagggccgatgactccaactttgatcgatatcaccatgatcactggtttggatgtgacttcatcggctaatcccatgagcatgaacaccaagaatcaattcgacttcaggacaaaaagcataggtggttggtctggctatgtagcagcatatatgggtcaagggtctgttactcctcgagagcatgtagccttcttgctaatgtgcctcgaaaaatttctcttttgtggatccagttgtggccctacaaccaactgacaatttgtagccgaagccttagaatcaaagaaagaatttcccttagcaagatcctcctcggctacttataacaaacattgaacaatgcatcggccaagatagccgtcagctcagtagtcggtgcaggtggaccatggtggctgctgcaaacctggttgaacctaatggtcatgaaagtcgtcaatcggccatctgtgacagaagctgagttcccattgccagagccgattgtaggagatgatggacaagaacacactcatcgcagatgcacatcatatggggaatatgcgtccacaccaaccgatgctggagcaaagctatcggccgagctgctcaaggattggttctgcagcttctatgaaggctttaagaaagacgcccgagtttggtttccttatgaagactcagtagatcttgaacttccatcagactttagatttgaagatatcaatcatgaaaagtatcaaaaatccagagaaattcttacagctgcaatcagcccatgcatccttcctgtcggcattcatcaagaagaaatatccaagtttcctatgagttttatcacccaatgagctcggctagacaacttggattaggccaactcccaatcggcttattctttgccgacaagatccagtgccgaggagaaatcacatcaacgctgatgatggatcggctgcttaacctcccaggaccccctctaggcagcattgacaacattgagttggcgggattcaagagcagaaacttcgacagatggtggggtgaatggaagctgcacctgttttcatcaatcgacttcgatgtatatgacagacctattccctgatgtcataccccaggtaaaccttgtcattattaacttgaatgatggttagccgattcgtcacttgactaatcttttgttcttgttttgcagaccatcgactcttcccctccgcaccaaagcaacagtggcagtgacattgaatatgctccaggtctgattcctaatggaggtggaccatcccccctgttattgactaccatgccccaaagacttcaactctccatcacggcctattcagggaaccagccgatgcaggcaagaaaagaaaaactagatcatcggctatgggtactttggccttagctccaaagaaaaaggccaagtccaagaaaactaacccgactgataagccgactgatgatctgcctgccttagatccatccatcgaacaagctctagatgaagaggaaattggtgaagatgttgatcaggctgcagttgaagtgagtgacatagaaagaacaccatcaacttcacccaagcagacatcaccaactccttctgctcgcactcatttcacaagagtaagcaactcttcttgatcccttttgtaatcattttactttatggccgattactcacaaattttgtaattacagaaaacaagattgctatgaagaagaaatcggctgcagcaacatctaaaccagctccaccaataagatagtctcgattttaattagttgatcccagccgattttatataacactcgtttattttacagcctcctcctcctccttctccttccgtccagcaatcgtcaagtgaccgaactccatcggctgtgggaagtcaacacattgaggaagaacaaccagctgctcctgctatcccagtatttttccttcgatacaagaaattagatcggctatattttacctagctcttattctctccgaaattgtctctgcaggctttagccgatcttttctcctttgatatcagagattatcttgatgagacagaagaagatacttcaagcaaagctctagctcccttatccgatgatgtgaagaagacacttgaagatatctgtcatcggctggaagcatcatcattagataacttggtggtaaactgtgggccaattaggactcggctacttgagatccaagctctaatcctagatgagctagccgacatccttactccaggggtctatcttgagcaacatcaattcaagctggaaaaggccaagttaagactagccgaacgtcgggagcgcaaggatattgaggccacaattcaagccaatcgtcagcttgtgcatgaggagaaatccaaacttgatcagctttcggagggtccgatcaaatccaacattgatcggctcgaggctcgcaagattgagctactggcacaacttcaggaatgcaacgccaagttagatctggagcacaagaaactagccgatctcccgcggtccgtcgaagagcaaaaagcaagacttaaataggctatcaagaatgttgctgatctgaccaagtctttgaagatcattcctggaactgatgctcaagatgcccaagccattgaagaagtcg

SEQ ID NO: 19257 - DNA, 6880 bp, Oryza sativa
aaacaactaagggtgatataacaatatcggccattgtatatcggcaaaccataaccgattacaatttgaaaaaccgactaagggcgatataacaatatcggccatctcaagacgatgaaaatacatcggctatcatgtatcggcaacacagccgatcatgcattaacccaaacacttgggtaatatttcttcaaatatttgccatttagtgctctgccataaacttctccatcgagtccttgcaacatgtaagctcctttagacacaactttataaatttgaaacggtccttcccaattcgccgactacttactgaatttgttatcccgagttccaatcggcaaaatcaacttccatacaagttccccctccgaaaaatctttgggtactactttcttattgtaatgccgagcaacacgcttcttatccttggtaacttttgcaagagctcgcaatcgcgactagactagatcctccctctcatcggccataaggttgtaatattcatctgctgttaaagtattttgcaattccgttcttctagagccgattctaacttcccatggcaaaacagcctcatgtccataaacaagtttataaggagggacttggatcgatccatgacacgcctaccgataagaccacaatgcttcggcaaccgagtatgccattgccgaggataatcagaaattttcttcttaatcaatttgatcaggctcttgttagatgcctcagcttgcccattagcttgtgcataatatggggaagaattcaacaatttgatacccatgctatcagcaaactgaacaaactcatcggacacgaaaattaagcctcgatcggttgtaatagtttgaggaatacaaaactggtagattatatgctcttgaacaaactgaattgcatccccagaatcaactttctttaaaggaatcgcctctacccacttggtgaaataatcggtcgccaccaatataaacttatgtcctttactcgatggtggacttatcatatcgatcatatcaattcctcaacctttgaatggccatggcttaataataggattcatagccgacgccggcactcgctgaattgctccaaacttctgacaatcttgacaccctttgtaatatctgaaacaatcttccagcattgtcagccaaaaataccctgcacgccgaagtaaccacttcatcttatgagccgattgatgagtaccacaaattccttcatgaacttcgccgattgcaactttagcctgatcggtactcaaacacttaagcaacaccccatcaatcgtccgatagtaaagctcatcatccaatagactgtacttcaacgccttatatctcaatttcctagaagccgattgagatggattatgtaaatattgatgcacatcatacctccaatcatcggctgttattgctgcaatttcaaccttagcatctttgatcatcggcttatacctcgatgccccctgggccaaatcattaggttcaatattttgttctcgagacacatgctttaaagtaaccagccgaaattccttcatcagttcttggcacttctcattataaaccattaatgtatcattcttgcattcatattctcctgccaattgactgattacaagcaaagaatcccccatgatttcaatagcatcggcttcaactaccttgagtaattacaaccctttgagcaccgcctcatactcagcttgattattagtcgcataaggtttaatagtataagcaaactcgaaacatgcccctcgaggggaaattataaccaagccaatgccacaaccattagtacataccgacctatcaaagaataaagtccatggcacaatctcgaccgagccgattgaatcatcaggatgttccacaataaaatcggctatagcttgtcccttaattgccttcggcgactcataccgaagatcaaactcagttaaagagaatatctactttccaacccttcctttcaaaattggagccgataacatctatttgacaacaccagccttgcatatgacagtacactcattggatagtagataatgcctcaatcttgtacatgaaaaatataggcacaagcataacttctcgacagggaaatatctagtttcagcatccaagagccgacgactaagatagaatacaactcattcctttcaatatagctcctgaatcaagactgagccgattgacttctcaccggcagatagatacaatctaaaaggtattcctttctatggaggaattaaaacgggaggagaactaagatattccttaatattatccaaagctttctgctgctctgccccccaagtaaactgctgatcggctttcaacctgaacaatggtgtgaaaggctctaacctaccggataaattagtaataaatcttctaacaaaatttatcttgccgatcatctcttgcagctctgtcttgttctctggaggctgaatcttcttgatcgcattaacactcctctgagtcacctcgatccccctctcgtgaacaagaaatcccaaaaactggccagccgatacgccaaaagcacattttgtcggattcatcttcaggccatattttctggttctctcgaaaaccttcctcaaatcggctatgtggtcctctatttctttagacttaataaccacatcatcaatgtaaacctcaaccaaccagccgattagatcatggtatatgtaattcatggctctttgatatgtagctccagcactcttcaagccgaaagtcatcacaacccatatgaacaagccgattgcaccaggacacctgaaagttgtcttatgaatatcttcttcagccataaagatttgatcataatactcccaagcgaagcaatctctgaattcttttaacagctctatcaacttggttctaaattctgcagataaatttttactaataaacgtcggccttggtcggtcacctagacctatatcaatttcttccaaatcatcagccgacataaaaccctacccttgtttgtcatcgagatcatctaccgtgtccttgttgtagacatgtgaatcctccacggcgccctcaaaataatagcttgggctctccatcttcaattggctgtatatcagaatcggacacttttagaaaatctccatcccaaacttttccagataaacaatcaagaccatccatctcccaaagagctaaatcggcacgtgtaacattgactgacctgtcggctggcacaatttcaatcttgtcgccttgccactgaatcaagcattgatgcatagttgaaggaatgcaacaattagcatgaatcccatcccttccaaacaacaagctataagaacccttcccatcaatgacaaaaaatgttgtggggatggttttgttgccgactgtcagttccacgttcaaaactccttcggtttctgatggattgccgccaaagtctttaagcaccatgtttgtcttgatgagatcttcagcgtttctgcccaactttctgaatgtagcgtaaggcatcaagttcattgtagccccaccgtcgaccatcatcttggacatcggcttcccattgacataaccatttatatacaatggctgaagatgtcaattctctgtcccctctggcttctcaaaaactacctgccctggcgacaaaatcaatttagccgattcttcttcaacttcatcgatatcggcttacttgatcccaaactcggcaggcaaagtgaaaaccatgttgaccgaagcagttacgacgctttccctttagctaacctttttgcttcatcagctgtggcttcatcggctacaggaacctgattcttaacacgccacacccgcctcggcttcgttttcttcagcaaatggttaatttcctgctcgacctcctgaaagcgctccctgttcctcaatctttgaacccttctcttttgattcttcgtaaagataccagaaggacaccattgatttttcttgttttcattgtcctcttagccacgatcttgattcactggacccaatctttgatgaacaggaactcttgtctgccttagccgattgcccctactatatgatcggcttgagctctcggcaatatcaccgcacctaggacagtcttcaatagattgcaacctcataccttcattccaacaacatctaaagaactcacaacccaatgaggatcaaagccatcgtcgtcttcttcatgatgcttctcctgctgcttgtcatacttcctctgatatttgttgataatcttagccgaattcacctgaaaaccccttgcacgaccccgatcggctgttcggccagctgtatgcaccatattaacaggaaaaggattgccatcaaccttcatcggcctcttagagtcatcaaacttgattttgcctccttcgatagccgcttggatctgctgcctgaagaccttgcaatcattagtcatatgagacccagaattatgccacttgcaataccttttcttacctaattcttcagccgatggaattgtgtgactggcaggaagttgaatctgcttctctcggagtagcaagtcgaaaattttgtcagccttagtgatatcaaagtcatacctctccttttttcctgagctctttacccattggcatggtataacctttttactccttacccactcagctgcagctatctcataatcatcatcctcatcgtccgatccatatatataagggcaaacatgattaacctttctagaatttttcctagcctctgcatacctttgttcatgcaaggctaccttctgtgtaaggtgtgacaagctttcaaagtcttcatatgagaacttctccttaattagagcaatcataccctaaaaagccaaatcggctaactgggcatcagtcaaactcaagctgtaacacttatttcccatctccctgaatctctgaatatactcatgcactggttcatcatgcttttgcttgatcgatgttagatcagacaatttcatctcatgaatcccactatagaaatagctatgaaactgcttttctaaattagcccaactattaattgatccatacggtaaagaagaaaaccaagtaaaggccgatccagccaaagacaaccggaataaccgaaccctcaaggcatctacagccgatgcttcaccgcattgagctaaaaatcggctaatgtgctcataagttgatgtactatcttgccctgagaactttgaaaaatctgaaactttaaatcggttaggcagaggaactctctcaaactattcaggatatggctgtcgatataggtttccagcgtctttcggcctaagcccgaactgctccttcatgacatctacaatcaaatcggcccatggccgctgttgaggtgttccttgaagttgttgtggcataggctcaaattgattgtattgaggaacaaattggggctgagccgatcctgcttgctggtactgaacatgaggtgatggtgggtgatattgataattcaagttgcccccctggtaattttgaaggtctggctgaatattgcacaccaaatgttcaggaataacttgaggaacaaccgtgccatctggctgcacatgatgaaccaagtgttctgggacaacctgatttgcggcatgctgcatgggttgaccaccaggtgttgcaaacccagccgatgcattcatcggaccttgctgctgaatcggctggacaacctgttgcctcaacagtgtctgctgaatcagctgcaagacctgtcgtcttggtggcgtctgctgaactggttgcacaacctgttggattggaggtgtttggctgaactagttgcacaacatgttggattggaggtgtttgctgaactggttgcacaacctgctgccttggtagtgtctgctgaatcggctgctgctgggctggatcaatggtgtgttgaggacgtaagaacatagatgcaacctggtcttgcgttagccgattcacattctgtccagtgtgctgtggctgttctctcaccaacaatcggggattaattaattggcctggggctgaaggtggtgcagtaggtgcgggagccgatgctggtatcgtcggctgagctgatggtgcattaagagggactgactggcgactggtagattatcggtgattaacggccgataattcgggaacacccctccttgtaggtaaactggtcctgtaacctgatactcggccattgaaccatcaatcattgacttcaccatatttctcagattgattgatcaaagcatggtgtacagtgtcacatcctgatttttgtttcaggatttataaattatttaataaattattattagaatttatattaaatgttctttaatttacaagtgaagttaaatgtggaaaataaaatttcctaaatataaagcatggatggatttaatttttattaaattctccatgattaagtatactctctgaaattttctcggatttttcggagctcaattcctaaatgatacaaagaacagttcagtaattatttgatcattaatgatctaattataattgttaagagcttttcttgtttaaaaatccttaaattataaattgttgtttaaaaggaattattagaaatgatcttaaaagcctaaaagagaagatctaattttaattaataaattccaatataaaatggggccagataaaatttcattaaatactttacttgattctatagttcctagatttttctaggatttatttgagccaaggaagtatttttaatcaatggaatatcatttcatgaataatttaaattgaaaaaggtttttaaaagtctcttttggctttgggccgaaagccggcccaaaaccgctctctctctcctccccg

SEQ ID NO: 19258 - DNA, 4465 bp, Oryza sativa
gcccctttataagcacccccgagctctcctctatccgccgccacctttgccttagcccgccgtcgcgtctagcaccgcctccgcgtagccctagccgtcgccgtcgttgccatcggttcagccgcgccgcgccgccgttgcagccgccgtcgtcggtcgccgtcgccaccatcgggatcgcgaggtcgtcgccatccccgtccaccgcttcgccgccgccgaagaccgccggagcgccgccgtcaccgtcgacccgaagaccgtcgccgcttcttcctcgtcgccggcgccgtctgttgctcttccgccgttgttttggtcaccggtgagttcgccgcgtcaccctctacccgttggtgtcctccgtttgcgtcgtcgcgccatcgttcgccggcgagcatgcgccgcccgagccgtcgccggtgatgacgtcatcgctgacgtcatcgttgccgtccgccatagaccggtcgtagaccgtttagatcttggccgttcgttgtggatagggtagatctcggccgttcgtttccgtgagccgccgccgtgcacccggtccaccgtgaacccgagcccgttgacgcaataatcctcttttccttttcaaaaataattcattattgcgtcataattcaattaaaatctatataaatgttttaatccgatttaatctttaaaaattcataactaattctttgtaactcagtttaatgtggttcaagttgcaaaggttgtgtaaaataaagatctacatattaaaattatccataaatagaattaaatttatttaattctttttaaatgggctttaattagatttaatcttgtaaaattcgtaataaattcatttgaagtcagaatgaggccgttcaagtctcataattcatctaaaatcatgatctacatgtttgtttactttatattactgtttatttggtttttattagtctttttcttcgttttgcgtgttagcttgtcgtttccgtcgttgcgaaggttcgcgagtgtgctggaggtattcaagaagattaattgaagaccgattattgcaaggcaagccacacagatcctaaacacaatcctttgagcatgttgatcctatatttaaattctctatttatttcaactgtgcatttattttcgaatgtcactgggtggtgtgaatctattcctttgttatggcctgtttgcattgattactttattccttgataccttgggttattataacttgactagttgagctttatatattggttcagctagatattagatatgattgcttagccatgcttagaaacattagcacactattgggataacttatgactcactattatttaatgatggcttaatgatagttcacgatggtcaatcgtgattggttaattaattacttgccaactaaaacttgataatggtgggttgtgagcacatggttttgagagtcgtgctcatggcaattaaggaccggttcgcgagctactgttgtgaaacattaaccgtgccaaccacaagccagcgtgggcaacggctttaccttttgtataatatgattcattgcggagcaccagactgagaagtggcggagataagcccacgggggtcgctggggaggccatgccttgttttataagggggtgattatgatccaggaatggtgcattgtggtgagttgtgttgtgcagagggtattgtcacagcctctattcgggcactttccagtatcgcgacgcatggtagacatgatgttgaggctgtgtcttgtgggtacagtggtacacctctggccagagtaaaactattcgaatagccgtgcccgcggttatgggcgggttgagcaatgtttttcgtgattagtctcacacctctcacaataattatggatactatatctggtaataatttgtttagctcctggtttggagttagatctgtacagccgggtatggttgttcaggatggttgggcctgtgcagcatgggtgtgctattcagtgttgattaaaatttctgattaattactccactgttttacttctcttaaatgttttgctaaatgctgcttttgcaaatgagcctatattatgccatcctttggtatccttgtgcacttgcatatttgctgtgtggcttgttgagtatgtcatatgctcattcttgcaataatcaatcaacctcagttgaagaaaaaggatccagaaggagaagacgtttggcttataccccagttgagctgcctgtgggattggagctgaagccatcgctagaccgttattccgctgctattttcttttcttttgtaagcgtgtaacattattattaagatggatttgtatattaaattgtcagtttgtgtacctcggctgattcctggacgaggattttatgcacaaataagtttggaaattactagtgaatttccgggcgtgacttacagcatagtcaacctgatcttgaatgttgttgaactgcaactgcgttgcattgtcgtcttgattaacacctccaccttgaactccctgtgaaccatcaccttgaaccccctaaaaccatcaccttgaaccccatgtaccccttgagagttgtcaccttgatttggtggaaaaccatctgtagcacctttgtcattcagttgagccgagccatcttgagtttgttttccttctccatccttagaggaaccagtctcgggatcgtcaagaaccacctttattttatacttctgaacaagtgtccccttgcgagtctgcatgaatgagttcaagaattgatcacgtgctgcctgcatcatcgcttcaaaatctttcttttgatcaggtgtgaatttttctggatcgatgggtacgacgttcccttcattgacgtcggtcaaacctaacttctggatcttctccttgacagtgcctgaactagccgaagatggtgatagcggtggtttctcggccatgagaaggaattgcttgtctgacttcttatcggtcccatcgggcatgccaaaagagtgttgacgtaaaacacgaggcctgggagatctgtttaactccagtgcaggtccaaaactcgccttcgggtatgctagcgtaccagtcgatttgatcggcagctggaaatagataataaaggactaaatctattcgatcggctgtagatattaacaatatataatttttacatcgatatatatttaaatcaagtgattgggatagatcggtcgctatgccgagacaatataaatcacttagatcgaaatatatattaataaccgaactatatatgtttacagcatagctgatcagatagatctagcatgtatcggctaatactctgatacagttctatgttaagatattaaaacaagcagaatataccaaaccaaagtttaatatacgtagatgcaataatatcttgacataaagggcagatttaacatgtcaacgaagcatatagagcaaatgtagttaaaccagataagatcggctgaaactccaatactaccctaatcggcaactagaaggcaggctagagactgatattctaagcacgacttaatagatcaaactcaagtgatgcagcattaagtatgaaaagaagaacaatatctagacaatcaagccgctggaagtttcatagagtggtggagatcttatataatctaaatcaacatcaaaatctaacctaatcggctgccctctactgacagatgttagtcgattgtaggttagataatgatattgccagagattatgtaagatatatgataactcgatgaattacataaacatgattagagtatcataaagatggaagcactaatcccgagaacgcaagccatcataacaagttttacctcttgttgaagatcgaaaccgatgcagctcaacccgaaagcaaggactcgtcgaaataaaacaaaagcaaaagggtggtgatgcaccgaaattgtattgaacgagtgtgttaactgattacatggggttcgtgtcacaccctgaagtttctttcccaagcctaaatgaaaattataaatcacctagagaaaataccggtgtcaaagcaagacaaaccctaataaattaatgcaaataataatcggaattggcatgtgggatttttcttgagttctatatgtcgaaatatgctaacaagatttttagtggaatttttagagctctagaaataattttaaccaattaaaaatgagcaccagcattatttaatccttggaaattcttttctttttttcttcttcctttgtcccctcctttttcccaaatgggccgccggcccatttcctccacctcccgcgccgttgctgggccgaccgaaggccacagcccatccgctcgcccgagcctcccctctccctcgggcgctgacaggtagggcccacctgttaggcccatccctaacctttggccgcccaccgtctgcagacgccgcctcgcaaccgtccgcgcccgcct

SEQ ID NO: 19259 - DNA, 541 bp, Oryza sativa
atggaaaatacccacaaggctagttaaactaaccttttgaataatgcatgtgtccaagcgatgatcagtatgctgtgtgcaaacaatgttggatgaaagcactttcatttctacagcgtggaggaaagactagtggaagttctttcagctttgggcaactgatgaatacatcacgaagaacaggaaaagcataatcgacagaagaccaatatactagttctggcaactgtgtcaattctagtgtttccagggagggaaaaccagcaatcccatagaaagatgtgtctatacattctaatgcatccattctatcaatatgaagtttcttgagagatggtatctggcctaaaggaggaaggaacttccaacatgtgcagttgtgaatgctgatgtgtcgcaatctagatagccactcggactccagccaagacggagatgaacaaccttggtatccatcaacagtcaattcctcagggccagggtgaggtattaaagaattaagcacattctgttcatctgacctgctatctgcattacaaga

SEQ ID NO: 19260 - DNA, 8805 bp, Oryza sativa
acactatggaatggttggattattgtggaatggaattcacacctccccctctattcaaaatcctcaaaatggttttaggttgggctcggggtgcatggttttgatagtagcacctcggccatataaggactggtcttcgggcctctgttgcaaagcactaccgtacttccacatgtctagtgggtaaggcttagtttgtggctcagtctggttataaacaaaagtacacggatggagatggacgaagtcgggggtcgatggacatctctaggacaaatgaaggctacacgagctgcggcccggtagtcgagatgtcatggcatagggccggtgtcctgctgataggggctcagtcctgcctacctgtcccaggggttccggccgtaggtggggttgggtcggtactcttgtctatggctaggatgggttggaaactatgtcacgtcttccgtccgtataccgtggtggtatgtggcacgtggttacacgtgaggaagatgtgtcttgtgggtaaagatgtacacctctgatcagagtataacctattcgaatagccgcgccctcggttataggcaagccgagcaatgtacccaagttagtgttttaattcttaaaacctgcttaacaactgaaatgtggaaatagttggcctgggttagcttgggacgagctgggaaccagggtcgagttgccagttcggtctgaatcatcgtaggccttgggttaaggcaggttcgtgtgggttcacggccttgattaataatcttgtatagctctaggatcgtatttacaaaatagctttgagcaactaagtgtcttttaatgctgtttactgcaaaccctaaccctttatattataacccccttgtactcccttgcatttattctgcacttatgggtgtgtcttgttgagtacgttggttgtactcagtcttgctcaatttttcccaaacccagaaaaggagcccctggatgatgaaggctttggtgtttagctcgtgcctgccatcaagcgcctgtggtcatcgccctagtcttccgctgtttcccgtttgtcttcttgtgtgctgggccttcgccgcccatgtaataaagtaactatttatgcttccgcttgataaactctgaattgtatcaactttcagtgtaccttgcctcctgggacaaggaataatacacgcacgtaaggaacgcccgttgggttatttccggtcgtgacaagttggtatcagagcccccttgaccctaggacgagccttagatcccaagccttagcaatattttcgaaataaaaatcctttcttatttgtgaaaatcctctagtctctctctgtcctgctgcttcatttatcgccaaaatctaatctttaaaatgttgcttttctcttttgtctttttgtttgtagatggccggcagcatcaaccgtcgtggtctggacctgactagcttcgttttggagctgcggggcatgtgcgttgtcctggggtatccgcatggagtggattaccagggcaagcagctcccggagcaggagggtgacgatgtagagccccatgctgcttgggaggtcactgcagtgatcctcactggctcacctgagaggacttcgttggcagtcaccgcgggaggagattctttctctgccgcttgccagaacgccgcactcctcgccatcggcactcttcaccagcgctacccggacgagttgcagcactcgccctaccgctaccaccctcgtcgcggaggagcccgcgactacgccaccttcagggatgctagctcggaggatgacgctaccatcatgcacctggcacgcatggtggaggcgtacgacgcggctcgtatcgacttccatcagatggtgcgccgcgggttggtcgagaacaacatgaagatcctggagctgcgacaggagaatctgcagctgaagaaggacctagacgcagtggaggcgcagctgtgtcagctcaagatcgcccagggagaggtctgtcgccccaagcgccgccgcgtctgccgcagcctgaagatcaccgcccgcaagagtacctccaggcctgagcttgttcgtcagtccctagcgtggacctgctttgtcgagacccctcgtgccgagcccgcgcccttggttcctcaggaggagggagcctctggcgtgggtagcacgaaagatgcgctactgctcaccttccgccctggcccgtcgcagaagtagacgagcagttagtaggcttgcacgtgtgttcttctcgttggtctttctgcttgagtcgtgtggggcatggttataccggtgtggggtataactgtatcggagcctgtctttattttatttgcttaagcaacttgaaccttaatgaaccaatttaatagcagtaataaattcaagaattatggtagtcgtggctagttagttttaatagtcagctctctctgtttgccggttctgtgtgggattttgagattgtgacaaccaggagaagtgctgctaccggtgaaggcagtcaccccgaaggcagcaaccacaacaaccatggcagcccacctccacctcctcccctgcctccaccaccaccaccagacaccaactccatcctcacccaaatcctcgcccagctggccaacatgacgactgctttcctccaccacatccaaaatccgccacagcatcatgctccacctccaccaccacccccacaacactctaaactcgctgagttcctccgcatccgtccgcctaccttctctaactccaataaccccgtggatgctttggattggttgcatgccatggggaaaaagttagacaccgtgcagtgcaacgatgaggagaaagtcatctttgccgctcaccaactgcaggggcccgcatctctatggtgggaccactaccaggctacgcagccagaaggacagcctattacttgggcccgtttcaccgccgctttccggaggacccatgtgcccgccggagtcatggcccttaagaaaagggaattccgagagttgaagcaaggcaaccgctctgtgatggagtatttgcatgagtttaacaacctggccaggtacgccccggaggatgttcgtgaagatgaggagaagcaagagaagttcttggcaggaatggaccctgagctgtccgtgcgtctggtctccggggactatctggatttccagcgtttggtggacaagagcatccgcttggaagccaagcacaaggaactggagtcgcacaagcgtcgcctgacgaatttccgcaaccaacagggggctaaccaaaggatccgctacaccaatccctatccagggggatcctcctcgcagcagcagcaacagcagcagcaacctcgctccgtgccccaacctcaattcgtggtgcgcgtcccacagccgcagcagcagcagagtgtcacatcctgatttttgtttcaggatttataaattatttaataaattaataatagaatttatattaaatgatctttaatttacaagtgaagttaaatgtgggaaataaaattttctaaatataaagcgtcgatggatttaatttttaaattctccatgattaagtcaactctctgaaattttctcggatttttcagagctcaattcctaaatgatacaaagaacagttcagtaattatttgatcattaatgatctaattatatttgttaagagcttttcttgtttaaaaatccttaaattataaattgttgtttaaaaggaattattagaaatgatcttaaaagcctaaaagagaagatctaattttaatttgctaaatctcaatataaaattgggctagataaaattttgttaaataatttgcttaattctataattcctagatttttctgggatttatttgagctaaggaagtatttttaataaatggaattgcatttcatgaataatttaaattgaaaaaggtttttaaaagtctgttttggctttgggccgaaagccggcccaaaaccctctctctctctttccctcggcccagtccgccgcgccccttcctcctctctctctcagccgctgacagatgggccccatctgtcggagccgtcttcctcctcgcgccgccgccgccgcccgaaccctagccgagccgtgcgccgccgctttccaattcggccgcgtctttccttctccggccgaatcttttgaggggaaatgatcttcgagatctcctcttccttttctcttatagaaactccggtcaatttcgtttggaaatcgacggattcgaggtcgattcggatcgacttttctccctccaaccccgacctttccttctcgccgccggtcgccgtgggccttcgccgccgcctccttgcccctttataaggatccccgagctctcctctacccgccacctccctcgccttcgtctctcgccgtcggaagcgccctagcgtcgtgtgacctagcgccgccgtcgtcgccgctccagctgtgcgccgccgccgttccggtcgtcgtcgtcgctcgggaagatcgccattgtgatcgccaagtcgccgccgtcctcgtccaccgcttcgccaccgccggagaccgccggagcaccgtcgccgccgtcgacccgatctccgccgccgcttcttcctcgtcgccggcgccgtccgttgcttttctgccgccgttttggtcaccggtaagttcgccgcaccgcgctctacgtcctggtgccctccgttctcgtcgtcgcgccgtcgttcgccggcgagcttgcgctcccgagctgccgccggtgctgacgtcatcgctgccgtcatcgctgacgtcatcgttgccgttccccgtgagccggtcgtggaccgtttgatctcggccgtccgttttggatagggttgatctcggccgtccgttcccgtgaaccgctgccgtgcgcccagtccaccgcaaaccctagccgctgacgcaataaatccctttttccttttcaaaaataattcattattgcgtcataattcaattaaaatccatataagtgttttaatccgatttaatctttaaaaattcataactaattcatttgaactcagtttaatgtggttcaagttgcaaaaattttataaaataaagatctacatattaaaattgtccataaattgaattaaatttatttaattctttttaaatgggctttaattagatttatcttgtaaaattcataataaattcatatgaagtcagaatgaggccgttcaagtctcataattcatctaaaattataatctacatgtttgtttactttttatgtattgtttatttggtgtttattagtctttttcttggttttgcgtgttagcttgtcgtttccatcgttgcgaaggttcgcgagtgcaccggaagtgttcaagaagattaattgaagaccgattattgcaaggcaagtcacacagatcccaaacacaattcctttgagcatgttgatcctatattcaaattctctatttatttcaactgtgcatttatttttgaatgtcactgggtggtgtgaacctattctttgttatggcccttttgtacttgattactttattccttgataccttgggtgattataacttgactagttgggctatatatatattggttcaactagatattagatataattgcttagccatgcttagaaacattagcacactattgggataacttattattcactattatttaatggtggcttaatgatagttcacgatggtcaatcgtgattggttaattaattacttgccaactaaaacttgataatggtgggttgtgagcacatggttttgagagtcgtgctcatgacaattaaggaccggttcgcgagctactgttgtgaaacattaaccgtgccaaccacaagccagcatgggcaacggctttacctttcgtatagcatggttcattgcagagcaccagactgagaagtggcggagataagcccacgggggtcgctggggagtccatgcctctggtttttgaggggggtgattatgatccaggaatggtgcactgtggtggattgtgttgtgcgaggggtaatgtcacagctcctttccgaggtaccgtggtggtactgaggcacatggtgacatgatgtggggctgtgtcttctgggtacagtggtacacctctggccagagtaaaactattcgaatagccgtgcccgcggttatgggcgggttgagcaatgtttttcgtgattagtctcacacctctcacaataattatggatgctataactggtaataatttgtttagctcctggtttggagttagatctgtacagccgggtatggttgttcagaatggttgggcctgtgcagcatgggtgtgctgttcagtgttgataaaatttctgattaattactccactgttttacttctcttaaatgttttgctaaatgctgcttttgcaaatgagcctatattatgccatcctttggtatcctcgtgcacttgcatatttgctgtgtggcttgctgagtatgtcatatgctcattcttgcaataatcaatcaacctcagttgaagaaaaagaatccagaaggagaagacgtttggcttataccccagttgagctgcctgtgggagtggagccagagcttcgctagattttattttccgctgcagttttcttcatggtgaggactaagtgcctcttaagtaagtatttatcgttttagttaatttgatgaatctgtatattaaattgtcaatttgtgtacctcggctgattcctggacgatgttttcatgcacaaataagttcggaaattactagtgaatttccgggcgtgacacagagtcagcaagggacccgtgcgccccatcctcctacgccagccgtgcagcctggacaaggccgcagagacgttcaatgtcagcagcgtctgtgcttcaactgcttcgagcccgggcacttgcggataaatgcccaaagccgaggcgccagcaaggccaagcgcctccccgccccaacaacggtggtaaggatgtcattcggggtcgtgtgaaccacgtgaccgccgaggatgtgctgacaactccagacgtcatcgtgggtacgttcctcattcattctatccctgctaccattttgttggactctggagcttcccactcgtttatatctgtgccattcatggggagaaatcaattgggggtagaaaggcttagaaaccctctgctcatcaccacccctggaggggttatgacagcaaagtattatagccctgccgttcctatagaaatccagggaattccttttccctcagatctgattcttctagacaccaagaacttggatgtgatccttgggatgaattggttggctcaattccaaggagtagtggattgcgcaagacgcactgtcactctgtaccgagggccggaacaaccggttgttttctttgcacccccaacctctgtcggcagttccgaacttcatcagataggactgtcggaaaccctcatcgtcagtgagttcggagatgtgtttccggaagaactacctggtatgccgcccaagcgagagattgagttccggatagatcttgctcgaggaaccactcctctgtacaagcgaccctaccgcatggcagcaaatgaactagtcgaagtcaagaaacagttggaagagttgaaagaaaaggggtatatacggccgagcacttccccctagggtgctcccgtgttttttgtggaaaagaaggacaagacaaagaggatgtgtgttgactacagagctctcaatgaagttactatcaaaaataagtaccctcttccccggatcgatgatctgttcgatcagcttaaaggtgccactgtcttttcaaaaatcgatcttcgctccggatatcaccagttgcgtattcgtgaagaagatatcccgaagaccgcgttcaccacgcgatacgggctgtatgaattcacggtgatgtcgttcggtctgactaatgctcctgccttcttcatgaacttaatgaacaaagtgttcatggaatacttggataagtttgttgtggtcttcatcgacgacatcctggtgtactcacaatcagaggaagaccatcagcagcatctccgtctggtgttgggaaagttgcggaaacatcaactgtatgccaagcttagcaagtgtgagttctagttgtccgaagtcaagttcttagggcacgtgatctctgctaaaggagttgccgtggatcctgaaacagtgaccgccgtcactgattggaagcaacccaagacagtcactcaggttcgcagctttttgggtttggccgggtactaccgaagattcatcgagaatttctccaaaattgccagacccatgacgcagttgctgaagaaggaagaaaaaattgtgtggagcccgcaatgcgagaaggcgttccaaactctcaaagagaagctggtttcctcgctagtgttaatcttaccggatactcgcaaggacttcctggtgtactgtgacgcttcgcgccaaggattggggtgcgtgctcatgcaggaaggtcatgtggtagcctatgcctcccggcagcttcggcctcatgaaggcaactaccctaccaatgatttggtgttggccgctgtggttcatgctctaaaaatctggcggcattatctcattgggaatcgctgcgaaatatataccgatcataagagtttgaaatacatctttatccaatcggatctgaatcttcggcagagaatatggttagagctcatcaaggattatgatgtgggaatccactatcaccctggtaaggccaacgtggtcgccgacgctc

SEQ ID NO: 19261 - DNA, 3814 bp, Oryza sativa
caataccctactcctgtttggctattgtatccaccggatgtatattaatctgatgacctaattatgttatgtccttggagggcttcgtgctctccttatataggttgggggcaaagttacaaagggaaacccaatcggacataacatggatttccttatatagttacatacactactacacaaatgattttcctataagagcaccctaatatattgtaaacgggtcataagtgtccacgtctggaaaaatcgacctttatttttatttttacacacaactcgttaagtggcctacatggaaaagactattttcacatacaaacatcttaaggagccgtatgcaaaaatggggatattttttagacgggcctatcaaagaaccacatgtgaaaatcattttcgcatgcgggcaactcggagataagtgggccacacgtgtccccgcatccctttttctcctcctcgtctctaccacacatttcactcctttttattttctctcttcccgttcaactctcactccacatctcctctcacccttcctttcccactccacctcatatcttttcctttcctctcctcgttctcttctccaccaccggtggctaaggcggagatgacggcctcgcaggcgggctctggcggcatgcagagacgaaggtctctttggcaggcggcggaggcagcctcaggggcgggtggtgacagcacgcggattcggccggtcccatccacgagagcgacaacggtgcgcggatctgtcgacagcgattgtgggacgggtggctccgtcgccggcaaccgcagggagggccgatctgtcgccggagaccgcaggacagacggattcatcgtcggcgaccgcggggagggcggatcagccgctgacaaaatcggggaaccccctccccctcccgcacatggatccgccgacgacgggaggggtgatgacggcagtagtggcggtgggaggggcgacgacatggtggttgtggcgacggtttctaggttactgttctgtggctagggttttgatttctggaattttttttttgcgattttctattagcacgtgcagacggcttaagcgctcgcagtcgaataagccgtctgtgtggatatatgaaacccgtaatctccacatgtagtttctacaatgcgaacgtagcaatgtctggactgggcgatctccgtgggagatcatccggactggtataccaaaacctttaagtttaatggatcaatgaattaatggagatgagggattgcttgtgagacggaaaggctgaacgaaatgacaggcagctcacatggcagaccatctgggctggtaaaccaaaaccttaggtttaattgataggatagggtcaattaaaccctagattgttcagtcccgcacattgtacttccatgcagatacctgcaatgttggttaatctagcagttatttctatcctgaagtacttactacagaatttaacaaatatagtaactaatatcttggaaacaaaacaaccctcaggaccttcttggaacacaagttttggaacgaaaatcagtgtaaattacagggctgaaaagttataagttgggctgaaaaactttgttgttcaggtggggttgcttgtcgcattataatctccgattgagcccaatccacccataaaagaaatatctcctcctggtaattaacacaaagaaagaacggggtaggagtactaatctgatctggttgcaggcgagcctgcggcctcatggtgaaccagcagctgcatcagcaagaaacggagtgtacacgacgtcactcgagaggacatggcggaccatcgcctatggcgacacgggctccttgttgtcgccatgtgtattccagaggacactcaacgtggcaggttacttgaagctccctcttgcaggattcaccaggcaatggcaagattctgaattcctgatgccacccattccaaagcaggaatagtttatgctgtcctatggggatgatcagcaaaagattgcgattaaaaaaaatagcgtctcaagacttttgtgttctccaacccctgtgtctttttttttgtgccaatttaagggaagtgaataatgatcgggaggggttcatatatatagctgagacagtgagacaagagataattgatcagcatgacagggatgagagagtaatgacccacctacaacattgcaggatcgatgaagtggatgaattttttagataatggaaatggattatatctccggcttctgtcataagacacacagccataagtttaatagtaataaaaaggtaagataaaagtaaatcaaaatgagaaataaggtgatgggacaaatccccaactcccctttattattgactagcgttcaaccatatagaatattttagctagcaatttttatggaacaacgccacccatagtggaataagagacccttggctaccgattccaagagtgtagcaccattgcgcatagtatcctgctcctcctgtggtagcattgtagaccaaaagtggagccagtaggaagacatgaagataacctacatagggttagataattgtttaccattaaaaactttatcattgtgacaacgccaaattgaccaacatacagcactagctctaattagaatcatcttcttaatggacctagatacccctctaagctaattaccgaaaatgtttttggacctacatacagcactagctccgattagaatcaacttcttaatggacttagatacccctctaagctaattaccgaaaatgtttttggcgttacggggtgcggggatattaaaagcaaaaaacacgcatctctaaacaaactaagcaacacgatactcaaagaaaaaatattggattgtctcttgtacatagcagaaagaataatgtttgtctccccccattttcttttaggagtaaattgcactggcggtccttaaacttgtgaggaggtttcatccaggtccatgaacttacaaacacggggtcaaggtcactaatcttgttttattgtatcaatccggtctagagaacgctttgacccgtttcgtgcatacgtggacagcaacgtgttgcgacacgtgtgatgccacaccgcaccgccccgcaccgtgcactttttaaatctaagcccctcagttccctcgaattctccaaaccttagccctctcttctctactctcttctcccctggacagcgaagcagaggcgatcgccggagaaattgcgggctgtgatcactggtgagatagggattgagaggttgcggggagggtgcagagacactggcctcccggaggtgttgaagccggcgaggaggcatgttgttccggctaacaggagagccgccgccggtgtacggtatgtacaatggacccaaaatttgagcttttttttggttgattgcagatgggtggtagttatgctagctgtggtctatttatttgatgatttcgagtgtggaagctgtggtcgaattttgttgattatttagggttttggtgacagccatcatagcagtaatctttgctaattaggaagacaaattttgtaatgcagctaaggattcgggtacattcactgctgagatacaccatgggggtttctttgttggctatggtagcaacagggcatacatagatgagaacatggattggtttgataatgttgaggcaaaaacttggtgtgctgttagtttagatggtttcttagaaatgcttgggtatgataagagtctaggcttcaaggcatattggttgctaccaggcaaaactcttgaagatggtcttaggg

SEQ ID NO: 19262 - DNA, 5045 bp, Oryza sativa
ttacctggcgatcgagcctgcggcttcatggtgaacgggacaaacgaagccatcgcccgcactagcaacacgcgaagtgaggcaccccacagcttacacttgaggcaggatcagcaggtgcaccagcatgaaataaaccgagtgtccacgacctaactggggaggacattccccgcaaaaaaaaaaaaaaaaaaaaaaaaactggagaggacattgcggcccatcggtatggcggcacggctccttattctccccatgtgtattccacacgacattcaacatggcaggttacttgcagctcctttttgcaggatttaccatgtaaatgcaggatcgtacaacaaaaactaagccaattagaggggtcaaatggttggagtaaccaaaaatcaaaatttttaacggaattaaaagttagcctccatttctctttatagctgaggtaggttgcctaaaaccatgaaccaaactcatacaagaagtcctaatcctctaggaaaccatgctggacgagaaacaaactttataaactccaattcacaactacagaaatgtagattggtactggttgggaactacacaaaggtgctggatttcccaaccgacaccacgaaaacggcactgatgagaagactccaagatgccggtttaggaaccaacacctttgatgtatacgatttgtaaagaaaagagtaaatttcactttgggcctgatttattggccaaagtttcaccataccaggtataactctaccttttcagttaacaccaggtatgattaccttcttttgcagtttggactgggtttcaatacttttgggccaccatgttggcttgagcctggtgaactcagttcagcgcagagagttatcaagggagactagcgcacgggaaaggaggaagatagtgtcgtggaggtgggggtggaggtggacttgctcaacgcctcgatctccaccctcgccaccggcggctcccggccaagtctccggagcagcacggcgtggcggcggcgtgaccttctccggctccgaattggcatggcggcgtgctcttcagcttcgtgtggtgttggtggaatgaatctgtgttgtttctaaatgtgtatgcaagtaagatagagctgtcaattttgccactaaaaacatggaaagaggttccaagttccatatgtacatgtacctgatcatgaggtacttgtgataatttccctttccagtgccttctctttagtggtacttatttacaatacaattagctaataattcctactctaacttggtgaggcttttggaatcctcccattctgccgtgagctgaaggagcagtgcgtgcaccccgttgccggcaccgcggtcgagcagaagaagagcatgccgccgtcctgccgcgccggagccgaagaagagcatgcacggccgctgcgccatgcctcgccagaaccggagatgtgcacacggccaccgcatcgtgccgctccgcaggcgtagaagccaccggtggcgagggtggagaccgaggcgttgagcatgtccgcctccgcctccacgacactatcttccttctctcccatacactagttttcctcgataatttctcttccccgaactgagttcactaggctcagatcaagccagcgtggtggcccaaagtcttaaaacccggtccaaactgcaaaagaaggtaatcatacctagtgttaactgaaaaggtcgagttaggcctggtttcatggtgaaactttggttaataaatcacgcccaaagtgaaatttactcaaaaagaaaaaaccaggagccgagccgatgcttgaaagccaccaaacataaattaaaaatctaaaaaaaggaacaagtacacatcacacaatcaacaagttcatagatcacaataaacaagttcatcaatacatcaagaacacggtctaaaaaaacaacatcaagaacacagatcaagaagtactctacccctgccgccgtcgccagatagaaaggaggatagggggaggggcgagcctccttctccccttccactacagccgccgctgcctctgctttggcgaaggtgtgggtgctaccattgccgtcgtggaaggccgctttttcccctcccaccggatctggcgaaggggagggtgccacccctgccgcatctcctccatccatcagagaatgcagatgcctctcctcccgccgtatctggcgaagggaagggcgctgccccttctgccgtcggaggcagtcgacgcctctcctcccactagatctagcgaaggggcggcggggtgtgaccgctaccgctaccgcctccgccgggccactccggccgccgcgagagatgagagagagaagagagagagagagagagagagacgcgtgagatagataagatcaaggggattggagagaaagagataatgccgagggctgggctcgctggcttggctcggtttgttataaaacaaaggcacttatagtataagtataggttttttctatttttagtcagtggaggtgggaaaaacactatatgtgctggttttagctattctagcccctatagtgccgacttgtatgtgccttttttagtagtgattgtaccaaatttggactccttccaaattcaactccacatcccatacgcacaccatatctccgtcgtatgtcatatggaatctataccaaccacgtgcattgatgtttagcttaaacatcccacatgatatcctaattatccggacatcatcttctcccaggttgactcccgatccatcactgacaacgctctcccgaggcatcaagacttacctacacatgaacctacaaagaagccatgcatattggagcataaaatctcttcaactagactcaacattagcacaacaatattacatacgcttgttaacgaccaaatttggtaatattagcatcggagatgaagattagatcgaagcggaatcgaatataaggattgtcgcggaaacagagtaagaatcggctggagtccggatcggctacaactaggatcggctaagtccgagtcagactgggttaagtgatacagccgattctgacaatacgacttgtgtacgacatcgggtttgagttgataagcttcaatatgattgccgcgcatggatagagttctgagaaggcaattgtatctattaattaggatattttatgtaaattctttagagataaatgtgggtaaaagtctgtcgtaaagacttatggtatcttagagattgttagagataatagtcgtgtccgatttggacatatcttgtaattcttgggtataaatagaccccgagccctatgtaattattaacacacactatcaatacaatctcggcgcatcgccacccttttacttttgttttgtttcgatgagttcttgcttttgggttgagctgcatcggtttcgatcttcaacaagaggtaagacttgttatggcggcttgcgttctcgggattagtgcttgcatctttattatactctaatcttgtttatgtaattcatcgagttatcatatatcttatataatctttgataatatcgtcatctaacctacaatcggctaacatctgttaacacaaggcggccgattaggttaaatagcgacgttggcttagattatatcgatctaagtgatttatactgtctcggcatggcgaccgatctatcccaatcacttgatttaagtatatatcgacataaggattatatattgttaatatctacagccgattgagtagatttagttcctttttattcatttatggctatcgatcgatgtacatatgacatcggcccaaaggtaaatgatatgtcatcggcacttagccgatcgactatcatttatggatttaaccacggtttctttgtctttatttcttgttgattgtaggatcaaatcaactggcatgctcatacatccgaaggcgagttttggacctgcactggagttaagcagatctcccaggcctcgtgttttctgtcaatacgcttttggcatgcctgataggactgattagaagtcagagtcacaacagcagttttcctcatggccgagaaaccgccaccgtcaccgtcctcggctagagaacctgattctgtcaaagctaagatccttaagttgggtctgtctgaggttgatgagagcaacattatgcccatcactctggataaattgacacctgaacagcataaggatcttgaagcaatgatgcagcaagcaaagaaccaatttttgagttcatttacacagacccgcaagggaacgttggttcagaagtataaattaatggtggttgcggatgttcctgggacaggttcttccaaagatggtgaactaaaacaggctccagatggtatggctcagccaggtgatcaaggtgttgcaaatggttctcaaggaaatcaaggcgatggttttcaagaagttcaaggtcttggttctcaaggtgataattcccaaggattacaaggtggaaatcttagtcagaatggcaatgcagcacatgagcttttcaataacttccaagatcgggttgactatgccgtgcacaatgctttgatcaatcagtctggggtgttagtcaataccttgtcaaacatgatgaaatcaatggttgatggttcaatggctgaatatcaggctacaggcccagtttatttgcaaggaggtgtctttccagattatcggcctctgatcaccaatactcagccatctgttcaaacagttcctcccaatgcgccatcagctcagccgacggcaccggtatcggctcccgcacttgctgcgtctacgtcggcaccaggccaactagttagtcctcggttgttgatgagagaacaaccacagcatagggggcaggatgtgaatcggctacgcaagatcaggttgcggccatgttcttaccacctcaacctattgttgttctagtccagcagcagccgattcagcaaacaccgccaaggcagcagtttgtgcaaccagcttagcaaacacccccaatccaacaggttgtgcaaccaat

SEQ ID NO: 19263 - DNA, 2475 bp, Oryza sativa
cccaagcaacaacagtcgcaaggagcaactcagcaacgaccgtgggctgatgtgattaccgatgtgatgagggaacagttcgggcttaagccgaaagatgctggaaacttgtatcggcaaccttaccctgagtggtttgagagagttcctcttcctaataggttcaaagttctagatttttcaaaattctcagggcaagatggtgtgtcaacttatgagcacattagccgatttttagctcaatgtggtgaagcatcggctgtggatgccttgagagttaggttgttccggttgtccttgtctggatcggcttttacttggttttcttctgtgccatatggatcaatcaacacttgggccgatttggagaagcaatttcacagctatttctacagtggggttcatgagatgaaattgtccgatttaacagcaatcaagcaaaggcatgatgaacctatgcatgagtatatccaaaggttcagagagatgaggaataagtgctatagtttgaatttgactgatgcccagttagccgttttggcttttcagggtatgattgctccgatcagggaaatattctcatctgaggactttgatagcttgtcacatcttatacaaaaggtaaccctgcacgagcagaggtctgcagaagccaggaagaaccctaaaagggttaatcatgtttgtccttacatatatggatcggataatgatgatgatgactgtgaaatagctgcagctgaatgggtaagaagtaaaaaggttataccatgctagggggtaaagaattctagaaaagaggagaggtatgactttgatataaccaaggctaacaagatttttgatctgttgctctgagagaagcagattcaactccccgctggtcatacgattccatcggccgaggaattaggcaaaagaaggtattgcaagtggcataactctgggtctcattctactaatgattacaagtcttcaggcaacaaattctagtagccattgaaggaggcaagatcaaatttgatgattccaagaggccgatgaaggttgatggtaatccttttcctgtaaacatggtgcacacagctggccgaacagctaatggaggacgtacaagaggttttcaggtgaattcggctaagattataaacaagtatcaaaggaagtacgacaagcaacaggagaggcgttatgaagaagataatggtggttttgatcctcattggggttgtgagttatttaggttctgctataatgagggtatgaggctgccatctatcgaggattgtcctgggtgcagtaatgttgcagggagatcaagccgatcgtatgatggaggcaatcggctgaagcaaacaagagttcctattcatcaaaggttgggcccggtgaaccaagactatagccaaaaggatgatggagacaggaagattcagtggtgtccttctggtatttttacaaaaaatcaaaagagaagggttcaaaggttgaggaatagagaatgcttttaggaggttgagcaggaaatcagtcatcggctgaagacaaagccgaggcaggagtggcgcgttaagaatcaagctcctgaagccgatgacgccacagccgacggggcgaagaattggcaaaagggaatagtgttgtaacggcatcagttaacatggtttttaccttgccagccgaattcgagatcaaacaaaccgatgttgacaaagtagaagaagaatcggctaagttggttctatcaccagaacaagcaatctttgagaagcctgaggggacagaaaatcggcatgctaaaccattgtatataaatggctatgtcaatgggaagccgatgtctaagatgatgatcgatggtggggctgcagtaaatttgatgccttaagctacgttctagaagttgggcagaaacgctgaagatctcatcaagacaaacatggtgctcaaagactttggtggcaatccatcggaaaccaagggtgttctaaatgttgagctgacagtcggcagcacaaccatccctactaccttttttgtcatcgatcggaagggttcttacaacttgttgcttggtagggattggattcatgccaattgttgtactccttcaaccatgcatcaatgcttgattcaatggtaaggcaacaagatttagatcgtgccaaccgacaggtcagtcaatgttgccagtgccaatttagctctttgggagatggatggtcttgattgcttatctggaaaagtttgggatggagattttctaaaatagtccgattctgatatacagccaattgaagatggagaacccaattgaagatggagaacccaggctattattttgaaggcgttgtggagggttcaaacgtctacaccaaggatacagtagatgatctcgatgacaaacaaggtcaaggtttaatgtcggccgatgatttcgaagaaatagatataggtccaagcgatcggccaagg

SEQ ID NO: 19264 - DNA, 1482 bp, Oryza sativa
cgaacctgtgaaggcggagattaagcgtttatatgatgctggttttattcgtccttgccgatatgctgagtgggtttctagcatagttcatgttatcaagaagaacggcaatgtgagggtgtgcattgattttagagatttgaataaagctaccccaaaggacgagtatccaatgccagtagccgatcagttggttgatgctgcttcaggacataagatattgagttttatggatggaaatgtgggatataatcagatctttatggctaaggaagatatttataagacggcttttagatgtcctggtgcaatcggcttatttgaatgggtagtaatgacttttggattaaaaagtgctggagccacatatcaaagggccatgaactatatttatcatgatctgatcggctggttggtcgaagtctatattgatgatgtggttattaagtctaaggaaatagcgaaccacatagccaatttgagaaaagtttttgagagaactaggaaaaatatggctggaagatgaatccgataaagtgtgctcttggcgtatcggctggccagttcttgggatttcttgttcatgagaggggaattgaaataactcaaagaagtgtcaatgcgatcaagaagattaagcctacagagaacaagacaaaattgcaggagatgatcggcaagattaattttgttagaaggtttatttctaatttgtccggaaggttagagccttttacaccgttgttgagattgaaggccgatcaacagtttacttgggggacagagcagcagaaagctttagataatattaaggaatatctaatgatttagcccaaggggcatcgggatataagccgatgatcaaagatgttaagattgaagttgctgccataacagccgatgattggagatatgatgtccatcagtatttacagaatctgtctcaatcggcttcttggaagttaagatataaagcgttgaagtatactttgttagataatgagctttattatcggacgattgatggggtgttgctcaaatgttttagtgccgatcaggctaaacttgcaatcggtgaagttcatgaagggatatgtgccactcatcaatcggctcataaaatgaagtggttgcttcgacgtgctggatatttttggccgacgatgctggaggattgtttcagatattacaagggatgtcaagattgtcagaaatttggggcgatctagagagcaccggcgtcggctatgaatcctattattaaaccatggccatttcgaggttggggaattgatatgatcggcatgattaatccaccgtcaagtaaagggcataagtttatattggtggcgaccgattattttaccaagtggatagaggcgattcctttgaagaaggttgattctggggatgctatacaatttgttcaagaacatataatctatcgatttggtattcctcaaaccattacaaccgatcaag

SEQ ID NO: 19265 - DNA, 2742 bp, Oryza sativa
attcctgcagcccgtcagtggctgagaaggcaaaagggaaggtgtttgaggtagtacgagagagtgatagtgatgatagggccagtgattctgattatgttgatagtgactatgatttgtctgattctgatgatgacttgtatgtggacaatattgatgtggaggtagaagacttaagctggaaagaagaaaacgaatagtaagaaagctagaggcagtgaactgaagggcaaagaaatagtagtttgtacaaattcagagggagatgatgaggactatgacactgatgaaggcttggaggcagctgattctgatggggataaaagtggagttaagtttaagtttaggtcatttagtaaggaggatgtcaataatccagtgtttaaggtgggcatggttttttcttgtgtagagttgcttacgaaggcaatcactgaatacagtatgaagaatagagtttatataaagcttcctaggaatgatcagcaaagacttagggctcactgtgcagagggttgcccttggaatttatatgcttcaaaggacagcagagctaatgctttcatggtgaagacctacaatggagagcacaaatgctagaaggaatggatcttgaaaaggtgcactgccaaatggttggctggagagtacattgatgcatttagagcaaatgagaagatgacacttggtggttttgccaagacagtgcagctggaatggaatctgacaccatctaggagcaaacttcagagagctaggaggttggctttcaaggccatatatggtgatgagatcaagcagtacaaccagctttaggattatggtgttgagctaaggaggtctaatccaggcagttgtttattcctgaacattagtgatggctgctttagcacattgtatatgtcacttgacgcatgcaaaagagggttcttaaagtgctgcagacctcttatttgtttggatgggtgccacataaagacaaaatttggtggttagattttgacagctgttggaattgatccaaatgattgcgtatatcctataccattagctgttgttgagactgaatctctaagctcttggaggtggtttctacagaccctgaaggaagatctaggcattgataatacttatccttggacaataatgatagacaagcagaaggtagttctctaagctcttgatttatttcttctaaatgtcaccaaactgttttgtgttaattgttgttcttggtttgtgcttgattgcagggtttgattccagctgtgcagcaaatttttctagactcagaacacaggttttgtgttagacacctctactccaactttcaagttcacttcaaaggtgaaaatctgaaaaaccagctctgggcatgtgctaggtctagttcagttatagagtgggtggcaaatatggaggaaatggctactctcaatcaggatgcacatgattggttgaaaaaaatggaacctagtacatgggttagagcatattttagtgacttcccaaagtgtgatatactcttgaacaatagttgtgaggtttttaacaaatacatcttggaggctagggaattaccaatgttaagtatgttggaaaagattaagcaacagttaatgactaggcactttaacaagcagaaggaggctgcagaacagtggaaaggtcctatatgccctaagattaggaaaaaagtgctaaagaatacagacctagctaacacatgctatgctcttccagctggcaaaggaatctttgaggtccaggatagaaactttaagtacattgttgatatcaatgcaaaacattgtgattgtaggaggtgggatctcacagggataccttgcagccatgcaatttctagcctcaggtaccagagaatcaatgctgagtcagtattgccagtttgttatagtgtacaagcattttcaaatgcatatgagttcaatatttggccctgtcaagacacagctaaatgggaaaagacaaatgggccacatgtgaagcctgctgtctatgaaaagaaagttggcaagccaacaaagtccaggaggaaagcaccacatgaggtccagggaaggcatgggccaaaaattagcaagcatggtgtggagatgcattgcaagtactgcaatgaggcaggccacaaccaaaggggttgcaagttgaaaaaagctggactcaggcccaatcagcaaccaaagaagtctattcaaaaccctgaagtcatcacaacagaggtaatgccatcttttattcaatgatttccttctaaaatcaaaacttccatttaccatgacttctctgtaggtgcaatctcaatctcaggtgcaaactcagtctcatgttgaatctcagtcccagcagttgctgacacaggttaacaatgcaatggtatctcagatgtttgaggagtcctcccaagttactcaaatgaacttggcacctaggcctctgcctgacaaccaatttgtcatggcaaacaaaccaacagccaggccaatgcctctaaccacaacagcaaaggaaggaaagctgagagcaacaaaaagaaaggctgcaggtgatggtcctgaaaagagagctaccaagaagaagtagaattgctgatagaactgcataagagctaggctagagagctatcagtactttcttttgtaatgacaaatgatagtgtcaatctgattatggctaccatgtctccttttataattatcgaagaaatggctggcatctttt

SEQ ID NO: 19266 - DNA, 3726 bp, Oryza sativa
caacctatcgaggtggcatgagtttctattgtcccatgacgctggaggcccatgcagcactagaaattgaaataactaggtgaaataattgacaatgggactttggggaagttaggacataaattaacttgttgggaggattttctgtataaaattgagttgtagggggaaatagaaaaactagtgagttgtagggggttatttggaatttcactggaattaaattatgagcaaagaatggcggatttcttttttgaatatttaaatgtcatgattcagctcctgttgtttttgcgtgctctagggcgcataattcctctggaaactcaggatgtatcctggcagaataagagagagaatgtggggatacgtgttacggctactgtacaaaatacaacaacgatgaacccgatcaaagtgaggcgtgctccacgcatgccaggcgtgccaatgttcaccttgctggatccgaatgggcagatgtgctagctgtaaagggtgcgactatataagcactcgagaggaggctagggccgcatagaatttgtaaacagcaaactgaatccccaaactaatcctctgtctcctcaatctatctctgatttatttctgcagttaagggtaaatacaacaagacctagatccgggatttcaaaaaattcaccggttatagatatatattttggtccaaagttgtcaacgctggttcatttggtgcaaattaggagtaacatgcatccgaatggtgcttaactagtttctcttttgttcccgatctgcttaattaaatgcttagcgattaacaagcccaatatcttcttcaatcatgcaagaaattaagcgcatcgattttgcaagaattcaattacttcaaacttttcaattccatttaacagcctctgagccaatcaatgcttaacaaaaatgaatcaatgctattctgtaaccatcatgagcaggcatcatccatcaacaggattcaacaacaatcacattagccatggtacgtgtcagccggttgccacagatgtgcacgctggcgctcagctgccccagctcctcacttctttctcttagggttagatacagatggagtgggttactgatcatatcgatatagaacgctactagccacaacagataaggaattactaagctacctttattaatattatttcttgttcctaaattatcctttagaaatcaacggtgcatattatttcgttgaggtacctgtatatgttgatatgctgatatgagattgatcaggtagtgaccaacgcagtgcttaattagctttctcttgtgcttacgtttttcaaaaaataaataaatgaataaataattagctcagatttgtcattttggtcatatacaacggtcatgctatatagagtcagaacttttgaaactttaactatcattagtttttcaaatgctctatttaaaaagggaaaacaatagtatgcttagttttgccatgaaaaagtattatcatagtataaaaacttattagatattctaatacaaaattgatagtcaaagtttgaaaattgagagattttacggtctcgaggtaccacattttatctctcggtgtgtttggtacgtactaggagctacgggtacctctagtaactcttgaggactgtaaaatttctcattaaaatttcaactcaaattttgctctaaatattaatacttatgagttatgaccggatggagtatatgatacggatctgtatcctcaataaaaattttaactcaaattttgttctaaatattaagcacttatgaccggatggagtatatgatacggatccgtatcctcaataaaaatttcaactcaaattttgttctaaatattaagtacttatgaccggatggagtatatgatacggatccgtatcctcaatactagtgtatacacatcgttcttcatgcagtttgtccttgatatgaagttctgaaaaaaaaaaacttgcggcggttttttaacccattgacctgctctcttgtctgctctggactttcactacccacagatacacaccttcttctcttcttgcccgatcacctatcccttattgttacaagtctcattttatttttcttattaccccatcactgcatgctacaagtgataagctactgcttagctgtgaattctgttaagagtattatgtgtttaggggtatattagtaatttctcatatctattgtactcatatatgtcctttgggctaactcaatggcaattgttaatctccaaatcttatctcaaagtgacatggtatcagagccctaatccaaaatcgccactaaatccgtcatcaccggcgagccatcgtcgtcgtcctccgccgttaatcgttgaagcatcaagcaccagtttttggcctcaaccagcagcagtgaccggtcgttatatccagtactccgagactgccgcccgttgccgttcatcgcagccgctcgtcacggcgccttcttcatcgctgcaggtcgcggcactcgtccctgctgctcctccaccagtcgcatggtcgtcccgcgccatcctctcggccccaaccacgcggcgcttgtctcgctgcccgtcgcgtggatcgaagcaacctctgcgatctgtagcagcaacagcagcggcataccatcgtccagttcgccttcaacacttcaagcagtaaacaagtagcagcagcaaatcaaaatccccttttcatcatcattctctccaaatctggtgatgttctctggcaccgatcgaatctatgatccttgtcctcgagctcctcttttcttcaaacagtagcagcagtgaagttccaagatgcagcaacaagtctcattcccattgtgaatattctgttcttcacccagtggttatcctctccttctccatgttcattcactctctacactaattttgcatatttctgttgtggctctgtgctgctacagcctactatttgattagtagaggagtacatgccatatcatgacataattagtttcattgctcgtcataatcatcttgtgcagctgcctgttccctcaattaattcctactttcagtggtagaatttgttaaaatcgtccccttaatttatattgatccctactgtcaccatcagtggcttatgcatctatcaagggcagggcacttctttcgttgctcatttccatagcagtcaccaagctcatcgcctgtatatatcctcagcattgtgcttgcttgtacactgctgctgtcaaccatctagtagtatatatcctgtgtccttttgctagtatatcaatgtcttctacaaatcaatttcccatgtttcctataaaatctgtcaaagtccattgtattgttcagtccgtcgaagtcatgctagtcaatcttttcccagctccaagtcggagttggtcttcatcataatcatcataccatcgtcaactccatgtcggagttagtattcgtcttcagtttaccagctccatgcaccaccaccctcatcaatcagtgaaggactgaagaacagtctgtgaagttccttcaccatcattgtcaccgtctttgaatcaatgaaaagccaaagaacagtttgtgaaggcttctggtaccaagggctgaataacagtttgtgaaggctcgaggtccacttcattgaggaggggatggttttctcttgttcttcatccaagagcaatgcttcgacaacatctttaaatagg

SEQ ID NO: 19267 - DNA, 3348 bp, Oryza sativa
gaggattcactcaatccggtggtttgcttcccattggggatttaatctccaagaatcgaacatgccctaagggtgtctgccacagaaacacatggtaagcaagccagggtcctaagaagcagaggagcataaccaggacaagctgcagtatagatggccaaaaggcccgcccggcacggccaggcccaggcacggcccaccagccatcgagccggcacggcccggcggccgtgccggcccatgggctgcgcctcctgcccaggcacggcccaccagacgtcgggccggcccgaaggagcgggtggcccatcgtgctttttttaaataagtctattttctgtccctcctctatgggctgtgacatctatataacgaaaataagtctattttccatccctcctctttgggctgtgacatatatatatagtgaaaataagtctattttccgtccctcctctttgggctgacatatatatagctaaataagtctattttacgtccctattctttcaattgtggcatataatatgtctatttttactccctattgtttatgtgtcgggcctggcctgcggcccatcgtgccgtgccggtggagaggcccaggcacggcccggtgattgggccgggccggcacgagcccgacccttgacgggccgtgccatgcttgggccgggccaaaacgccatgccatgggccgggccgtcgggcctcgggccttttagccatgtataggctgcaacactaagttgatagttaggttaaacaaagaaactgggaattggtttgtgagcacgttcatggatgggcacaaccatgacctgatatctagctccgacctgacatgtgttatccggtgtcaacgtattgtcacctacgtgcctccttgcaaggtgggtatcaatgaagcactgagctgactttataaaaaaaaccaataggtgataaatatgcgaagggatatctggtctggtggtaatagattttcccagcaacaatcttacttttccggaatcccatatagtcatttttctcgtgtattagtggatctaggacatgatcctcacttatgttactattaaacactagaagaccaattgacagtggcgactcatagcgacgtgagaagcaggccacggcggccagtcgtcaacgcgtgcaaatgttggtcaagcctcctatttcttcagtcttccagatgctattgattctctttttctttcgaacagactttcttgtgtgtacatcttgattaatcttaagaacaaacaaactataatattgatgtatttgattttcatttattttaattaatcttaagaacaaacaaacaaacaaacaaactaaaatagtaaaaatctgaccattgattttcatttaaattggtgggtctattaattttgattgttagatttattttacaagaaaaaaaaatctccgcccggagtccggacgtcagccttcatgcgcacgtatgtacgatccctccaatgttccaaccaccgttcctctcttttttttaatccccataacaattaaaattaaatatttttatgggcctaaaaagcccattagcctattatatctagccaactctttatatattcaaaagtccattaaacttcgatcaaacgctcctatgctaccatgtggcatactataaacgctctcgagtcgccatgtgtcactctaataaaatagtaaaaatctgaccattaattttcatttaaattggtgggactattaattttgattgttagatttattttacaagaaaaaaaaatctccgcccggagtccggacgtcagccttcatgcgcacgtatgtacgatccctccaatgttccaaccaccgttcctctcttttttttaatccccataacaattaaaattaaatatttttatgggcctaaaaagcccattagcctattatatctagccaactctttatatattctctcctaataaatagtccattcaatatcaaataaatatttctaaacaatgtccagatttgttgttattggatatatcccatcatattctaatttgaatttttataggacggaggaagtatatagcactcttaaattagaggaaatcttaaagaaaaataataaaacattcgacaatcgaaattttaggttattagttctatctttttttttaaaaaaaaacatcccaaatctccctccgcactcccatgcggccttaaagcaaattaaccatcttataaatatttttaaaccacccagtgacacttctaaattagaaaaaatcataaaaatttaagaacaaaacatcaaactatggtttcgacgtaaatcgatggacatatcatttaggttgttattagatttttattttaaaaaactcccaaacctcatttcctccctccctgcccctacaatgttaatgacttaaaactacattaaatatcttataaatatttctaaaccactagcgttaaatgatattgttttttgtcataatgtgtaccacatctagtgttaattttttatagacaacataatgaaaataaaaacatgctcagttgaacatcatattgatcgtacaagcatgtaggttggaacaaagaatcttagaagtgaaacaatgatgaggtggccttaccaatataatgagtcaattccatataggaattaaaaatcatgttcatttatttctttttggtagaacttgctacgctccgttgtaaattcctaacatgtagtgtagaacaacttagaaatgtgtatttattacatgacctctatttttaatatttcttactctattgaagtgagataatttagaagagatgactttacctcatgtttgtaggctcgacccacttatgttttcaacccaaattacagagatcaaataatttcaaagatgcttcatagaatggaattctccaaatttctttaaaaaatggacatgaaaacaaacaaaatttatctatttttttaaaacaaattggttttaaaaaccattctaaatagaaatatttaaaatttttgctgcgctaatggaatgaaaatatgtaaaacatcaaatagcacctaacaaaaaaattggacattttgagcaaatgttggggggggtaagatatctacgtaggaagtcaaaattccaaaaatttactcatagaaactacacatattttcgacataatattttctcataaattgagaagtgtgcagtctcgagtaattttagtttagtatttatgtgctgaaggggtaatcagaagaaaattataaccagcattcaaaacacattaaataagttcaatttttattttatgtgcattacaaaggatatttgtaataaaattttacgt

SEQ ID NO: 19268 - DNA, 544 bp, Oryza sativa
tgcctactgccgttatagccaacggtagaccttcacacctgccaacaatctgtcttgctactcggtccattgcaggaggacatgtttgatcttcaccgtgccggaaagcccacatgcaaaagaggtcccaagactctgcctcatctaatcctcgtagttgaagacggcgcttgtcttctgccaaagaagcaacatcatttatgcgagtagtaattaccaccttacttctgatgctgctttcatctagaaagccttccaagctgaaccaaacatttgtatcccacacatcatccaagaccatcatgtatgtccttccctgcaaagtctcctggagcatcagcactacgccttcactactcatgcttcctaagtcagctgagcatgtatccttcaatgcacactgtataatcttcctcattatttcagtaatgtcatatgtttgagacacggtaacccagatctggcaatcaaaacggttcttgctagctttgctttcggaaacagttttgacaagagtagttttaccggaacctcccatacccca

SEQ ID NO: 19269 - DNA, 3438 bp, Oryza sativa
atggccgatattgttatatcgtccttagttgtttttatgttgtaatcggttgtggtttgccgatatacaatggcggatattgctatatcgccctaagttttaaactataattaaatcaatgcttttgacattgtaaaattaggggggcacatatatacaccagttacaaattttgacaatttttgagcaaatttggaagttatattaatcggcacaaaggattatcaagataaacatcagtagtatcttagccgattacaaaaatttctaaggtctattacacagaaagttaccgagacaaatagcgctggatagccgatatagctctttgcctaatttgttctacttcttcgatggcttgggcatcttgagcatcggttccagggatgacttttaaagacttggttagatcagcaacattttttatagccgattttagtcttgctttctgcttttcaacagattttgggagatcggctagctttttatgttccatgtccagattggcactgcattcttgaagttgtgccaggagctcaatctttcgagcttcaagccgatcaatattagacttgatcggaccttcagataactgatcaagcttggccttctcttcatgaacaagctgccgattggcctaaattgtggcctcgatgtctttgcgctcccgacgctcgactagtctcagcttggccttctccagcttgaattgatgctgctcgagatagacagctggagttaggacatcggctagctcatctgggatcagagcttgaatctcatgtagccgagtcctaattgagccacaatcaaccactaagctgtctaacgatgatgcctctagccgatgagagatatcttcaagaattttcttcacatcatcggataagggggctaaagctttgcttgtggtatcctcttctccttcatcaagatagtctctaatgtcaaaagagaaaagatcggctaagacatgcaataatgatttaaagagaagttagaggtcaaatagacatagccgatctgggtattttgtgtcaaagaaaagcttaccaggatagcaggagcagtcggttggacttcttcttcaacatggtgaatccctacagctgatggagtctggtcacttgatgactgttgtacaggagaaggaggaggagactgtaaaagagacaagtgttagacaaaatcggctgagatcaactaatgaaagaattaagatgtcattatagccgatttcttcttcacagcagtcttctttttctacaactacaaaatctgtgagtaatcggccataaagtaaaatgattgcaaaaaggatcaaagagagctgcttactcttgaaaagtgagctggagcagaaggagttggaggggtctgcttgggtgaagccgatggtgttctttctgtgtcgcttactttggctgcggcttggtcaacgtcttcttcaatttcctcttcatccagagcttgttcaatggatggatctagggcaggcagatcatcagatggcttagttatctttgtcttggttttcttctttggagctggggctgaagtatctacagccgatgatctggtttttcttttcttgccggcatcggctggttctctgatgagcccttgaagaagagctgaagtcttgggggcatcatagccgatgacaggaggagatggtccacctccatttggaattaatcccgaggcatattcaatgttcctgccactgttactttggcgaggaggagagaactctgttgtctgcaggtcgaaaggaaagttagtcaaggttagtcggctaagcaactattcaaatgaaattgagtaaattaagacatacctgagggacaacatctggaaagagatctgtcatatacatagaggccgattgatggaatagatgcatgcaccattcactccaccatctgtcgaatgctctgctcctgaatgttaccagctctatattatcaatgctgcctatagggggtccttggaggttaagcagccgatccatcattaaggctgacgaaatttcccctcagcactggatcttatcttcaaagaataagccgattgggagttggcccattccagactgcctggcagaacttattggatgataaaattcataggagacttagatgtttcttccttgatgaatgccgacaggaaggatacatggactgattgcagctgaagaaatttctctgggtttctgatatctttcattgttgatgtcttcgaatatgaagtccaatggattttctagaagtgttgaatcttcatagaggaaccaaacttgagtatgtttttggaaaccctcataaaaattgcagaaccagtctttaagcagctcggccgatagctttgcttctgcatcggttggtatggaggcatattctccgtaagatgtgcatctccgatgagtacgttcttctccatcattgtctacaatcggctccagtcttggaaattcagcttctgttacagatggccaattgacaaacttcatgactaccaaattcagccaggactgcaatagccatcatggtccacctgctccgactactgagccgacagctaacttagccgatgcattgtttagcatttggtacaagtagccgagaagtatttttcttaaaggaaattgtttctttgcttctaaggcttcggctacaaactgccaattggttgtagggccacagcttgatccacaaaagaggaatttctctagccacattagcaagaaagccacatgttctcgaggggtgacggaaccctggcccatgtatgctgctacatagcctgaccagccgcctatgctcttggtcttgaagtcgtattggttcttcgtgttcaagctcatagagttagccgataaggtgacatccagacccgtgatcatgatgatatctatgagagttggggtcatcggcccttggttgaacaagaaggcgttgatggtgttggaccagaaataagaggcagttgccattaggggctcatccttagctgagttggctatggtgagatcgagtgcttggccgattccaatctcgtcccaatgaactcttttgctagccgacatgctcttgaaccatgtgatccaacttttctcgggtcgagttttctcgagggatggccaggatttgaaggtgtttttccagtgacctagatctgggttggccaatctaaaaggaatcctattggtttcaccaataaagaactctgtgggatcagggttgccgactgggccgagaaagtagtagttttcatgcgataggctgggaattgcaactaggttggagagatgctacaaatccaaagtaatcgagaaagggaaagcaatataaggcgagagaaaatcgatctgatgctaagaaaggggatctagccgaccgggacttacctcagtgtactcgccgacggcgtggcaga

SEQ ID NO: 19270 - DNA, 4520 bp, Oryza sativa
  unsure (1)..(4520): unsure at all n locations
cagataagtcaatattgtactgaagtttcaagtttcgaatattttggagacgattctgcacttctttgagttctgctgctattctgcgcaatggcatcacactttcagattttctgaagaagttcttcaacaattccacagatggggtttcttttctgccaaaataatagacaaattcatccaggatgtcttcaacttcaaatgctatctgctgaacttcctgcagaaaggtttcagcctgcctgctggagctttctttttcttggccatcttgcaggaaagattgcatcaacctaaactcacttctaatttgctttacaatgctttcaacctcaattaaaactgatacctccttccccagatgtgaaactaatgcctgcgtcagatgtgaccccaatattgatccaattttgcataggattccaaacaccacagactctgccattcagtgctcgatctctcagttcagatattttcaaatgcaagacctgaaacaaaatgaacaagcatccaataataaattttcatcctacaaattactttgtaccagagttcttgaaaaattgcattaagttaaaaaataacagaacggttgtcatttcagacttatttcacaaattttttggtgccagatgtatccatgtaacaattcaaataagaaaccggtgaagtttaagtggcatataaggaattttctcttcaaataaacagatgctacacaatctaatttctggtccaatcgaaggcaatatactctttctttttcagccttttttatgtaaaaaacatggaacccaaaccacaaaaccacctataagcctatacataagggagagaaacagactaaataaggcaagatagaacggagaaggtacatgaattacctgtgtttgctcgccgaagcttttctcgcagatgggaattgcaatggcaaagtagacgccctggaggcatttgatcgaacagttggcgggtggttgaactgacgaccggccagagtgtgcgccgtggtttgcacactatcaatgggaacctggtaaacccatagacacaccaataatagtgatgtcggtagtttatttagtgtttagcatctaataaaaagtggcaacttgcaccttcgaagaaattgagagcaagaaagctgcatgtttcctaccgaaatccccattcgagggacaaccgatcaagatgtcaattgcagcttggaaaggggaaatggtttaaatggagagagtgggactggcgtgtcagcctaggacaagcatataatatactccctccgtcccataatacaagagattttgactttttacttgcactgtttgtcccctcgccttattcaaataaaatgtgcaaatataaaaaatgaaaagttgtgcttaaagtactttggataataaagtaagtcacaaataaaataaataataatttcaaaattttttgaataagatgaatggtcaaacagtgcaagcaaaatgtcaaaatcccatatattacaagacggatggagtattttattaagagtgtatttttttaagttcattttgtcttaatatttatgttggccactttccattgagtaaatttcacggaacactacaattttcagggaatctgtatcactaccaaaccacattcaactatcggttacctgataagaaaggctcaccggtcagtgactagccgtatacccccccttgtgcgtctgatacgcaggcattcgctggagccgaagttagcgaatcagaaacgacaaaaaaaaaaaaaaaaccacgctaagcttttttcaggagtagcgtcaccagacccatgtgcacaacacgaagacaaccaactctttttgaagctcacgtttgcttgcctgcctacttcggtagttcggtcttttggttttcggcccaactcgagtttacgacgtatataagaagttccaaacctagtatttgcaatgatgctctgattttctgcatacatatacatgaatatattttttttatctaaagtgtgatttcaaatcttttattaaagaaattagttactataaattctattactagatataaattttatcttagggatgccaagtcttttataatattttcttattatggatgaaaacccacaatattttttaaaaattatttctatatgtattttatgtatgttaactttacatgtataaactttttatatgtaaactttatatgtacaaattttatgtatataaactttacatacacaaattattggtagaaaatagtttgcatacaaatcacaaagctgcatccgcccatgaacattttgcacttttgaaagatcatgggaaaaaaagaaaaacaaaaggtgcaaacaacgggagagggccaatgcaggaaaatgtccatccatttagccctaagaaaacttcaacgcatgcagaccatatgctgaaatccagaatgggagacggcccatgtgcttaaatgcagaaaatagaaatagcatgtttgcttgttagacttttcggaatcaaaccaagagaggaaacagaacgctatagttgaaagagaaagtgggacgttcgcgcgtgtgactaatcaggaatgcgcattagtcgttccgccgcttccttcctatatgccattcacccgttcgccccgaaaaattatgtagttgcaaacctaaaaactagtctatagtaagataaaaaaaatggggcaattacgcatctgagcttgttttgaagcctaactactaatttgaccctctttaatcaattttgtttattttacccttcttttcaaaattgaagatccaatcttaccctattctgttcagggtatataacggtgttaatttgagcaaaaaatgtctcttctacctttggtcatttgaccctatttaatgtctcttctacctttggtcatttgaccctattttatcagaattataaataaaatatatcaaaattttggatagcaaccaaaaaaaatataatctctttgccacggcggcggcgtcgccgacccggcggcggcgcacccacggaggaagacggaggcctccgcgcgcggggagggagggagtgagcggcgccctatgctcttcgccacggcatcgtcatcgtcattgctgaccatcggcggcgcgcgcatggaggaagatggagaacgacgcgcgcggggatggagggagcggtgccctgatctttgccacggtgtcgtcatcggtgtgcgtggaggaagacagaggctggcgcgctcggggagggagggagcggctccctgtgatcttcgccgcagcgtcgtcgtcgttgccgacccgggggcagtacgtgtgtggaggaaccgaggaagacagaggccggcacgcacggcgacagagggagcagtgccctgtgaggcgctggagctcgccggcgtgcggagggcgggcggcggcatcacgcgcacggagaaaggaggaggccggcgcaccgaggacgagcagtgacagcttggcgccgaaactcgccagctcacgggagaggggcgccgctagatctgcggcttgtacgcccagcctccgccggatccaccgccacaacttgagctccgccaccgttgctcctcctcgtcgtcatcaagctgccgccgctccttccgctcgtcgttgctgctggtccttctgctcgccgtagctgtcacctgtcctttctccgcgcgcaccgcctcctccgcgcacgggctgccacaggtctgctacctccgcgtgcgccaccacaggtccacgcccctccatcaccgctcgtctcaatcgtgtgccgccgccgccgccgatagacaagatagagacgggagtgaatggatagggttagatgtggatggggtttcttcagaatagtttggtcaatacgaataataattaaatttctttttttttcaaaaaaatgaaactttaacggtgtagtggaaacagggtcagacggagtattcatttttgaaaagcagggtcaaataagcaaactaaaaaagtaggatcagtttagtactccctccgtattttaatgtatgacgccgangctnncctatctcccaaaatctgttgaaaagcataaagcaagactaaaatccgctataaaaaatgttgctgatctaaccaagtctttaaaagtcattcctggaaccgatgctcaagatgcccaagccatcgaagaagtagaacaaattaggcaaagagctatatcggctatccagcgctatttgtctcggtaactttctgcgtaatagaccttagaaatttttgtaatcggctaagatactactgatgtttatcttgataatcctttgtgccgattaatataacttccaaatttgctcaaaaattgtcaaaatttgtaactggtgtatatatgtgcccccctaattttacaatgtcaaaagcattgatttaattatagcttacaacttacggcgaattagcaatatccgccattgtatatctgcaaaccacaaccgattacaacataaaaccaactaacgacgatataacaatatcgg

SEQ ID NO: 19271 - DNA, 3688 bp, Oryza sativa
ggcgtcatacattaaaatatggaggtagtatttatgcttccaaacggagccaaataagtaattgtgcctaaaaaaatagacttttaagatttgcactatatatttttccataagtaaaaaattttactactttcaagtatttgcactatatatttttccctgtttgcccttgccgaaattcttctactgttacaagttgaacttgttagtgtgctacggctgtatattttccaagtttgtcctttctgaattttgaaggcaaagtattatccttccggaaacctcattgatatagttttcatcccaacgtcttccgtgacttagaaaagtactgagtacagctttattgaaaaaaggcgtaatttggagaataggggatggtgacaaggtgtatatttggagagatcaatggatcccaaaggctgctgggttaaaggcaacaggcaagaaagagaaatcgagattaaagtgggtatctccactaatctttttctaggatcgaacagcaagaactaagccaaccagggagggtcaatggttgtagtatccaaaaccaaaacttttagcgaaattaaaagttaccctcgaatcgatgacacgtggtctgactagggtaaatgcgctggtctaaccgcctggacaccattggtctaaccgtagtagtcactccagctgtctgaccgctgtaatcagccgccatcgcctatagccgccgccggtctgaccgccgttaacctgccggtctaaccagtccgacgccatcggtcttgccagttggaccgctgagcctgagcaaacacaaatcgaagaactctcaaagtagatcacaactttattacttctatctgtgtttacaaagtgcaacaacagtactcctcacgaaatctcggctaaactcgaaaccctagctatcctctcaactcaatgctctcttaaacgataccaggaggccacaccctccctctctatatatacacgaggtaggcagcctaaagccacgaaccaaacttgtacaagatgttctaatcctctaggaaaccttctcgtacaagaaactaactttacaaactccaattgtaccaaatttagacaccctccaattcgaccagtcagatcgtgggctggccggtctgaccggtagcacctgcccagtttgaccggacccgacaatctagcagtatctgttcatcacctgcaaatcactttgccaataatctccaaatattaaaaccaataatcttatatgccaattgttcatcacagaataagaatcaaacacactttgattttacacttctacaatcatgatgctgattaaatcctaaaagtcaagccttcaccgagaatatctgaagattttgttacctggcattacgagaaaaatggtatcttttcaatatgcagtgcttataaattggtgctagcagaaagagaactaaaagatggaagttcttgtagcaatgctactgatgggagtagacattgctggtacatggtttggacagcaaacgtgccctagaaagttagagtgttcgcctaccgcatcgcacgagacaatctccctacttaggccaataagtttcaaaggcaattagtgacataagaaaagtgcacgatttgtggatttgaaattgagaattttcacacaatggttagatgtacaaaaagcgaaagctctgcgacatgctctgtgcaggatttgggctctcctaggggaaagctcttttaatttttttggcgtgattgctggaaaggttgtctatccttcttatccttcttagctctgtaccaactaactcttgtcatatccttgtgctgttttggggagcttatagtatttacgtaatgatattgtccatggcaaaggtgaggagatggtggcaagatctgcaatgttcttacagagttaccatgactcttttgcacaagccgtggtacaagaacctggtaaaaaggtaaggcagttttgagtgcagtataaattaattccccaaacccgaagataaatagaactttgggcgtgggttgcagctcatgggaattgccagaactggttgggccaagattaatgttgatggtgcttttttgcaggctcatgcaatgtggtatagttctggttcagtcttgttatcatatttgaagtacattcgccacggggcagcggtggaaaaattagaattgttagcttgcagagatcaaggctggcctcaccaacgagcacagatcgcggctggcgagcaagccgaggatggctttccgtccctctcccagctgccaccaccttcacctccccttccggtgacgacctcgaggctggccatcgagcttcgacggggactagatcggggcgtcagcgcgctgcggccgtcctgtccacgtcgcgagcgtcctctgccgacagcctccagatcaaggcgacggtcgtcgagctcgatcaaggcgacggttgtcgagctctccggaggatcgagagatggcgacgaggtcggtggtgggcagcgggggatggcgacgagccccgcggaaacgcagagccgagggtcgtgaccttcttggcagtgtggagaaggggatgacagcaagctcctcggtgcggcgcggagctgggaagacgggggatgatgggctcccttttcggtcatcgagacgggctccatttcctcatcacccttctccctttccctacccaggcggtttctccctttcccttcctaggcggcacaggcaatggcaagccatgccctccacaacgcctctcctgccttctctccccatgccaccaaccctcgaacaggctgaagaacgagtgaccatctttggttccgcattcttcgtgggaccgcacgaggatgatgtggcagcgaatctttgatgtggatggccaaggccgaacgccaactatatgcattatgcattatgaatggacttaatagatggcaggcagtaccgcggtagaggcggccatgcgtaggtacctagatgagctaccgcgcgcgccgactgcatcgacgacctaccgtacgatcgagttcattgccctggaagtcgcacgtactcggactctcgaagcagcatgttagctcgttccttgacacactgcaggtggctctgtatatttatctgaagagctgccgttgatatttgcactgctctagcatttgtgagttagtagctcttatatactagcacatcatgtcgcgcattcaccacactcgttctaaaatcatgttattcgttctaaaatcatgttatgtggtagagtggcaatctatatatctcttttaggtttctggttgctcgtaaaaaaacatgtatcggataagtgatattgtatatgctgaaataataaatgatttaaactttaaatatatgcaaacttttacatctgtatgagttatagtcctatagttgttttcgtcattacataattaacccccttatcctctccttattttttttgtgtgcacctttatatccgccacgcatatattttgtaagtttttaaggaatattttagttttgttttaaattagtgtggaagtcattaaacttatatttgggagaccacgacctcctcgttcgaaagaatatgtaggtccatatagcaatttttatctcaaacacattaataattgatttttagaaacataattaattatatgaatatacattttgaatatgctcttaa

SEQ ID NO: 19272 - DNA, 4668 bp, Oryza sativa
tcacccaaggtagatcaacaccaatatataacttgaccatatgttttagaaggagggctgtgttttgaactctcagattgatcacttctaagcctcctttctccttagggatgcacaccctatccgaggaggctagagatttccttgtagaagaagggttattccctctctacagacaattcttacaagctgtgtcaatggccttgatgactgtaactggtagctgcaatgaggacatgtagtaggttgggatagaaggcatgactgagttgatcaaagtcaatcttcctccttgaggaagaaaaatagagcttgctgtcagcctcctttctactatgtctaccaacggtgcaaagtctaccactctaggcctggtggtgcccaaaggtagccccaaataagtgaaaggaagagaaccaatcttacaccccaaaatgccagctagcaaatcagctttgtcctgagacatattaagtgggtacagatttgatttattaaagtttaccttgaggcctgtggattgagcaaacatattcaaaatagtcttgaaacagaagacttctttcttagatgcttttagcaagatcaatgtgtcattagcatgctgtatgattgggaaaccctccccactgctttcattaattggatttgacagaaggccttgatggaaagctttgttgattattctttgtaacaactctgcacccaacacaaaaagcagaggtgagagaggatctccttgtctgacctctctcttgcatttaaaagaattccctggcaccccattcaatagcaagcagtagagaaaaccatttgtacccactcaatccattttagaggaaaacccatatgttgcagaacggagagaattgcggaatgctcaatggtatcaaaggctttttcaaagtctaacttcaagaggacaatttctctttttgactgctgacactggtgaatatattcaaaagaccaggcaagacaatcctgtatggtttttcctttgatgaaaccatattgattattactcaccagtttgagaattaccccttgaagtatgtcatctagtaatttggttaagattttcagacttatacccataagggaaataggtctgaaatcattaacagtctctgggaggttttctttggaaccagggttatgaaagagctattaaggatttccaaaacaacatttccagcatgaaaatgagctgccaatctgtaatagtcctgagctataatatgccaacatttttttcatgaaatagccattgaaaccatctggtcctggtgctttgtcagctgaaataatggagatgagactatctatttcctgagtggaaaacatgtcaaccaagctgctcaaatttatatgtctgtcaaaaagagactccaggtcaaaagccatatgtggggaattagaaacacccatcttgttcttaaaactgtgatgaaacagggaaactttctgctcatgaagatgtataatctgtccatcatgatctagcacttgtgagacagtgttgattatgaacctttcagtggctaataactagaagaattttgtattctcctcccccaacatcatccatctattggtgcaccttttttccaatagatcttcctaaattccaataatttcaaaatatgtaccttaactgtttctctgaaattccactcatagactgaaagcattctgttttcttcgactaaatccagaaaatccaccactttgttacagttttttagaagtcccatcaacttagattcttactccaggcaaggagcttttacttgagcactttcaatttgaaagaaatgcacttggcatgatcatcaaaactaggatctaaagaccaaactgcctaaacaatatcaaaaaacccatccatctctacccaataaatttcaaatatgaaaataggggatttggggatttttgtgtcaatcttaactacacatggcacatgatcagagatgtttctggttagaggcagcactaatgtatttggatagtccattgtccatgaggctgatgtgaatgcccagtccaatctctcaagaagtggatatgatgcatattgctctaggtgaattttctgcctttaagagggatttccagaaggccaagagtgctaatgatatcattgaagatgaaaatgtcattcatatctgccccatctttatttctatcttgcacagatatataaaaattgaaaacacccaagaaaagccaattttgctgataagcaatttggacatttctgaatcaagaaacaaaatttgctgttttagggccactacaagggccatagacacatgccagggtccaattctgggcagagtgccttgagatgaagtcaatggtgactgaaaagaggttaacctctaccactgtgcccacaaaaactcgagacgaccaaacaatcaggatacctcctgaagctccattggaaggagcaaaagcaaaactatctagattctttggagcaaatttcctgatatcagataaatcaaagtggtcttttttagtttcctgaatacaacagacctgacaaccactatcctcaatcttctgcctcaaggagagtaacttggattcggcattcatccctcgaatattccaacagagcacattccaaaatttaaaattattcatgataaactggataaaggagactgaaataaatagaactagcacaaccagtctgtaataaaggagcatcccaagtattcaaaatttacataattgaaacatttaactgataagacacaaatgtttttgcctaagtacagaccattacatgatggataaaaatctgattaaggtctgcagaaacacacaaaaggtctaaattcatttttcctccatgtcaggcctgggcatcttcttccttctctggcctcccaggctagactcagctacctcgtcaggagctagcccgcacatgtccactcccatcttttgcaatagagaaattgagcaatcagatggtgaggaatcagaatgaatatcatcataaacatttgcattaaaatcagtttcctttatgctagtataatcaaatatttttgctatacctgccaattctttgagctttcttgcagactttccccttgacttaccaatgcccattctgggatccacctttagttcagaatcccctttgatatgctgaagtcttgcactctgcctcctgtagggattatatagaagagttctgccttcccttttcttaccaggggcttttggtagcatcaaaggagcagctgcttggcagactagactggagggtgggtgaaccacccaaggcaagacttcaagaatttccatgttttcatgggcctgtgactgaggaggactattagacttatgaaagtccaaagcccaggtagcatccagcttactcacttggggggagaaatcaaacatagtcttctttggtaggactagagctttaaaggggcttggctcataaagagtagcaggaatagagttactagccaagaactgatgcatagaacccctttctttgcacaggtggtcaatcttcttattgatctctttcatggggtagaaatagggaaccttggggtactcatttttagcaattttctccaatcttgctaaagacctctgcacttgtgcatcctggtcagatccttgcacctttttccccttgtctatagcaggaacaaaggggaccactacattatcatctccagggttagcaacagccaaatcaattattccatcagggtttacttccatgatctggcccatagggtgatcttggccccaagcatcttccacctgctcatttgctgtattctgttgctggactaaatcatcccaatcaccaggacctgcttggggatgacccatttgccagatgtggccaccatcaggatcctcatcatcatcagcagcaggattaggctgtgggccagctaggggaagatcctcatctagcgacatattgatgaaatcaccttccaaaagaaaaacagaaactgtccaggattcgtcaccaccacccattcccactggatcatgtagcacaattttcgtgggcacagagtcattgtctttaaatttagctctaatgagcaccctccccttaatctaatctctttcaagccagtaagagagctgtaacaccctaaaaattcccaataataaaaatcactaaaattttgaactttttaaaacttttgcatcatgctggttgttatgattgctattgcttgccaaaccgtaaataatcacaaagaaagtaaagaaaagatcgacatttaagcaatagatataatttacgagaatatattattgttaaccctaccaatatttatgcacaagatagtaaagtcaaatattaatttctattataaattacaaatcagatattaaatattcgaaccatgattgatagcttgatgtcacaattagctaaagaaatagtaagattaaatctaattcatttgaatccaatctcacatgaaatataagaacacatgaaatgatgatcaccactataatgatcgtgtttataactaagtaattcaccagaatatatagattgatacttagagcatttcgccgagttcctcatgacatgaaaatcactcatataaaataatggtcatataaataaattaagcttgagta

SEQ ID NO: 19273 - DNA, 583 bp, Oryza sativa
tccgtttaagtccattcaagtctcagtaaattcataaaaatgcaaggaatccattaaaaatggttttgtttcctgtttcagtagtcttatagcatgttttgcttgtgtgctttgtttgtcgcgtagatttcggccgtttcatcgatccgcggtttcccgaagacgttgctgtggtctcatcagtgcgagagcaaggcaagtcatgcattactattgatcatattgtacccaatttacatagactttgactatgagcatagctttggattggtgccaccgcaatggtgttagctaattaaaatacactggatggtgggctgtgggtgcatggttttgctggtcgcacccattgcagttaaggaccggttcacgggaaaccctgggagacttaccgtgcttaccacaagcgggagtgggtaactacttgatctgaagtatagctcgaccttttcctaggcaccggtggccagggtgggcgtgatggagtcgggtcggccagggtgtccggttgaccagctgccatattcaccctgcgcacgaaaggactgcccactgccttttgaggggcgggggtgaaacctta

SEQ ID NO: 19274 - DNA, 1851 bp, Oryza sativa
ttctttcaaatcgggacagtatctcagaaatctgtagaaagaggaggaaaaagcggatatgaacaacatccatcatacagtattcccgtaggaaattattagcaggcatatggagacaataaacagtagagtacaatttagtgtttggttgcatgattgaaattggttacatgtcggcctgccactagccaggatgttagtagtagtactggggaccattgatttgacaaacctgagagaagaggagatgagaggagaggaccccaagtgtgcagtgcagagttgaggagcccaattggagaaaagaaatgaaaagagagcagaatgacagatctgccatcacatctcaaagtttgtctcatgtgaatgtgattactactcagtattattagtcatatgtagaactgagatgagatggtactatgcattatatagttgttactagtggtatatcgaagtatatgtactccagtatgttagtaatagagatgtactagtaatcggaggaagtacatggtaccaacatgagcatgtaatgggattccgtaattttatatcgtagtatgatgtatgcactagtaatttgctggtgttaatgctacggtgatacttaatagaacccatgttagtattattaaattaaaaaaaatcatgttggtgatgcaatacaagtagtagttaccaggcccctttggacgccgtcaggcttgatgacagggacctgtaagttgacatgtactgcaccatcaacatactacatgcttgtagtcgtagatgtacccaaaaaaaaacaaaaaaacaagagagaggcatagcactacttgcaaatgcatccatatatactcacttttaattacttgccagccacactccacacacacactttgttattgcctcgcgcactgcttcctctcttctgcaatcttcccctcccctccccattgagagaggctacacttttctctactcaaattccctaggagtactttttttttctcgtcactctccttgccttaatttggagggaaaagaatatctacttactgctgtcgactcatgtagacaaaacaaaacaaagcacagtcattaatctgaccttaatatcttttggccttctctactttttttcccatagtaaaaataaattatgttttcactcctgaaacaaaaagtaaaatctactgaccagaaaatagaatgcttgttagtaacatgtttgcaattaagaacgttacatttcagtacttcattcattttaaaatgaattaactaagtggactgaaataacctctttgtcatctgtcgatcctacagggaaacatggcacaaccatcctttctatcagagtatgaccttggaggggaaggggacctgttcaaagctcctgaacccatcattgaagaaccagtgcttagccttgatccagttgcagcagccatttcgatgatgtctggcagtgagaacgtaatggatgaaactatagaggttgcagatatcagcgacattcagaatgactctcttttaagcgaagtattatatgagtgcgagaaggaactcatggagaagtccgcaattgaagagagtatttctgaactggtggatgtcaagattcttatgctgcaagtggaagagttccttagggaaacccaagtacaactaccggccatggagaaggagaaaccatcagttcatgaatgttgttcactccagaaaagtgtcagttctgggtgcctcaactcagctgattggatcaatggaccagccaggccaaacttcctggacttccaaggattggactttgagacagcgtttgggttgaggagggcatacagcgaaggagacagtcaggtt

SEQ ID NO: 19275 - DNA, 1214 bp, Oryza sativa
gcttattaatatgcattttacccatgagacttgttgcataactgttgtacacatggcacgatacttgttcgaagtttcggagagcatatgcatgcgacgtccaaatttaggaagtagaaccagagaatgtgcctacttttttgcaaataatcaagggggctgacttaatttgtaccacccatttttgggcggtggctaggtccatgtatgccaatatataaatcgatcagagaagaggatcgacgaggagacaagctagatagcttattggagagaaaaaagggtcgaagcgcaagcaaatcgatcagcaacacaagatgaagaagatgcggatggcaatggtgagcctggccctggtgctggtggggcttctcctcgtcgccaccactgctaacgccaagaacgcccatgccggtggcttgaagaagggcggctctgaagctgaaggccgcgtcgtctacgccgacatgagattggtcgttccctccgactccgactccgcccccgcccccgcccctgcctccgcctctgatgggccagcacctgcgccatcccccaacaattaattcaacatcgacctagcatatatatatacgtatatatttgttattttcatgtgttgttttcgcattttatataaccatgcgcgctctagttgtacatgcagccgattgatgtgcatttgatttatgcctgctcatttttatttctttctttttatttacgttaaatgaaacactttctccatgcatacatggttgttcttattttatttattataaggatatatatatatatatatatgcgcattcagtaagaccaacaagttcatgttatgtctcatctatatacctctctattattaggccacctctcatctcccatgatctctacatgtcggtctatttatccatagattttgaacaaattaattactgaatacaaattgcgatcaaaggctatagcaattgaaatagcaagcccatgtttctgtacatcttgtgaattacagccgtgtaaattcatgagcatgcatgcatttgatgataacaattaatatagctaatactagccccgtttgagatatagctgaaactgatggattgatggatagtttttttatatatagttattttgagggtatacatttacttctttatgtatgtataaacttaaaaacttgctttacaaaattattcgttaaaatgtaatat

SEQ ID NO: 19276 - DNA, 2602 bp, Oryza sativa
tccgcctaagggacttgttcgtgttttagagttgtaatagaagtagagtcgtgtccgacaaggacataatatgtgttttgggtataaatatgacccgagaccttataaacaaagagaccagctcaatatactctcggcgcatcgccaccctttttacttttcattgttgtcaacgagttcttactttcgagttgggctgcatcagtttcgatctccgacaagaggtaaagcttgttatggcggcttgcattctcgggattagtgcttacatctttatgacactctaatcctgtccatgtaaatcgtcgagttatcatatatgctatataatctagatcgaccttactatctgatctcgtcggctagcctctatcatcaaaaacagccgataggatccgatattatcgtcaaattagattatatagcatatccaccatcccgaaaaggcttccattggcttttttagatcttatgtttctctttatgcttaatgctgcatcaattgtgtttgatctactaagcaatatccagagccataatatctagcttgcttcaatctgtgatcactgaacttattcatgaaaatcaatatggtttcataaagcaaaggacaattcacgactgtttggtgtggacttttgaattccttcaccaatgtcatcagagcaaaaaagaaatcctcattctcaaaattgattttgaaaaggcttttgatactgtagagcatgcttgtatcctggaaattcttaaggcaaagggctttgacaatacatggatcaattgggtaaaagatattttaactacagcctcctcctcaattttacacaatggtgtcccaggaaaaaaaacttcaattgtctcagaggtgtaaaacagggagaccctatctctgctcttctgtttgtccttgctgctgatcttcttcaatctatgatcaacaaagctctcaacctgggagtcctctcccttcctattcctcaagttgacaccaagttccttataatccaatatgctgatgacacccttatcattatgaaggcgtgtcaaagagaagttttctgtctaaaaggcatcctgcaatcttttgccatgtccactgggttaaaaatcaattttcacaaatattctatgatcccaatcaatgttaatcaggatagaattgaaatcctggcagagacttttggatgcccaattggatctctcccctttacgtaccttggtctaccggttggaacaacaaaacccaaaatctgtgattttgcacctctcattgatagagtggaaagaaactcctggctataacaatgttttagaatcaaggacagagactaaccatggtcaactcagttatgtcatccctgccaacaaattacatgtgcacacttaaaatccctaaaaagattttgttgcacatcgatagagcaagaaggcattgtctttggagaaaatctcacgaaattgatgcaaaagctcattctttttggcagcatgggacaagatttgtagaccaaaaaaaagagggggactgggtgtcattaatttagaattccaaaactatgcccttttgatgaatcatctcgacaaatttttcaacaagaaaaatctcccatgggtaaaacttctttggacatcattttataataatagatccatgccaccgcatgcattaccagactttggatccttttggtggaaagacatcactcaactaatacctcactttagaggtttcagctctattcagatcaacacaggggacatagctcttttctagaaagatctctggtcagacactttacttcaaaactccttttccaccattttctcttttgtgaaagtgaaggcattcctctggctcctgtttatggatagattaaacgagacatgctacaaagaagacacctctctattcaggatggaccctcttgccaaatctgcagcttagatattttggaggatatgtctcatctttttttcacgtgcccatttgcccaaaactgctggaattctcttgcaatctatttggatgtgaatcttgatctctttgacatgattcaaactgcattcagaaattttggtcaaaacttctttgtggaagtggtgggtacagcatgctggcaaatttggttgaaaagaaatgctctcatttttgacaatgtccaaccatctttcaatatttggaaagctgatttcaaggaggatttcactcttcttttgcatagagtgaaggaggaagacatgcctaaatatcaatcatggattgacaacttattttatttttttcctctttagtacatattttgtaattttgatgtaactcatgttcatatattaatataattaccacagtaggagcctctcctattgtttaaagtcaaaaaacagggatagtatcggggtttcagctgatcttacctggttcagttatcttgttttcttatatgtttacttggtatactgaatctgccctttatattaagatctcgtttggttgaaatacgttaagctcactatcggtctgttagggtatactgacattgattcgattcttatttagtatatttaatccatactagtatcttagtataaagtagtaccgagt

SEQ ID NO: 19277 - DNA, 7575 bp, Oryza sativa
tcttgttggttgcaggatcaaaccaactggcatgccccgaacccaaaagcaagattttaggacatgcactagactaaagcaaatctctcaggccagtgtgtgtttttcacattaacagtagcttaactggttacgagctacgtctcttgtggtagaaccagcacaaccaggttcaaattctatatttggcacggatgctcatatttacgattaattattgttttagtggtaggtgctcgtcaacagcgaggcgcccatggttacttcatcaatatcaaaatatgttggctcaatctttcggatgtgctcataggagtaggatgtatgtggtaaggtgcaacagtgaaagtaaagaaaagacatgtgttacgtgagctcgaaaatgcatgcatcaccgcttagttgttagtactacttgtttacctaccaatgcacatcgtcatgcaaccgcagatgcaccttgcctcaagtcaagaagtaaatatggaattcctatttgaaatattgttaacaaaagtttttctttcagtttgtatggaaggtgttcacaccttacccctaagaagttatggttttgctatttcacacgcgtcagatttttgggcttctatctttattttttcgtccgcaagatcttgcattaagatttctgttcttgtatatccaacttgcagttacactcgattacatagcacttacactcagttatagtgcacttgcacttaattacatagcacttatactcagttctagtgcatcaaaattatattttagatcagttttttctagatttttgattgtttatatgcttgtcttttttgtttattatttcatttaaaatgggctatagccattggttgaaatttctgcaagattcgaagttataaatctatcgcaatatcaaaaggtagtcctattaagctatttcttcggtgtctaggaccctaaatacctttctttcttctcccgcacttcatgaacgctctccatcttttccatttttttctccctctgtgctagggaaggcaccgcggagcacctggccgtgagatttcaatggcggcaccatgaatacaatgagataatagaggaaagatctctcatatggtctattaatgtgaccaaacatgggacatatataatcattccattcacttagcacggatggcacacctcttctcatcgatcccaggaatgctaattcacgcatacgcgctagctggcaaacttccgcacgtggccccaactctatctcacgacaagcgccaggttggagttagggtttctagagtgggtaggggaaggttaacactggagagggaaagttaggggattggccttagagcgtttgtcttgaacaaacaaaggctggtttccatcaagaaatcgggttaatgaaggaaggggggaagaaaagcgtgtcaaagtggaggcgaggactttggaggtgattactatcaaagtggggtctcatgatatgccaataccttctaaagatggagccaaggcgattccaagcgacgaaccgaagccgggaccatctctgccggtctaaccaccggccacacgctagtctgaccgggccgactggccagtctgaccggtggtttacaaccggtcctgactggtctccagcgccgatttgacagtagatttgctagaggtggttcgggtgcttcatcgtcttcaagcaaaatcaatagggggcataatattcctcatggaacatagccgaaatcaaggcggatgcctaggaatttaacggctactcaaaagaggaggttgcaacatcttcggactcaagagttaaaagagagagaagccgaagagtggagggatagaagatttaatgagttgtgactgccgccaatgaaggagtggaggcctaaatccatagagattagagattgatgagccggttgttgagcaagtaggaaaagatgaccaactggttgttaaagatgaattgccgccaaaggaagacatggacataaacatggtgtgtatgtttcctatggagttttgtgctatggatgaggttgaagtttttcaactttcactaggtccaagagatgcggtttttgggaagcccgatgagtctaaccgtcatatgaagcatcttaatcttaagggtcatattgatgggaatctctaggatgttggtggatggaggtgccgccatgaacttgattccatactcatttgtcggagatatgggcccgggggtatgtgaagtaaagggaagttaccttcccgtccagccaagtggccctgcaagctggccccactcacacacctcgtgagtcgcgagagcggcggggggggcctcggggcgtgacgtcgccccctcgggctctcccgctgctcccctcgaggccctcgcccggctgtcacgtggcagggggagagagtgagagggggacccaggctggacagccataaaaatgcggcaccccaactatccctcactgcatttaacgcgataagggcaggcatgcggtgcgcctagctgacccctgtcaatcggaggtgaccaatctgtgaccggcctgttgccggtcacgtccgattgaacgggcggccgtgcccccacgtcgcctctgtctctggcggagtgggggtaggtatgacctgtcacattggagcgtcactcgaaggagggctgtcacgcccagaaatttaacccaaatttccagactattttgcgtattaaatccctgtcccgagattctgggatggctagaaagaaagctggagctggcgggcggtctgactgatttgcacactgcactgttcctttctaattcaactgaccgattcctcaatggtccaaacctacacgactgaactgaccggcattgaccattctgttcttttgctccaaacaactgaactgactggcctcattggattcgaccttggagttctggcgccccacaagactgaactcagtacgagtgatctggctggtttcagctctgcggtcctgttgctcccaaaactgaacagattggttctgcttgaactgacccagactaggactgcgaatgctcgtgaaactttcttatcttgggatgaactgttgatgctagcaacttgataacctgacagttcaccaagttggctagagaaggatggagttgttcctgaatcttgcatctggcatttgtaactcattgatcctacgtccgcttgaactggtcctggctcgaatgacaattccaggaaacctgcttgacatgtcttttgtctgaactgcaaccgtctgcttgacctgtctaagctaagcggttgaactggcctcatgggtgtaccttagaattcaatcggttgcccggggattggcttaattcttctgataccttgcaacatgtttcttcaagtgctaccctgattgcggcactggttgaaccttcaactaaaacagcgacgaagtgaggcaaaactcttctccgagacctaccccccttacagggagtagtcttactttcgcgtggctgggatcggttgaactgttgtccttcaaatataaccaacacttctctgttttgcgaagagccctgactttgaaaactaaaaacttcgccgatcgatcaaaatagagtaacaacgatgcactttcatcccattaagatttggaacttaaccctcagttgctgataggaaattccacataaggaaattctcatttagcatatgatctttctaactcttgactacttccccatcagttctacggctggcataactagcatgcttctggactgacgtcggtgtcgtatgcttggacatattgcatagtcgacattctttgaagcacacattgaccacttaacggatcaaaatcaagagtccttctcacgacataaccccacacgtcgatttttttttactcttcctggattgatgaactgtaaaccctgcaactgctttcgcaaaaatactgtagtctgcacgactgccggaaattgactttgatgctgccgagagttcctgttctttgatcataacaacttcgctttcatatgttcggtaaagatgatttgttgaaaagagattctatgccatataccttgttggctacacatttctatttctggaccaaactctcgtatcttcctgactcatgtatggaacaatttctttttttttcaacttctgagaaacattgagatgattcctggaacttatactggttgccttgaactaagcaaacaccttctgaattcatggtcaccacactagggcgtaatcgccgattaccatcctgtaacagcttccaaggttagagagtttccaagagtttctatatgatgtcactttcaaatattccatccctcttttcatttgagtaccactgatgttgcctttagagagatctcatcatgtcgagtgttgagggtctaaccattttcactccgttggttaaccattcctctattggcttgcaaacaggttttggagctcaatagaattgcgatgagttagaagagaaacccttggtttcttgagacactgacagatacccattttgatttgcttttgcatgctgaagatgaatcataaaaggagaggaactggctgactcatattttattcaatatttccttttcattacatggctaccataaacatatatgtacaatgagaagtactacaaaatcaaacaattgtagactgctgctgattagaactgcccttttcacgactgaacttgaaaagtagaagtcttgtctagaactgctattgcttccattattcaaacctgactgacttgtttctttagttcctactaccagaagtctcaccgggaacgttgctctgcttgttgatcttcgatggtggaggggcaactgtcttgtcagctgtaacgggtaggatcttcttgcccgtggggttaccgaacggtgatttgtcgatgggcctccagattggagcaatacgaggtgcattgctagaactgacaacagttgggcgacctggtgctgacaacacttgccgcgggtgctgacgaaggggcgtaccgcctctttgtagctgtagcgagctgttgttctcctggcattgcttacgctgctggcgttggtgctgtaggcttgaaacgattgctggtggaacaatgtgacctttgacggtgcccttgacgataatccgttggggcggaggttgcacattcaggtgtcgattggtgtcatgggcagtgctggtaacttgtgaatcacgacgaactgcctttgctgctcttggaagaggacaatcactgaaacgatgtcctggcttacgacagttgtgacagaatcgacttgcttggtctcggggtgcaggcttctgattatgcactttggcagctgaaacgggaacaagcagagacttatgaacatccttggtgacgttgcttcttccatggttggcttccactggaactagagttggaggaagagcagaaggattgtgaccgctgttgtcgattgtcattggttgacgaatgggttgcacggttgtcccttgttctttcttggtcttagctatgaccgcgtttaactgacagtccttaggcacatgatctgttccttcacacaagaaacatgtgaccttccttaaagggaatgcatctgagtaatgggtatattcaccacagcagcatgtggggaggcataaactagcagtgtgtccgactatcccacatctagtacatgctttgaactccaatcctctttccatgaaactgttaagggtcgtatcatcatcgtcatcagtatcatcatcatcgtcatcagcagaaaactgctctcctgattcatcatcttcgggtctgggcgaaccgtactttatgagatgtcgggttagctggcgtgctccacggaaggtatttcttcctctctgacgcttgggtatccttgctgcgtcttcaggagtaaattctgaacttgtgatgatcatggtcctgccattatccatcttccatgtcaccttcctgttcgctccagagttgggctgcaaagtaccatccttcttgtcggtagactgacttggagcttggttactccctgggcactgcttctcgtctttttcaggtgacctggcgaacaccttccatggacagttccttacataatgaccttgctcaccacagtcataacaggtagcacttactttcctttggtctgacgatgacttggctgtcgttatcttcggggatctggacagcattttgacaggggtcttcggtgccgatattgggaactcctgactctgactctgattcgggttccgggctggcatctgatctggcacctgcggtgggtgacattgacgtgactcctgacattgtcgttgcatctgttgcatctggtatatttggtaccgacgtcgcatctgttgtaacaactcttccactgtctgagtttgattagccatgacttggggttcaggctgatcttcaagaggctgacgtggaatactattagaattgcactgagttgccccatgaaactgacggggtcttgatccgatgaaattgtccctcatgcagaccatctgctgcaggcaccagagagagggggaaatgggaggggttactagagaggaggtactaaaccacttgcctattgatctgttgtgaatggattttatgattcaagttgtttaagcaaacaacctagtatggtcgcatccccaccagtgatgcaaaccatacccctacacacaagcaaacaacacacgatctagaagctaacgaaactaccctcccgggaaggattgggtttaggtcatctccgagaaaacttcacttgatcttcgcggaacgacgactttgaactgatcttctcgctccttgcatgaagcttgaggcttgacttgacttgacttccgaacagacatgaagttgacggtttctcctccatgtttgacaactaaaagagttggagggacagggaggagaattttcaaaatcgtttcacaaagaaatgccaaagggcgagaggagacattttgcaaatagggttttcagaaaacttgtccttagggtttgaccatttggctcaacctacagtcaagttggctctgataccactttgtcacgcccagaaatttaacccaaattttcagactattttgcgtattaaatccctatccaggaccagccagggtacacaaaacgacaagtaatatacagttccaaacgtaaataaagcgtaaaatacttacggaagaggcacttagtcctcacaccgaaacagaacgatagcagcggaaaaaggcgatcctagcggggctcgggaaggcgggatcgaggccggacgtggcggaatcggccggcgaagtggggcgccgacgtggggtggtgaagggattaaccggcgccgattttcgctgggagagtggggagaaaggtggaggatgtggaggggatcgatttcacgcgctcgtgggacggggtggagcgcgggagccgcggcgtcgtggggcgaaaccggcggccatggcggcagttggggcgacgggaggttggggaagaagatgacaggtggggcctcgggtcccacctgtcggggagagagagaggggaaaacg

SEQ ID NO: 19278 - DNA, 1598 bp, Oryza sativa
ttaaattggtttaacttttatttaatttttagaaaatgcattattaaatgatttttaatcccgaacgaaaatcggggcgttacaagggttgccacaagtcttcactcatttatgagggaatgacagggctgtcctccgtgtcaggcgggggatggcattgggacccactcaaggaccggttgctgcttagcttccgggggaaggcacggatcaatgcccggtcaaagtggagtgggtccccccccatggagggttaggtagaggcagtgcatgtggtatccccttgagctataaagggaggaccttgcccaccgagacaggggggacgactctcagaaaacctgaactctaggagaaggaaagtgagaacgctctctggagtaaaggaacctttgtaaaactcatccataatcccaaacacaggagtagggtgttacgctccatagcggcccgaacctgtataatccgactgtgtgcaagctagccgagagtcttaggggcgaatacgtgatttccaagaggcgagcctctgcccccggccgaactcacgaaaggggggtctcacgactccccgctatcgaggatcttccctcgacatcattattcaagaagttgggacgtggagatgatgagttgaagaagaccaacatgactctcaacggcttcaatggtgaaccaacggaggcgaaaggtatcttttcggtggagcttaccgtggttaaaaagacgttgccaaccgctttcttcatcgtcgatgtgcaaggtaactgtagtgttattttggggcgttgttggattcatgccaattgttgtgtgccttctaccttgcatcaatgtttaactcaatgggacggcgatgatattgagattgtttaagcagatacatgcaatggccgatgcttcaattgagtgcgaacatgggaatcctacaacatttctaagaatggtttttgtaacattctgaaaattcgaccaacaaaatcaaagactccaaaaaaattctgatcttcaaaaaaaaaactttttaaataaattgcatcatgccaattttattcgaagattttattggattttgatttcggatttcatcgatcacaaatgggaggaaattaactaggaataaaccctaaaaatcaagtgggctaaataaataattaaaatataaattaaaataaagattaggtgggtttggaaataaataaaatgttatcgcaaccatattaacaacaattaaattttaatacgatggaatgagaattaactttaattaaaaattcaaatgaattatataaacaaaatatgagtgatattaaattaggtgaatctttagttagaataatataaatatggggtaaaacttcatttatgcaaaaattaagaatttcggaatcaaattcatatgagaaacactctaaaatcggtttattggaaaagtgcactgttcattgcccgccacgtgttcgacctggtccccagcctttcccctcccctgccacgcgcgccgctccgcctcccctctgccgcgtcgctcgccgtcgcatcaccgtcgtcgtcgcgtcgagccccgtgccgagccgcgcccgtcccgctgccgcgcc

SEQ ID NO: 19279 - DNA, 5933 bp, Oryza sativa
  unsure (1)..(5933): unsure at all n locations
cgagccccgcgcgccgccccgagccccgcgcagccatcccgtcaccgcagccgcgtcgccgcccctccccctcctctctttcccctcttattcttcccctcttcccctcttccctcttccctcctcctccttcccccttatctctctcccttcccctataaaagcctcactattcccccccttctccccgtctccaccacccactcctccacgccgtcgcgccgccatcgtagtgccgccgcaccgccgccgtcgtgctgccgcgccgaccgtttccgtgcccgcaccgccgttctcgcgccaccgtgcgccgccgtcgctgccgccgtcatcgccgctgccgccgccggtgagtcgccctccgtttccctcgagtccgccgccgccaccgctcgggtgggaaagagagagagccgagagaaagagagggagagccgagaaagagaaggagaggaagggaggaggaagccaggagagaaaagaaaagaaagggagagaaagaaaaagaaaagaaaagagaggagaggaaaaagggaaagaaaaagagaaagaaaaatttagggggaaatttaaaatatttgcaaatattagaatttaattgtaggattaatgaaaatatagttagataaactcttactaattaaatacctaaaatactagcatttaaatataggattaatgaaaatataatgggataaattcctatagattatagataacttttagtactctccataagaaatcaattcgcggtattaatttagatgtaattaataattaaacaaatgtatgaattctcgtaaattattgtggattatttctgggtaatctctataaataatcgatcaacggtagcgattcggatttaattactagagtgttaaccgtgtattatatttaatcatagactaaattaagtcgtataatattataagataattttaggattccgctcgacatttagctcgcgataagaaatttctaacctaatatacggatataatgctagggtagattaaattaaaaacatacgacaacaaaatattgtaaccgcaaaataatttaaaccaaaattggggtttgccatagttcgcggatagtaaaattaataaaaaggaattgactttcgcgttcgacttccatttggatttacttggatttttatttgaattctaaccgaattcaaatcaattttcgcacgtaactatagagaccgagggagccgcggatccaggtgaaggccaagacccgcaagacctcgagcaaggcaagtcatcactattccttgaacatgttgatcccaattgcgaaattgttttgtttataaataaaattgcatgcaattatgaacctcctacttgtgattatgccatgccttgattattgttcacctttaaatctttgtaaccatagatacgtacgagtccctagtcaactatgacacttgcttagaaatgctattttagattcatgcatactcatatttatcaaatgctatatgcttgggcaattacctttgggaaggtaattgagatgcggcatgtggagacatgagcgccacattgccatgatattgatgacataatttgtgaaaggaaaataaagtaaaacaactgttttcgactggggcggctggaggacttgggtggtgtccggaaaaggctagtgccgtccctggtcaattaaggaccgagccatgaagttaagcatgaaacgacccccgtacaaccgcacttctcgtatgggtatagacctagcggagtagatagctgagcggaggcagtatccatgcatagtggtttcttgatgtgtgaggcaggggctctacggtggggcagccattggtaggaccgcgaggagggtgtctacagtggtgtcgccatcggtaggaatgccatgtgagaatctaaaacataattataacttaatgcatgtgtgagtcttcccttcccgggtgccagaactcctctcactgctagaaaccgtgtacgcctagagtgcatgaggatgaaaagttcatggagcgggtactgccaatgcgaggttatcgaaaagctttgccgtgacgcgtctcatgtgttgggacgaggctcatgtgttgggcagtcgcggagtgcgggtaaagtgtacatccactgcagtgtgagtaaaccaaacctattcgaatagccgtgctcgcggttattgagcaccgggacatgtattacacttggctagactctaaattcttaacttgtgtgggatgggatattgcatgatgaattttatgctgttggagccacttcctgagaggcgagaaggtggacgtcctcagaaaaccatgacgaatcaatggcgggaagctatccttgggatcacaatggatggtggacagaaccgtcgttgtttaaatacaaactctggtactaaaaatttgatcagtcaatgctaggtcttaggcttgtgaaaagaattacaaaacttgctttgcgcaaaagaactatggccatcctttgaactccccctttcatatgcattgttgctgtggtggcttgctgagtacggttggtactcatccttgcaaatataaaatttattagaagtgggagatgaagcctcggaggatccctatgcctattatcaggagggagatgaagacgatggcgtccagtaggtcttagcacggtcgttgcctgtggcaatggcatgccgctgcctgaattccgctgccttatctatttctgcttttggatgtattccggacctctcggtccgatgatttaaggctatgcctgcgggcctatgatgtaataattcgtattaaacactcgtgtatgtgcacttgatattccagctatgaattcgtgtgtaccaaactacttgatccagggaaatggtactgtttacacgattgattcctgttataaaaacgggggtccacagtttctgtaaagtcggctagtttaacagggttagatcgttctagctatgatttcattagtgtttctaagaatggttttgtacctatctctataaagccggctagtttagcacggctaggcaatattactttgtatcatgagtaaagatgctaatctagagtggttgcaagggtacaatatcaatctacgaagataacatgttctatgcttttagattcacgatattcatcaaaaagacaggggcatgtgtttacgcccaaatttggcacataggatcgaaatagggaaaattaccaagatttgggacatctgcttttgatagtcatatttcatccgtccctctaagtcctactccctccatctacttttgatagtcatatttcatcttggcacacagaccaaggataagtaattttacttatcatctatttaaacatgctactccctccatctacttttgatagtcatattttatcttgacacacagaccaaggataagtgattctacttatcgtctatttaaacatgctactccctccggttctatattaattgacgttttgaacaaggttgagattaaacttttataactttgaccatcaataactttaaaaatatttagtttaaagaaactagaacaacatatataaatttgtctttcaaattactataataaaagtaaacatgcatttatttattgtatatattataataaaaaatgagatcaaagatatatcttgtagaccgtgtcactgtccaaaacgtcaattaaaataaaactggagggagtactagtcattcctcgtaaacaagcgattcattaatatttacatttcacgatgcccatgtagccaatcttgtgtggaagaatggaaagtcacgcattaaatctaagaaattcattaagatgataagttgttggattgaaatatgcctatcaaaaataaatttttcaaatttggaaatatgactatcaaaagtagatggagggagtactagttattcatcataaacgagcgattcattaatatttacatttctcaatacccatataaccaatcctgtatggaagaatggagagttacgcattagggtttaggaaggaaagccattaagattataggttgttggattgaaatatgcctatcaaaaataaattttttaaatttggaaatataccttttgatagaagacagtatcacagagagaggaaaaaaactgaacagttacgaggtactccccatctgtacattaatttgcatgtccaggaaaagatggacaagtttaattacacacccatatacctcttcacgaaacaaaccactgacggatatgtgtgcacaattatcgtcacataaggacaaaaggaatctacattatctacctctccggctctccctctcatacaattttgcataggactaactaatgatacaaatgggatttccttcaattctggcctgcgtgagcgcgcatgcgtcatcctagctgcatgtacgtagacatccaacaatcgattgatcatttgcagatatcgcattcgacaacatcgtcctgcatatgtaagttgttttgtattattaacaattgaagagccacgtgttcactctggagatttaaaatattactaagtgagtaggagaaaaggagaaattaatgtatatttactgtgtttaatcatgcatggtgggtttagattaaaatacaattgtatttataaaaagaataaatggaatgatatggttgtatacatggatatataagacatatatgtatacagttatataaacgtaaacaacatttaaatttagctccacgtacttaaaaatgagtggaaaaatatgataatagttgcatatcctatcttactataaaagttgatgctaaataacttttaaaacttaacatgcaagtgtgtcacatcatcacctttactagcaattattatctagagtattttaaatcacatacaagtttgacacatcatcatttactagcaattattatctagagtattttaaattacatgcaattgcgccacatcatcacccactagcaattattatctagaatattttaaatatcatgcaaacataatatatcagttacagttgtatttttagagctcaatatgcgagtgatatcaaattgttatcttcacattattctcatatacacacactatttctataacgtataaaatgtattaattcatataacctgcagtaaaacactgtgtatcaaccagtacaagaggcgtgtctgttttacctcgtctttatcgtgtccctccagacggcgcttggtcttgcatggacatgaatagggcgccaacctagaaacgtggagcatatgccgcagccttgcctgcacatggttgtagatgctgcgcgcgcaggcaggagtgccccgcgcatagtgtattcagtaaattattatactaagagcatgtaactattagccaggtaccaacatattttaataagataaaagataagagagaatagcagcgggctacagatctatagccagctacagcaaagactccaagatgcaatatgtgtatgacaggtaggaccatatactaatagtatagtaagcaattattatatgaattagctattagattggctattagatgaattggagctagtagtgggctatactattaaacttgctctaataactagtagttgtacagtacacgagagcaatttgtggaccctaattaattagggaatgtctatagatcatttgacagaaaaccccctcacaaatcttgtaaatttttgaccacccgattgctttaagattcgtgcaggcaacaaaaccttaaaaatcctctctcctctcccgattccttcaaacacgcccgnccnccgggnncccttgctcagcgcttcccacccgcctccgccactgtcgccgctgccccagcgcaccaccgcccgacctcgccggccggccaaaaggtgtcaacggcgccggctaggcccccccgaccggccccct

SEQ ID NO: 19280 - DNA, 4315 bp, Oryza sativa
  unsure (1)..(4315): unsure at all n locations
agagcacgaatcgtgaagcacatccagtgatccaaaatttgcaagatttgaggtatgattttctatcgacatagctttagcaattccgaattaattaagcttgtagtagggttacctgagcctatgcctgttgcaagatgcaaagaagagcagtataccattcagtatgctcctgattgcccggaagatctattaattatacatataaatgggtgtatattatacacagagggatattgtatgaatcgatatagtactagttagctaggagtatagtgtatatgtatatatagtagtgtacctgggagaagagatcgttccagagagacttgagcaaggagacgtcgaaggcgctgtgctgcgcctcggccatgtggttgagctcgaacatgctgctcaccgtctcccagatgtccttgccgaagttgtaggtgttggagagcagcgagcccgcgcaggaagcaagagaggccgcgaaacgcagcggaaggagcagcgcctggaccagcgggttgaggcagtccaggacggcgtccaagggcgcccacagcgcctccgccaggtcgcccagcagctcgcatacctcgccgcaggcggccaggaggggccccgcgatggccgacagcggagccgacagcggacggagcaccgccctggccatgcgcagcagggccaccatcccctgcaggcacttgcgcaggtggttccggaggaagaggatggtgcccaggtactggatccgggtgaccatgtcccacgtctcgatccagccgaagagcggcccacacacgcgcgccgccgcggccttgagcagcggcacgttcttgtacaggtcgtagaagccgatgatgacggtggccagggagaccagcaggtagagcgtccgcgccaggggcctcatccacggcctgtatagcaggcacagcagcgggtacgactgcaggaagatgacccacgacggcaggccagactccagcagcgtcagcagccggatgtccgacatgatatctccctcagctttccaatttcccgggggggcccaaaagggccgggnccgntcctttggttcccctgnngnaccgnngnagnncagganntncaggcgtgtcggtgtaggaagaagacgaagaaggcgcctgatcatcctcatcatcggcgtcctccttcttcttgtccgactccgacgacgacgaacgtcggatctgttgatgaatcagccgccgcatattactagtactagtattaatattattgttgtccttgtcgtcgttatcaacgacgttgtcttgggacagggagtagagggtggtgaggtagccgcgcagcgcctcagcctcgggggcgcggccaaggaaccagagcttggtgcagccggccgcctgctccgcgctgtagaactcccatttcttcatgtacctcgcctccagcgccaacgacgtgtccgtcagcagctcgttcaggtagttgatgccgtgcacgtctctccacgacacctcgaacactaggaacccatgcagcgccagcctcaggtccaccacctcgaaccaccgccgcgccgccatgctgcactcgccgtcggctgctgctgcggcggcggcggtggcgctcgaggtgttccggccggagcaagggagcgccctcgagtttgcgaatggagacatcctgtactgcaattagagagagaagctagctcgtgaccataagctaggcaggaattaattgaaggtagtactagctagtataccttggtcaccatgaactgccagagtcttgccgatcgagattgcttgctcgaccgccatggctggttatccaccagaatgaacaccttcttgctgagaggtgcaaaatacaggaacgcccgtgacacgtaagattgcatgtccctgcagacaacataattataatcgatgtaaatcatcatcatcatggcattcatgtcgatcgattaatatatctacttaattagttacccgatttgcaaccctgtcaatggatagatatctggcaaggcctccatgtgtgcaagatgtatgtatgccgtctgcctactactaaggttgatcgatctgcaaataaataaagagagattgatcgaccaactctgaagaacttttgggtaactttagctagctagctagttcatgaatgaccggaaataaatactctatataatgaaggaacggaattaacagtacatagcgccatgcatgagccgatatatcgacgatgacttattagcttagaatttaaatccggggattgaaagatgatcaaatcaaagccggaggagtaacaaatataccgagacgagacgtacgcgacgtcgtgcggaagcaaattgataaagagatgatggaggccggacgattgcaaggtggtagttcttgctcttatcaatcgctgcttcgttttcctttcagccggacggccggtggcaagagcaagagcaggagcaggacaggaggccgattgcatgttgatgttggcaggtcgatcgatcgagaggtgagcgaatggccgttctttcctttgtttccaaattaaacctccattattggcaactaccattaatagctgttactgatctcggccactaattcatttttatatccaactgagggcgcactccatcgcaattcgactggccattcccaacccaataacggggatggtgtccatagcattaaataaaaacgatgaaaattgatgtaacaagtaaataaatgaggaaagagaaggaaactaggtcttacatgagacatgctttctacacaacattcaagatatcgtgtgagataagtagcattaaatttaagtatggaaaagtggtgtttgtattgaaagagtagtgtctagtactaagttcttgatggtgtagagttttatattatgtcttatattatggttgtgtcttatattatggaatggagggaatagtacataatcgatttttgcggacaaggccccaataggttgcaggtgggctgtaacctatccctcgtgcaaaaatcgccaaagtgttggattgttcattcaccaataagtaatgtgagctgggtttcatttttgtactttgtagaggtctcataaaccaccatgaccttgctgcttcacggattgttagtcgcctttcctctcaatctttattgggattctaaatatcaaacctaaatgtcatcgtaagagaggtttattcatagtttttattgtttcatcaaccgctatcacactacttgctagctcgttaccctatccctcttttagcatttaccatcattgcgttctatattacattatttcccttgaactctcattttttatataattttgaaatttatcttacttttatttcaaattttaatcaatgtcatgttgtgttctgcgtgcatgtttttttaacataattgtcattgcaaacgccaacgctccctcctttcccgcgtgcgccgccgccccctgcctccgtgcgccgctgccgctccctgcctccgcgtgtcgtcgtcgcccagctgcagctcagtaggcgacgaggtgaggatggggatagggttgatttgtaataggggtattttggtcacttcgtgctagcaattttttttctttttcctaaatgaagtgctaacggtgaagtgaaaaaacgaggtcaaatgagtaaggttagggttaaattagtagctaggcttgggcaaatttgtaattgcaattaaccccacgtcagcgatccgcctctaaaccatcacccccgatccggtcgatcgatcccccatccccactgaaaaagaaaagaaaaaaaaagaggaaaagcagcgagcgagagaccgggggacggaaatggtcgtcgccgtcgcctcaccttcgtcggcgccggggccgggcgccgccggccgcccccacccgacctacaaggaggcaagattctctctcagatactcccccccatcccaaaattatactagtatttttgtcggttgaatcgagcatatgcatctggatgcttcttacttctcacttgctccagatctccttgatttggtgcagatgatcctgcgggcgctcaaggagcttccagatccgatcatctccagccgccgtgccatcgccaagtacatctccgacaacttctccggcctcccttctcacacgacgcgctcctcaccgttcacctccgccgcctcaggtcacagggccttctcctcatgtctggacactcgtaccttctctccacctccgccaccgccgctcgaggacggggacgaggacgaccgcccaagaaagcttcctcctccgcgccgcctcaaaagcgcggacccgg

SEQ ID NO: 19281 - DNA, 5271 bp, Oryza sativa
cccgttgagactgggagtgaagcggggacctgggaggccgcgcaagaatgctgctgctaccccgttgagactgggagcgaagcggggacctgggagaccgcgcaagaatgccactgctacgccgttgagcctgggagttaagcggggacctgggaggccgcgcaagaatgctgctgctgctgcctctcccgttgctccgccgcctgcatctccactgaagcggggtgttggacgcccaaggaagaacgccactcctctagtcaagcctggacctgggaggccgtctggattcaaacgtggaccaggccgccctcgcaagaatgccactcctcctgtgctgtcagtgccacccactgctgctgctgtgttgggagtgaagcgtggccgtgggcgccctagaaaggataaaccattgcaatcttggtctgtgctctctggcggtgctgcaatgactaagagagggcctgggaggccaagaaagaagaggccactggaagctggaggtgttgtggcagcacaggtagacactgcagatggaggtgaggctggagccgttcaaaatggaggtgaagttaggtgtctgctctctgatggtgcttcttcaatggggaacagagggcctgggagtcctaggaaggaggtgctattggaaaatgaacctacagtttctacattggtgggaaagagaggccgtggccgtccaaaaaaggagaaaccatcagcagcaaggcctgctgaaactggagatgctaaatcaatggggatcaagagaggtcgcggaagaccaagaaaggacagttcctttcaagctgtgtttgcagaagctgcaggtcaggtgtcaagagatgtcacagcagctcagcccgaaggagatgcagatttactggcaaggaaggaaccagagactgcagctgtagtttcggtggagaacaaagaaactaggcctgcagatgctgggggtgttgtggtttctgaagagaagacatcgattgatccggtggaggctggaagtgtaatgccatgtgttaatgcagaagttgatcgcatgaactctgacctgcgcactgctaatccatagtgtggctggcgtcagcactcagcacagaagggaggacctggatggctggcactacctgcaggtgtgaatgtgtattcactgatttagctggagacatactgtgaaaactgttaaatgttgcaaccaaaattattactgtcatgctgttaagtagtttctcaagatcaacattggagtatgcttttaatgatatccacttctcggataaatttttataatagtccttaggtagcacatatagttcctttaggaatgactggatatatcatatatgttgcttttagtgcacccagtggtgatgagatgcatcaatgtttacttccaatttgaacatccattagtgtttcattcaatcaatatctctgttttttccatgcctatatcttaagtaattttggtgaatttcctttcttattaattattaatagtaaggttaatctagcaagtatttttctattcattgttgtattgtgcaaattcagcctagaatgtgctcttatgatatgaagttttactgccacagcttgtttgtttatggttattagtatttgtggggtttaaataattccagatatcttttgtgacatagtataggttgtggggggagaattgttggtccatgaccatgaggtctggtgctcttgtcattttactgtgaggattaccctagataccctaatcatgctcaatctgcatgtttctctcaatttgcatagaaaatggttggccctattgtgttgctgagttaatttataccgcttgtaggccgagcaacttagcaaggaatttaatcaaaatctttgtttctctcatatcttcccatatcctatatgaggtcctgcatgaatatttgttctgttcatatgagttttggctgacaagtcatactatactactgcacactagctgttctcacgtggcctgctttggttctgcataatacaattatgtgtttatgaaccgccttcaatcaagctcagttggtgggaggtgtagatgcatgggtttgagtcctcttgaacacaagtgccccttcttcctaataatgatactgtaatgaatagggtttatggagttgaatttgcagcaaaattcagtttatagagaaggttttgttttgttttgaacagtttatagagaagttccattcatcatttgttcagtgcatttaatggttccttttttgtgtactttttttgtacattcttgattccttgttattgtgcaatattttttttgttgttaagaaattgttacagtgtaaggatatgtaagggccttatcttttcaattatgcttatgcttatcagccaaaatttgaattttcaaccttaaatttggagttgattttgaggttttttcatcaaaatttatttttcagcctttgcttttagatcgataagaacacgcatataaaagttttattcacaaattcctcttcgtttgtaaatatgccgtttcgcttattctattccgtgaataagtgaaacgatggttcgcttattctattccgcaaataaggcgaataagcgaaacgatggttcagtaagattggtttgcttggctctctgattgctatggtgagaagttggtatgaaaaccataactttgagtaccaaacaaatcccttttttttgtcttggtccattatcactggcattaccatttgtgcacagtacaatctccaaccaaatattatcactgaaatgaatgttttttagatgaatgttctgggttgtgatattgatatagatgagttatctcactttacacacaagggcgggcagagcacaaagtaaaatgatgattacagaggttggttagcagacaatctttcatttcatttgttatggatggcttgattttccctgaagaatgataacagcctcaggaggtggaaggaacagctaggtttgagtgtgggaaaaaaacattgaatgcgattagtagtacctgctaaaggttttctactttcaggcagatgaagtaagggtttagggtttagggttaaatcagctgagaattattttttttaacaaacaagatacaattgtgttctctgttctagtttagggtatatatataaactgaatgatggcaacctcgcaagaattatttccagataattagactgatgcattgttccctgcgtgccttgagaggtcagcatgttgaactagttgtactatactactacctgctgcttgtgacaacattcttgtttagggggtaagttttggcttgtcacactgggtattgtataggatgtcgcatggaatgtttgggcactaataaaaaaactaattatagaatctgttagtaaaccgcaatgaatttattaagcctaattaatccgttattagcacatgtttattggagcaccatattgtcaaatcatggagcaagtgcttcattgttgaatcatggagcaattaggtctaaaagattcagtcttgtaaattagtcgcaatcgtgcaattagttgttttttagcctatatttaatacttcatgcagatgttcaaacgttcgatatgacaaggtgtaaaattctaggagggatctaaacaggccttaggctgtgtttggaaccatgggttcccaacacgcacagtgcgcataaaaaacggagtggtccattagcacatgattaattaagtattagctatattttttttcaaaaatgtatcgatatgattttttaaagcaactttcgtatagaaactttttttaaaaaaaacgcaccgtttatcagtttgaaaagcgtgtgtgtagaaaaagaggcggaggaacacgaaattagcttttttattcgtgtccgaaaacccattccgacgtccagtgaaacatccgatagtaacttagcttcaatgcttcttctttcctttcctgtactagaatagttcttgtgttgactggaaagttggcttgtgtttgcttctcatgtatgaacaagtacgtgtattctaattgtcgtgtagtagtatatgagccaaaaatttgataggatttcttatatagttaccaaaatttggtagcaaactaaatgtagccactttttttatatctttattaaaatttggtaaggttgaaaatggtatcaaagtgaacatgcccgaaaagaaaagagtaaatgaaagaaaagagtgaatggacggcccagcagcatagtcagcccaagcccaatgcgtaccaaccaacggctgtgatgacgtgaagcgccgagcgcggcatcggacggccagggctcgcccggtgcccttttaaaacccgtatcacttctctcgcattcccaatcccctcacagccttaaaccctagctccgcctcccacctcccttttcttttctagggttcttccgccgccgccgccgccgccgccgattccgatggagttctggggtaatctcctcctctacctctctctcttcccctccctctctccatccatctatattgcgcagtttcggtttttgtttgatttgatttggacgcgattcgtttgatacggtgtttggttcgtgcgcttctcttcgttacggattagacgcgattcgtttcaccatcgagtgttttgggttcgcgcggaatcgcggccatggctcttccctgtcttcgttagggattaattagggattttagttttcatgggccgcgactatttccatcatacatgcgtaaccgcattggttgccgcctttatgtttgcgagaatcatcattttgttcattctgtttctgtttcagttaacacattctgattatcttcagtctcatagttgttatcatatattactacagtacttaccttgcttcggccccatcgtttggcatatttacgaacgaaaaataatttgtgaataaaacttagcgatctaaaagaaaaggctgaaaaataaacttctgaaaacctccaaaatcaactccaaatttaagattgaaaattcaaattttggctgataagcataagcggaaagataaggtcgcttgtttctatgggccatcctcgttaatttactatgctagttgcttttcaactttactagctaaaggcaaatatgaactgtagtatactgtttcattcatgccttcttggaagggaaggactactctatacatgtgtctttccctgattagtcaaagttgtgcaggtcttgaagtcaagcctggacagactgtcaaatagagctgaaggg

SEQ ID NO: 19282 - DNA, 2762 bp, Oryza sativa
ctctcagctgacaagttccctcaaatccagtttgatttggcctttgacaaagagtttgagctgtcacacacttcaaagactgctagtgtgttcttttctggctacaaagtttcccagccggctgaggaagatgaatatcctttgtaatgttttaccatgtttggtcaatatatgtaatgcatataatgtcatactctattttattttcattaaggtatgtattacaatattgttttccttgacctgccttttttgttgttccacaatggattttgattctgaagaagttgaaggtatgattgctactagtgcttgtgttctgcctagagagaatttaacgagcctgtttataatttatttcagatgaagaggaggaagaaaagatcattccagctcccagggcaaatggtaccatagtttctcctttctgattatgattggaatcacagaatccttttgcacctctctttaaaactttataaggaagtacttatgactaaaacttttctaaggcaaagttgaagggaaggaaaatgagcagaaaaaacaaggcaagacagattcttcagcttcaaaatcaaaggctgcagtgaatgacgatgatgatgatgatgacacgatgaggatgattatgaggacgaagatctttctcctgaggatgatgatgatgtgagtaatttatgggtactgttgtgtattattgtggaggattgttccatactaacagtggtgcaatggcctgttataggattcttctgaggatgattccagcgaagatgatgaggatgagagtgacgaggaagatactcccaagaaggtatgtgtatgtgtttgaaggatatagtctgcttgtttctgtgcacttatatgtgtttgaaggatacagttagtttgtttgttctgtactcttaccataaacaatgtgatgacttgcagccagagactggaaagaggaaagtagctgaaattgtgttgaagacaccttcgtctgataagaaagcaaagattgctacaccgtcaggccagaagacaggttagtagctgtgaagctgcgcctgcgatgaataaattggcactggaagtagtgatgaatttgtatcatttggtcctcctgagcaggtgacaagaagggtgtccatgtagcaactccacatccggcaaagcaggctagcaagacccccgtgaatgacaagtcaaaggagaagtccccaaaatccggtggtgggtcaatttcttgcaagtcatgcagcaagtaagtttagatgcgctgtcttcttgttttggagtattacgtaaggaaatgattcaaagtttgcatgaatgcattgtttaggacgttcaacagtgaaatggctctgcaatctcactcgaaggccaagcaccccgccaagtgaagaatgagacaacggatgctgagctgagaaatattggtgtcgtttgagttggttatctgaaatgaaatgaaatgctgcaaactatttggtgttatgagtagtgtcgtgacggtttatgtggtgcaaactatttagtctagaaaaaaaaaatctgtggtgcgaactgagctacaattttattcggtcaaggtcagtggagtgattggtttattttggatggaattattgttcttccctgttattcggttaattcccacgagaaaggattgataacaccacactgaattgactagctgaacaaagtcgtaatatctggttttgccctcggccaaatccgaatattagggtgtgtttagttcgtgttttttgggtgttacattggatgttgaccttagaaaggatttttttgatacgaatgaaaaaaattaatttctaacttgcttggaaaccgtgagacgaatttattatgtctaattaaactgttattagcatttatagattactgtagcacttatagttaattatggactaattagacttaaaagatttgtctcgtgatttacatttaaactgtacaattagttttttaatgtatatttaatgctctatactctgcacatgttacatgtgttcaaattttttatatgagtaagaactaaataaggccttagtgagcattttagtagcggctgagcgcttgatcgtttgctgtctgcagccgcaaggcccgcaactacaggaagttttctccgccaaaaggcagcgacaatgcaccagccttaatatcagacaaacagcctctacccaacaattcggctcctagttggaactctttgttcaccaacacgagatggcactgcagctaggcagtagacacgagagtcattccagtttgttcgcatttgtccctgcccatccttttctatttttcgcctacaatataaccataagtatatcatcattgaatatggaatatttcttctcctttctaaaatatataacttttagccttcacaaccaatcacaactttccacctcttaatatctatgccttctccttaaccaatcacaaccatcacatatctaattttacctacttttttaatactcgtgttcaaccaaaactcaggttgtaataaaattttggagttacaacaacgagagtaacaacagcatttgcagttttacttaataattagtcaacagcatttgtgtaacgagttgtgtcgcatgctttattcacagtttttttttaaaattcaagttctttgacttacactcacccgacccaaaataaatcaacttttatatatctatgtcatcctttttaaagtgttagttttgaacatagtaccctgtaaaaaaaat

SEQ ID NO: 19283 - DNA, 2261 bp, Oryza sativa
aggacgaaggagtagaggacggtgtcgtccatggtggtgatgttgagatggagcacctcgagatggaggctctcgagaagggcgatgatcctgacgggaggggcgcgcctagagagcgtgcgaagaagcacgttggcgccggagatcctagcctccacgtcggccatgggggagttgcagcaggcggcgagctctgctaccagctgcagctgctgcttattttcgtccttgggggagatggaggatgagctgccggcgctgctgccggcggcggcagtgggagagcaggaggtgatgagggagcgcgggctgggcgtggggctggggctgccgccgccggaggccgatatcgatgccggcgagattaggtgcgcctgcggctgctgcctgcgcttcttctgggcctccagcgattgcagtagcgtctgtagctccttgatgaagtcgatggcgccgccgatgatcgacgcctggtcgccctgcatgcatgcaccatattattatatatttgtttatcatttccatttccatttccattagaaatattaacaacgtggagtacgtacgtacgtacccgtttgatgtagaatgcgggcgtgagcgagcggagcaccttgaggtggtcgttcatctgccgccgccggttgcgctccacggcgatgtgcgacataacttaattaatttacttacgaccttgtcgatgcgctagctccacggaccacggcttgcttggcttggcttgtcttggcttggctaggttagcacatatcgaatatgtatatatatgccaatctgccatgcatatggcattaattgtcacaacacaaagtagtagtagtagtagtagtagtagtagtagtagtaagttacggcaggtctatctgcgtggatgcatgtatggagtgtgtgagtgtagaagctcacgtacgtacgtacgtgcgtgtgggcccacgtacgcacaaataaacttgtacacggtcgcatacatgtatgcacgtactatatatgtgacgagatttaatggcagcgcgctgggccggcagctagctcgatcatcatgtccccgtgaccgtgaccaagcgcaagcgcccgcgcccatgcacactcaatgcctccataccggcaactctttggaacctcagcaagtaatctcacgttactcaactcgtgcgcatgctcgccttttcttttttcctccgccacattaattctgctagctagctgattctttttttttattttttttatttttttgaagaagaagatgctagctgattctttttaattatttttatttttttattttttgaagaagaagatgctagctgattcgttgcgacagaggtaaatcaaggaggaggcaacgaacagcagctcgatccattggagtaatgcaaccctgctgattttttactcatgtcattgtctcctcttctcttccgctccactccggcttgaacacctgccacaactgggccgatcatcgtttctccccttcgttttgttcgcaactgggccgagccactaagcttccgggccgatccaaggaaaacggcgctccagctttggaaaaagtacaccgaaggtccctcaacttgtcatcgaattataaaatcatcctccaaccgcaaaaccagatataggacatccctcaacttacaaaactgttcactttaggtccttcggtggttttgatcccggtttcgtccgatgtggcggctgagtcagcgtgggacccacgtgggtcccacatgtcagggtgtacagtcagcacctctcccttcccccttctcccccttcctcttctctctctatttctctctctctctcttttcccctctgcaggatgctcggcaggtggggagctcgtcgaggcgaggtgggagaggacatccggctggctggcgatgcggcggcggcggcggcgtcgtcgacgatgcgggagatgggagagcgtcacaggctcaccgcgcatgcgacctcgaggtcgggccatcagagaggcccgggcggtggcggcgaggacgccaaggcgcgagactccgggtggcggcggcggcatacgacgcgctgcgggcgccggtttgggaccaattagaggagcagagaagattagggccaggccgtcatctcccgacgacggcggcgaggcagagaaagggcggcgcggtgaggagggctcgatgaagaagatgaggagcgtggtgctacgggaggccatggcggggctcccggagcacggcgacagctgtgtgaggtac

SEQ ID NO: 19284 - DNA, 8431 bp, Oryza sativa
accttcggtgcactttttcctccagctttctacgtcccagtccctctaacgtagaatccactaacgttggatgatctggttccaaaagcagataggataaatctgaagctacttacattaaacaatagtcacattgcatacaatcacggattaaggctctgttcgttctgggaagatatgggagattgattctcgttttccgcgcgcatgcttttcaaactactaaacggtgcgttttttgtaaaaaatttctataggaaagttgctttaaaaaatcatattaatccatttttaaaatttaaaatagttaatactcaattaatcataagctaatgactcacctcgttttgcgtatctccccaatctcctcaatccccttctcctcaaacacaccctaagagttcatcctagaaaaagaaattaagagtctaaaaaaaatccaatttgtccataagtttgagaaaagaagcatgttttactgcaagggaattaataacttcattacatgcgaatgggaaaaaaatgcattaccttcagatgcatttctatcactctaacagcaaacaggtcaatcaggggtggatcaaaatcaggtgctaaaaaatattttcctcattagataattggtgtttgtgtcctcgtaaaaaaaaggtgtttgtgcttgcagtttgcttcttctagttttgcatacatataatcagtttgcttggttgttttgttgtcgtgcgtggcaaactgtttgccatgactagtgtaatctaccctatatttcagttcaaaacttcaaatggatcggaaaagctgcgcttgctgaggcggctcaaaaatctttgcgttcatctatgtttttcacagtatgtgtcatttcgtcaaatactccactgtttatcaaattgcaatgtatgtgctcatgcatgtggtttttctaatattaccagctcgcagttattcagagaatgtatggcaatacggaaagtactacttagttactcttttgtacttggattgtttctataggttccgtccattcagtccatggggtagaagctgaagatttttggcacctggtataggtaacaggtctgaatatggcgtaaaatagatatccatcttcttttaaagaaaaatgatcagctctatctttaaagcgcatggtagatagaaccttcaagtttttattaagtcagtagtacaaaagtataaaaagaaacattggcagcatcaacacttacaaatccaatgcaaaggagacggccattgtagcaagtgtgacaaatcaatgaatcatgaggtgtagatgttatcaggttctcccatcaggcatttttgagggaaattcaacaggcttagatcgctttctcagataagcagcgtctatcgtcatctttacagttgcatgtcatgtgttgtcagatggttgctagatgcttatccttctgatccaatttgatgatcttgcagactcataaacccttggtaacaaccaactttagaatctcaacaccctcttctatggctgaatcaatctaggttaaaacaaaacatgcaagcattagactctgcccgtcacaacacaccttcagggtctttacatctagaataataatgaaatttgtaacactgaaataattaagtcaaatacggtgtttccggaaatatggtatcactagagtgattcaatgacaaaaattcgccaagagtgtcacagataatgccataataagtcctccaagtaacttcactccagcagttcgatttctagggcatcgtggcatttatctaaaacaattaagattaaagagatctcaacggctgtgagcttcacggaattggattagtacaccatatggaagttgaccacaaggttaagccaatcttctaatcatacacatgttgcaagcctataactcatctctcatttgcgtatagcaccgcagaaattactaagattttaaatgaagtagaataaatctaggtgcggcttacatgcaggatataaccagggttttagactgttggtcatatgaatctatcccagcaaatgagcatgttcatcgagtgagaattatggaagtaataatacaatgattacttcaaaaaacctcaactcagaaaaaaaaaggaatgacacgaaactacaagtatgcctactcccttccatccccaagaaaaaaaggcaacctagtactagaatgtgacacatcctaatacaacgaatctggacatagagtatgtacagattcgttgtactaggatgtgtcacgtcgtagtacgaggttgagttttttttggaatagagggagtagatatttacccgttctagactggtcttattaaacttctggagcacaaaagctttggggtccatttggccaggtggacatccaattcctgaataaaagtatgaatatcacattaaggaaaaaaaactgaatgccacagatgtcaaacctaccaatccttaatattgactaaattctcggttcttatgaaaatggtatatcattctcttcgccctgataagctagaaaggtaaatattttgtgtcaatttaaaaattaaaacacttagttgcagacgtaaaatagtttcacatagctaatggtaaactaaacatgtataaaacaagggagcatgctaccccacactcagataagagtgtgcttatgtctggtaaacttttcaacagaacgttgcctcaggctatctaaagggagcaaaaaagaacatgtggggaaaatggaaaggtgcatgaagaaattaccactacaaataaaaaaatgtaattaagtaaacaaattggaaaggaagaatatgctgtctcttcttaatgaagtcagcatcttgcttatcaggtcaccttttgaatgacaaattacttcattaaaacacatggttacaaaatcaacagacccattatggcgcccgaatcctcctttaggttgtaaacgaagaattccacagggcaggtccgtgccatcaaatgcctgaaattcacaccagaaaagtcagattgctatgtaacttagcactcataaagattagatattacaatacttaccacaaggacacgattaagtggtagtttataataggcagcaagtggcccaacctgcaataggccaaaaaagacttatcaccaagagtcatcagatcagggtcagtatggtataaccatttttttatgtccagttaaaggaatttctacaagctgaattacacacgacctatcaaagaaataagacatagaagtaaccaaaacaaaacagacatattgagatatcaagttcaagtcatagcaactaaaattctgattgttgataggcttttggttgccccaaccaaagtaaagctgcggacataattgaatttagggggaaatggctcttagcaaatcgttctgattcagttagtaacatcaaaaacattgatgtactccattctttgacattccatagcatccaaatatggtatatattctaaattatctcaaaatcaagataataagaagtgccaggattgccctgcagttatatcgacttaaattagctcaattggactgaacctttttggtcacccataacctacccattgcagccacatattcattctccaggcttgtggccaggaaactctgatgagtaatagcaccacttccactagtaaataagcctaatcctcaaaaagtttaatgtatcatcctaaattggtggtactcaagagacccaccaccaatgacgacaacatcagtgtttctgctgaggcaatcacagtttgacctcaaaccattctggcagttgcagaggatcatagagaccaacctgggtctttgcctcccccagctttgcaagatttaaaataaatgtaggcatgaagcacatatttacccatagcaagtgattaaattacaaaatgcccccctctttcttatgtaactctggtaagtgttgttcccctctagaatttagcctaagctccgccactgcattccccggagtgaatgaggggatttaggtgaagaatgtcgaatacatgtaggacgtgaatgaggtgaaccagtgaactggtggcagcagagtttgttagtcttttgttgagtttgatggaagagtaaattacactcacaatacacaaacttaggtggtggatgcaaataagtatagcaacttgcaaatcgctcgtttggtactacttgcttagtagtaccttagtataacttgtatgggccatttagtcttagttcacacggactaagcaagttgtagtatcagagcgagcaatttataagttctatgtactgtaggcgcaatttactcttgatggaacatatttcagtgccaatactagcttctcatgaaactggcaaactcaatcccgaggctgacagaaaaaaaaaaggcacaacagaatatgacaagatatgctcatgatggaaagcatgaaccatcggtcaatgaccaggacaggggcatgcaactgttcgaagattagtagtggcaataaaccacgagccagagtgatttagttttagaattcagggacaaaagttaaaccatgccaagagttaagggacacgaaatagatttattccaagatagtagggcagagtagaaatcagatattaaaacatggaaagagttctaaaagtgatgcttgcagattcaccactgagattcatatacgtttgaggcttagcgagcaaaacaggcacaccttcgaccattcctgcatcaatggaaagacaacggttccaattcagcccttcgaaccaggaaaacagagtttacataactcaaaagatcaaaatacattctctctgggatcacatatatggagccaaaccttccgcaaatagtgccttgaagtgatgcctggtcggagatataccctgagactgtgcaaacatgtctatcatatcaaacccagcctgcagcgaaatggggtgtcacaggatctgaaaataaatcattgaaacaattaaatgaccaagacaagaatgagatgcaaagcttacattgtgtctggtgcaatgatacttctcaccagggttaccaagaccaacaaagagccatggctgtatcgcggatcatgatgagcaggatgaagataatgaggtctgagaggttgaaatatgacgcttggatatgaaaggggcaagtcttgtccacggctttcctcgcatggctaattacaaacatccacagatccaaaaacagatgcagcagtctgcagcagaaaaccagattattcttccagatacacaacaaaaacaatagtacatatagtaataaaaaatatgataagactcgctcatttattgattttaagggcaatgatgtttcagcaataaatttctttgagtctccaatttgtaggcattgacagcttgattgttagatgatatgtacaaaggaatatctaaatgtgcacaacacctttctaccctaacaacatatagagaacagttgatttattatgcactagtataaattccaaacagggcatggaagtcttcactcaagcctgcttcctcttttgaagatgaggtgagtttctaaaaaatgaaatagctcagaaaaattaagttgtttaattaatcaatgacatacctaacaaaagtagcttgatctcacatcaggatcaccgtagcacgtactccgtagtaactataatattgttgaccgaaagtgaaaataaaagttaaggatgtgttgggtatgactttagaacttggatgcaaattgtgtgaagtgaaacttatgcactagtggagggagcacgattatttgaggagaaatgaagaaacggcagcactagctgaatgagcaaaaatccactccatgagaggagaagataataaaaaggggagagtagagttggagggagaagaaatcacgtgtggctggaatgaagggcggaggcggagtgggatccccgggcagggcagcgtaacgaaggaagcaggagaagaggcggctggacctcacctagctatatataggacgacggcagatccacacaggtgcccgctggtggtggaggcgccggcgccggggaaggcgaacgaggtgggatgcgggaggctgcgagcgatggagaatagtagtgggcttccccttcgaggccggcctttttaattaggcctgaatgggtttcaggcccattaacctactgcccggcctaatatgaatcggaaggggattttattttattttgttgccctcagccgcggaggaaaggggtttagcagtagcagtagaagaagaagaaccttgattgaaatccctaaccccaaccaacctactggaggaggagtactggagtagagagcgagcatggcgagctcccgcgccgccaagcgccccaaggtggatccctcttcctcctcctccgcgccgccgccgccgcccccgcccccgcagcgtggggacgacgactacgtgccgggcaacatcgtggagatcgagctctgcaacttcatgacctacgaccacctcacctgccgccccggtccccgcctcaacctcgtcgtcggccccaacggctccggcaagagctccctcgtctgcgccatcgccctcgccctcgccgccgaccccgccgtactctctcttctcctctcctctcctctcctctcctgtacgattgattccatgctactctaatactacataccaatgcactgcagattctcgggagggcatccagcgtcgctgccttcgtcaagaggggagaggactccggccatgtcaagatttccctccgcggcaatacacccgaccacaagctctgcatcactaggaaggtcgataccaacaacaagtctgagtggcagctcgatggtacatgctctccttactcctcattacacaaaccgatgcttatttctttcactatcctttttattcagcaaatggattggatttgaggcgatgattcctgcatcactaacatttgtttcctgcaggcaccactgtccccaaaaaggaagtcattgatctcatcaagaaattcaatattcaagtcaacaacttgacccaggtgcacctccagtccattttagattcagctcttttacatgatccattccttatcattttcctttgcatgccatgatattgtaatccagaggagccactcacttacccttttatcgtgaatctattcctgatttctgttgcttttgtgctcaactctgttcagtttcttcctcaagaccgagtatgtgaatttgcgaagttgacacctatccaattactggaagagactgaaaaggctgttggagatcctaatctacctatccagcaccgtcagcttatagacaggagtaaggaattgaagattcttcaagtggtaaagctgaatcattcactattcactctttccttatgcttgcttggaccagtgaaagctattcccatttccttgcatatcttgtttagatgtcaaccctatggtatcgattcacgataaatttatctcgtttgttaggctgtaaagcaaaaggagcagactttgaataatctaaaggccctcaatgctgaactagaaaaagatgttgaacgtgtccggcagagagacagacttctgaaaaaggtttgcagtttcatttttttggtttggtaaattcccccttttgggttatgacatgaagggcataaaaagtattttagtgataattataacatcttgttggttttgtcttaggctgaattaatgaagaagaagctcccatggctaaaatatgacatgaagaagaaagaatacaaagaagcacaggagaaggagaaaactgagaagaaaaaaatggaggaagtggcaaaaatctgggaagattctaaaggccctgtcgagtatgtttcatgctcaactggcttcaatttttcattcatttataaactcatctctagaggtatctttgaactacgtgggctaggcatttgttctgatgttcttcgttatgaagatttcctttcaaagcccttcaatctgaatggatacattcacgtacagccaagaggacagttctattaacttccaaccttgattcagtagtacttctatgttttgattgacacacacttccctttaatttttcatatcaatttcctttttgtacttgagtaacactaattaaaacaagctagaacttgatttatacagaatatgttatcactatcacggttaatatgtaagcattttgtgaatccgatcacttcatataaaatgacaggattccttggtcatgcttgcaaccacatgctagtataagtttaactttatgttcctcatctccccttaacttttttcatattcaagtaacttgtgtaatcatattgtttggattcaacacaaatcgaatcccctctatttaatcattgtacattatcacattgtcaccttaaatgtaaaagggaaaaaagaagaagga

SEQ ID NO: 19285 - DNA, 4692 bp, Oryza sativa
  unsure (1)..(4692): unsure at all n locations
atcatcacatttgtgcttgcataaattttatttaaattctctcaggatttacttattgaagctgttgctctcaaatggagttgcacacaaaagaacatggcttccattgagctcgatacaaaggtatgctttgtgagaaactagttactttcataacacaaaacttcttgaattgaactgtgcatatttcttgcattttgattaccttgcagtgacccaattaatctccgcttggaaactttgcaattaatcacccaattaatcacagctgttttacaaatgtttggctgcttgcaataagatatataaattactaaaatactagtttggtctaaagcacacataatttgcacatgttacaccagaaaattgccatatttgcttatgtcttatcccgttccttgtaccgaaacaattcgcacatgtaatcatctgtccttcattaatcatctgatagatatgggagatggaaaaggatgtgaagaaacttgaaaagaatgctattgaagctgctaaagaatatgaaaactgtgagttgatgtttcaatccattcttttgttgtttctaaccactcagtttggcaaatattttggaaagtggcttagggtccaaggcaattttttctttgagtttttgcctttgggttgacaaatcttatgctcactttcatgtcatgctcattcctcaggtctgtttggtttgtagaggtgaagactattcaaaatccatcatgcatctcctgagtagatttttttttgaagtatagctatatcagaaccatgtgagttcttnngctgatnnnttttgnanactgggnnattaattaattncctttaaaaaattttaaattttttccctaaacaacgttagactttagtcccaggcaagtcatgggtattctaacatgtcgtaagttaacaactactctactaaaaaagtgtatttttattttctgaggtgttctaagaatctgttaagtattgactgacaaagttgaacagatgctctcttgggcttttgagttttgaataaagacaactatgttttgagactggtactataaatggtcaactgcggttgaatgtgcctggcaagcttataaaggcctttgtaggaaatttcatttctgtaatgattgagagtagtgtagcatatggcaagttggcaatacattactttcgtgattgattccatttgtctcatgctggcactatcacatgacatatgttcctctaatcaggtaaaagaaaaactcaagagcataagcagcagttgtctaatgcaaaacagcatgcagagtcaatagctatgatcaccgaagaccttgcaaaaaagtttcttgaggtactgtttgaatttaattttgtacttttcttgtcttatttgtgaatcagcattcacatattttagttgagttagcataccaactgtaaaatctccctaatctgcaaccactagatccttttataaaattatttttttaatgataaatttatcacaaaaccttagttaccagatttgcagcatagtttgtcaaacccaaaatcagatcacatgatttggggtttaccagcgatctacctgcacgtaccgtgaaagtcaagcaggaactcaatcaggatgagcttaacgatgttgctgggctgagccagtcaactacaagctcctttacctttaccttttctttttaatataaggccacggttcgatattcaatgaaactttgtggcattgtttgggttatgaacctcagattggattcataaataggagaggtacatccctcttgctaaatcctaggtttgtcaagtgatgaattgcgcaggcagggacacgtaccaggaaccaacagatcatgattctggcaactacagtagcaacaacttgatgttcaaacaaccacgaatggctgaattctgtctgaagcacctatgctctagggtgttagtttcttctcataagaattaactcttctgattttagctcatttagttgttggaatgctccataaggccacagtaaaagatcctcactgcttgtttggttgtttaggatttatgatgtccctctaattatctgctgtttacaactggatttcttatgttgttttctctattacttccagttttcctttttattattatgtgaataatttgagatgcattgccatttactttggccaaaaaaaccacatgtattatcagcatatgctggcacttagcacccacgatcctgcttccactgtttctgtttgcagatgcctactaccatagaagaactggattgtgcaattcaagatactgaatccgaagcaaattctatgctttttcttaatcaaaatgttttgttggagtatcaaagccggcagcgtgaggtacaatggattaataagtgtacctcttttttatttcatactttctttacttccagtgttgcaatatgcataagttgttcagcatcagtttgtctcatcaggaatagcacctagccacccagcaggttttgtattttcagaataggactgggtggtgccttcatagcagttagttgagagacccttattttctcctaatactgctgcagagttgcttctaaacaaaacagaaataagctagagtctgaggtttcatgttggtattattaaagggactatttcctgaagagtattaaaaattttgaattccccatagtgatctccttcaggattcccatgtgggaatatttttccttacagacagaatattgcactatatgctgaaattttgacaaaatgacttttagaaaactaatttaaaaaataaacgtggcaaaaactaattgagaaaatgaacctttgactccgcgccagcctcgacggcgctgagctcttgtccaaggtgccccaggtttgctgactcatcagagctcagctccaagcagcctagcatgttggtggaggtcgtcagctataaacagtgtgcagggttcgatttcgattatcccctccctccacaccttttttttgttttctcttactttcctaattttctttttagtatacttctttttgcttgatttgaaatatttgtttacaaaatgtttgctcaaatagacagaggcgtacatccacatccaatagccagtatttccacatgtaaaatggcctcaagagctcgttgctcgcattcaccatgttcctgttactcgctagcctgctatctcccgtgaaaggcattgatctgttgacctcgccggtttatcctgaccctgccaaggattcgaccaaaatcaactccaatggtgatggtcagtagtaagcacatcgccagatatatacacatacacattatgtttttgtgttctttctcagataatagaacaacttatagttctttcatatattttttcaaattcaaaataaataaatttacaaattaaacatgtcatttatgaaaagaatattagatcaaaataaataaatttgcaaataaaacatgccatttcttaaaagaatatgagtattgtggtggaggaatggaggatcgaactcaacaccacctggtaggctggcacacagctgatgtcctcccccaccatgctaggctagctttgctgatgacgttggtgctgaggcaaaggttcatttttgcaattagtttttaccaaggtttattcttcaaataagttttctaaaagggtcattttgtcaaaatttcggccaccatatgagtgcagagaagatacttcattcagtttttcttttcttatatatttgtcattatactatatgttaataaggtagtatagcagataaaggagatcggagcgttggactatttaagaatgctgcttttgcaacacagtatatttctcatgttgctggttttgttacccataaatctacgggaaatactcgatgtttcacatgtgctatgaaaatgtttctattagaacttaatggcatttcatcataatataatcatgtgatatgttgttttagatttaattgcaacagtaatcggatcgtagatttgttaagtaatttaaaagaaagaaaaacatttgaagcttgcaaatagagcttcatgcgtgcatgcaaaagaggttggcctactgtacaaagagagaaatgtagagcgggtacattgcaaaaaatgacttagaggcttgcatatgcagctgcagcacgcagaaagtgtgagagggaggcaacatgcagcagctgccagatggggatagcacctgattttttgtgttttactgggcgcccaatgcctagtcccgtcctaaatctactactacactgattactttgacagtgacaatacctattttaactgtgtagatagaatcaatatccataaagctggaagatgataaaggagaatgtgaaagatgctactctgatatagaggctacaaaggtctggacattttcatattgtcagctatattaccatactttgtccaaatcttttttggcatcctgcctcacttgacttgactttggcaatatcctagggcaaatggcttccaactctgcgcactcttgtttcaaaaataaacagcacgtttagtcgtaactttcaagaaatggctgttgctggagaagtttcacttggtatgtgtggcagttccttctttgcgttatcacactgttatttgtactattttcagatggcataccaatctgtaccaaatttcctgcagatg

SEQ ID NO: 19286 - DNA, 2107 bp, Oryza sativa
atgtcaaactttgactaagtttataaaaaaaacgtagcaacatctacaacagcaaattggtttcattaaatccaccaccgaatatacttttgtaatatatttgttttgtgtcagaaacgtagatacatttttctatgaacttggtcaaactttgacaaacttaaaacatattacaatatggaaccgagggagcatttaacatctactcaagattagaatggcgttaccgattattttatcattaaaggtgctatttggatggtcctgtaacccgtcttttgttgcctgtttctagccatgttcatcccgcagtgtttaattccatagttcagcctgcttctactgtagcctgtagtttaagggtttccacaaggtttctgttggccttattttgtggtttttaatcaaattgtggcattattttcctcaggcaaacaggtcagttgcaggtgttgagcgctcatcaccaatctggaggggtatgaaaaaaactattagatgcattctagaaaaatatgccttatacttactattattttttgctcctttataggagcgatcagtttcaaccatcctgtaccttgtatcacttcaagatcttaccaactgcccctttcgggtcgttgatgagataaatcaaggcaagccaaccctcacaagtttttgttccctatgcactcaatgctgttataaaatgattactagtttgttgaagcattacaaaggtaactgtttccccgaaattgcaggaatggatcccataaacgagaggaagatgttccagcagcttgtgagagcagccagtcagccaaacactccacagtttgtgacagtactcttagcatttcaggaggcattttcagatagcatctaccaactcccatgtttcttaatctggctataggtgcttcctcctgacgcccaagttgctgcctgatttggaatatagtgatgcatgcagcatcctaaatatcatgaatggcccatggattgagaagccagctaaaggtaatatgtgttctgtacttaggccctgtttagatcccacactaaaatttttcaccctgtcacatcgaacgtttgaacacctgcatgaagtattaaatataggctaaaaatatgactaattgcacagattgcgactaatttgcgagacaaatcttttaagcctaattgatccatgatttaacaatgtggtgctacagtaaacatttaccaatgacggattaattaggcttaataaattcgtcttgcggtttactgacggattttgtaattagttttttgtttgtgcccaaacacctcatgcgatatcttatataatacctgatatgacacgtcaaaactttacactcctggatctaaacatccccttagacattttagcatattctcggtctcaatccatatttgatgcatgctttgcagcctggagcaccggtgattgctggagaacagtaatgagcgtgagtgggcactgatggtcaaatacggatttgagtactgcacttcgcaagcgattcttcaaaagtcaatcgttttacgcggaagcttcagggtattcaatgtgatctttgcttgtaccccatgtagataaattaagtccaaaaaccagaagctccaatgtgctggactgctagccagctgccttttgtgctttgtttattgcagtggtggtttaaacagctactggctgacccttcggcatgtcgttaactcagggacttcataggacaaagtggcgctaaaatcgtgacatgttcccaaccaggttttatcgtttgatgaaggccggttccaatcgcaaaatatatctacttgaattgtcgagggggataacaccgactgacattttcattgccctaattcaaccctacatcatgtccatgttagttgtgaacgccttgttctgcactctgaatctcctggtgaacgatcagttgtacaactgagccgatgcgaatgaggcaggtcttctacaaatgacatctcggacactagcgagtatatgtggtcttctacaaatgacaactcgaacactagcgagtatgtacaaacttgagacgggtctggatggttattatgcgattgagattattcgtacact

SEQ ID NO: 19287 - DNA, 5712 bp, Oryza sativa
  unsure (1)..(5712): unsure at all n locations
cattacaatgaccccgggtgtacatatttatacccatggggagttactagttcttgtagaacaagaaagaaactttcctaaagataaatggaaaacataaagtccttataggacactaaacacacatccctaaagataaaaggaaactaacaaactattcctaattaatatataactcgtcatgccgcatcctccttgaacttggtcacttctggataagttttctttagtagattaatttccttaaccgaatatagtaagaatccgacaactagagacttgataactctcatcggccgatcccaggactctgaagccgacactgactttagaccgatggtgacttcgggcttaccaaattttaacaggtccctcactattatagctcgagcttcgacatttgcttacaataccggcatggacaatcccccacgcctcccccctaaccccctcttgctgaaaagtcaagtgtcgtgatttcaaaacgagcacttatggcctttccgaattggcgttgatgacgtttttctgtgcaatggtagatattagatttttcttacataaaaagtaaaacttttggcctttttgtcgattaagaatacacataattacatgtatgaacttcaggatttaaatcctgatgggaaaattatgcacccatggattaatccaccacataaacgttctttatcatacacagatattactactgacctataagctacttaatttcatcgatgccaatatattcatgggtgcaagttgatcgatgcaagtataattaaaaagaacacttttgagttttgactaataccctagctaagtagctagcatatgaatggccaagtcagaatcgtcatcgaatctgctagtatttgacatcactaagacactaaccactccgatatgaaagatagtactagtatactagtactagatacatgtacaatcgagttggcaaggccccagtggataaagaattaatgcatgccgcgcagcattttttcttgatgaatggacatatttataattaattagttaaactagatcatgcgcatgttcggttgtggctgctgcctgcttgataaaataagcaaataaatatactagtgctatgaatctacatatatttctatctaaatttatagtagtatatgtctaatccagccatttgattgttatattttaaaacggaagaagtaatggttggtcaatgatccccctctctctctctaattaattcattgggaataaactccgctggggaataaactccccatcaaatatatatatatagagagagagatatactatatgtagtattgtttctttccatctgctggagaaggcttctctcagccagccgagcggtggtagcacgtgtactagctctgtgtgtgcgttctttgtggataacaaagagggagaataatggaaagggttttattttttgaaacgaataataatagaaaggataagatagaaggagaaatgaaggagtgatccagtattgatggcggataccgttgtccgtcactcgccgaacggctggtatcccggtaattaattagcacttcgccacttccatatataaataaaatcctagaccttcggttttggtgacttgtctctgtctagagtttgcggtgaaaaacacattatacttctttttagataatggaggcaatcaaatcaaattatatagacatggtttcaatttttatgggcagagttgagagtccacgacacaggggtgatctcataaagtagtcctcggagcagttgcgatagctagctaatcgatcactacgtactagcaactactcatcaagccagtttaattagttcactttgttcttcagtttaatactccctccgtattttaatgtatgacgctgttggcttttgataaacgtttgacctttcgtcttattcaaaaaatttatgtaattataatttattttattgtgacttaatttatcatcaaattttctttaagcatgacataaatatttttacatttgcacaaaaattttaaataaaacgagtggtcaaacgttagtcaaaaattcaacggcgtcatacattatacggagggagtaataactatcattcatgtttattctctctcatgtactctccgatcgcgctctgctgacctagctagataaaacagaaatatatgcattgcatacatatatatactcctataagcaagaggttgatattatgcatacatatatgtattatatatagtttgcatgcatatgcttatttgccgttatgaatcccgtaggtagtcgtagtagcagaaaaaggaggatattcgtcatgaaagatgtgtctgccgtcccagaagttgagtttgacctgatcatcaccagcctgcggtcagaaaatctaacggccacatacgtatacgtatatagattcatcaacaaaatatgcaaaccggcccgatcatcttgagcaagttgacagttgctaatgtgatggctcatatacatatagtttaatttatctagaagaactgacaccgaatttaaactaaacaagagaaaatagaattgataattatttcctgcggtacgttttgacctacttaaagtttgagcaaatttcagaatacccccacatttatgatctaagtcgtagaaaaccaaaggtttaagacgtgtggcacataaccacatgtttttaccccacctttattcaaatcttgattaatttcagcatatattaaacaattttttagtagtgaagatttaaactaagtcaagaacttaataattatttctcaaaaaaagaacttaatatttaaaaatttcattaacattttaagtaaatccgcgttcaacatgcataagtgtgaggttttgtaaaactttagaacatatatatgaaaagtataggacaaataatacaacgcaaaaataacaccattaatttttactgatgatccgcttgtattatttccgtgcactacattagcagacaaagtacgtcatgcatacgaagcaactaccaataattgtgagaaaagaaaacagagacaatgggtatctaatattttttttagaggtaaaccatgatctgagtagtattatatttccatgttgggtggttaattcaatggttgcagctagcattcgctgcatttggcctgcctctgagtgacatcgcaacgcctttaaactaactgcagataagggagaagggagacatgtcatacacctactacatatatatcgtaataatgttatttttcacaaatatatcagagtaaaataaaaagggtcaaaatcacgttaacaaagacagctagcatatactaataagcgatcgaggaaacataggctgtggatactatatgatcaccagcaagtcactacaattaatgttaggaaatcagattgggaggtgttaaaatgttagcactgatcatcttgataaaaagaaaagggtattaggaattaatgtgtttttggaacacgtatgattttttcattcctaaaatattgtacaaaaattatgcagaattaattcatgtgttggagaccaccttacctatgtttgttcttaaaaataatctcggtagcaaataattaatggacaaaaggagtagcaggtttggtcagtacctctcctaagctatgctatgtactacggtacctgactccaccccaccaggccagcatgataatagtattggacagacagggaataatggtacaacaaaacaaaacaaaacaaaacaaagacactgaccaatgggacccacagcgcgggttttgactttttgtttgatttgaagttagaatagatgagatagacgactagacaagggaattggaatgggacgccggcggcgagtcaaccaccggggcagcctcgtcgtggcggctctcgcggccggcgaaccagcgcgctgtacgacgagcgatggggacccagcggtcctcgtgcgccaggcgctccctcatcgccgcccgcagcctcggcaggctcaccatctccgacatggaccgcactgatcccgacgacgacgacgatgatatcatcctcgccctcgccgccgcgtcgactgatgacctgccgccgcttgccgccagcagtgtcttccgctgatgatcatgatctgtctcctcctcctccgtctccttgtacagctccatctccatctccacctccatcgtctccatggaccgaagcagctccgtgtcgagcgcgatgaggtcggaggagttgatctcgctccatcggctcttgaacaccgcgtccgacaccacgatgcggtgcttgtagcggtccagatcagggcagtgtgccgctgccgctggctccatccgcgacgacggaacgcgctcgacgaagatgcccaggaggtcttggtcgccgtcaaagcgctcggactcggacgcccccccggccgggacgaagcgtgcgctggaggcgtacttgaggccgagcgcggcatcttcggcgtcgacgcgcgcgcggcagagagggcagctggccttggactcgagccagcggtcgacgcagtcgaggtggaaggcgtggcggcagcgcgggaggaggcggagcaggtccgcgtcgtcgaagcgcgccaggcacaccgcgcactccagcccctgcctggccccgcggagagccgcgaatcggaagaaaggcagagactcgatcaccggcttggcgacgccgtcgtccgccgccgccgccgggacgaccgtgggggcgggggcggcgacgggggaggatggatggcagaatttggcgtacatgaggagaaggaaggtgagcgagaagatcatggtgaagannnnnnnnnnnnnnnnnnnnctggggcggaacgacaccttgatgcctacgccgggcgtctccggggcggcctcggcggtggccggctgcgctgctgcgacgcaagcagcggcggagaggagggcggcgacgagggggaggcgtgtcgttgtcgacatggacaccgcacccatcgcccggattcctctcttcagtttcttcttcttctcttttctttttcagttcagacgctgctgcctgtagtgtactcagtctgtctgtctgtacatgtagtgtgtgactgacctcctctaccttctcttaatttgtttagagtattctttattataactactcctactaatccagtgtcaactaatgtagtgtcctgtgcagtgggccccagcagatgacgtccttctctacttaatcccccatctctatctatctcgatactattctttctttctttctttcggtgtttctttctgttgtgctatatacgcctgcgtctgcgcttgcaaaaaagttttgtttctgtcctgctaacctcttcctcctcgcctcattctcttcttgttattaaattctccagcgcaacatcattttcatctgcccacttccggtggcaacaaaactacgtccatttgcttcgtcgatggatgggattgtactataactgtcatttccttcacagataagggcgttctaagtttgggccaggactaagcccatcccgctgcatattgggtccaaaggaatacttgtaaggtaaaaataggtataagtccacctaagatcctaatcttgatgtcgagtttaaatcgctcccttaaaacgcaatattcaaatataagacgttagacgtccctcaccttgcattaccaaactacgtaagatccttgtctggtt

SEQ ID NO: 19288 - DNA, 10807 bp, Oryza sativa
tagagccataccgaaaactattccgaagactccgaggacttccgaacactattctatactactccacttagcactatactactaatactaatgtatgaaaagaaattgagcttgcttgagtgtgttgagaagtgaagtgagctcctccttttatagggccggtatgacggttacttcatgcgaaatgttcattttaccctcgtaaccgtcatcagcaatgcatcctagacatccatgtgtaaggggggagggggcgagccgacttgcccctggttcggctgaaccagggtcggctccaaccgacctccccttcagtacaatggctgacaggtgggtcccatttgacagttaaggtggtttccggacgtctacatctgacatgtgggcccccttatccaattgcttgcttaggagtgaggttttctccactttctctttattttatttgataaattcctgtaacatgttattctccaagtacaagtggaagtatattatttgcaaataagcatgcattgtaagcatggctagttcttcattttttttagttatattgacggtcgaaatttgtctgtaacgactgtcaatatttcaatctatataaaaacaatgtttcagcaaatagcaaaataatgtttcaattcactgctatatttgatctatacatagtgaaacatcatgagtacactagctgaaacattgttggtggaacaaaaaatgaaatagattccttaatagagcgtttccggaatatgtgagtgatttgttgcaacggccacagatggtggggtgcttggtgggggaggcacgcgagcgtgcgaggcacggcgggagcacaggaggcgcgggcgtccgattttctcttccgcgatcaggcgcccggcacgtgggattttccgtataatgtaccttaaaaattctcttttttagaccggaccgaaccacctttctggcctcctactccactaggggtgcgtttggttcccggttaaggttggatgagatatggcgatccatattttgctagatatggcgatacagttttttgtttggtggagtgaatatgacgatccagttttttgtttggttgtagggatgaaagtggatatggcgatccattttttttgtttggttgggggagtgggatggataagtggttgcaatcaccctttcattagagatggtaagtttacccctccaaattctccagacccaaaataatatcagtctactaaaaaaatataaatagaaataaaaacggaaatgctacttatcggtattccgtcccaaagggacaaccaaatcaaaaaaattgtaaccatgccattataattttggttttagctgtgaaccgcttctcatctatctcatttaagacaccggtgttgttgggattttttttacttcagacaaaactaaggcaggcttgggaaagaaacacaaggctggcatggggggaggaatcggcgaatcttgcggcggcgaagacaacgctagcgacggcgtcggtggtcattttttcttcccacaatactgcattccaggttcttctcgttctcattcctcgtttcgtcccctttattccctcgaatctagatcccaaatgctccccatctgttctagggttcgtgcgcatggtggctatttattcaggggctgttattccgatcagtgataaccgatagcaactgggattgtctttgattttctagggtttagagttagtggagaagaaaaatagttaactccttggtaatgagatatgttggggcttttttttccggaggctgattttggcaggattagggagagagaggggggcacttttaatatcatctgataccttgcaagtatcacctaacatgtggtaggaatcgcctgatacctaacaggtttcaccttatactacttcgcaagtatcaccggatatgtggtaggaatcgcctgatacctgacaggtttcacttgatacttcacaagtatcacctgatacgtggtaggaatcgcctgatacctgacagatttcacgtgatacttcgcaagtatcaccagatacatggtaggaatcgcctgatagctgacaggttttaccggatatttcgcaagtatcacctaatatatggtaggaatcgcctgataccagacatgattcacctgatacatggtaggaatcgcctgatacctataaggtatcacctgatacctcgcaagtatcacatgatacatggtaggaatcgcctgataccttataggtatcacctgatacctcgcaaatatcgcctgataccggttaggtatcaggttgtcatgccctgaagtttcccccttttccttgctttaaaaatttgttaagtaaatcgtccgaacaaattgttctaattaacctagagttgaatccctaattaataaatgcaattaataattggaaatggcattgtgggatttttcttggtttccgcatgtcacaatacattaacagaggatttttagtggaattttcagagccttggaaagaattttaaccaattaaaaatcaccaaagtgcaatatttaatcccaggaaaatccttttcctctttttcttttcttttccttcctttttctctagatgggccgtcggcccatctctctccccgcgctcagtgccccttcctgggccagcccgctcctcctttcccctccccgaagtcctccctccctccctttctctttcgggcgccgataggtggggcccacctgtcggggtcgtcccctacctctagccgcccacgccccggcgccaaccaccgccgaaaccgccgctccccacgccgcccaccttccccgcctcctgcgcctcaatcgcgccctgcgcccacgtcgctgcccctcccccacctcttcccgctctcgcgcccgcccaaaaatggacgggattcgcattcgaatccacctctctctctctctccctccactccccacatcgtcagccaaataggggccatccccggccgtttccgcccctccctcgcccataaaaacgctcccccaaacctcctctcccatttccctcattcaccgcgctctcccgtgcctcctatcgcgctcgcgccgctcgctgctagcgccgccgctagccgccgcctttggttgcgcgccgccgctgatagagttgccgccgcgccaacccgccaccgccgttagcttcgccgccacaagagctttcccggccaccgcctcacgttgccggaatcccaccggagcgcctctcccctcgcgagccggtgagtttttccctcccctccatctccggccggcaattcaagccgctgtggtcgtcgtctcctctcctaacgcctctccatcttctcctagggtgtcgccgccgcccgtccgtgcctccgcatcaccggtcatcgccgccgtcttcatccttcgcgccggctgccgtgctcacggtgaggagctcctctccttcctccttccctctgtccggcactgggtattattgcgcaataaattgattaaggacttttctttattagtaaaaacacagtttatcttctaaaattcataagtaattcatccaagctccgtttaagtccattcaagtctcagtaaattcataaaaattcaaggaatccattaaaaatggttttgtttcctgtttcagtagtcctatagcatgttttgcttgtgtgctttgtttgtcgcgtagatttcggccgtttcgtcgatccgcggtttctcgaaaacgttgctgtggtctcatcagtgcgagagcaaggcaggtcatgcattacaattgatcatattgtacccaatttacaaatgtcccgcatttctattaaatgtcgcattcttttacaatgtcacgtgggatgggtcctattactcagccatttattgtttaccctatgccattgataacctgggtattaaaatgattagatgttggtttaggaaatgcttagccatgcttagctcaactagcacacaaatggggatcacattattacatagactttgactatgagcatagctttggattggtgccaccgcaatggtgttagctaattaaaatacactggacggtgggctgtgggtacatggttttgctggtcgcacccatggcagttaaaccctgggagacttaccgtgcttaccacaagcgggagtgggtaactgcttgatctgaagtatagctcgaccctttcctaggcaccggtggcgagggtgggcgtgatggagttgggtcggccggggtgtccggttgtccagctgccggattcaccgcggcgcaagtggggaccgcccactgccttttgaggggtgggggtgaaaccttagcgtggtgtggatggttaggggagggttatgtggagggtcttgtcacgatttccccctttgcagtatcatggtgatatttcggggcatggtgacatgtgtggaatcgtgtcttgtgggtacagttgtacacctctgatcagagtaaaactattcgaatagccgtgcccgcggttatgggcgatcaaccagattcaccgtgattagtctcacccctagtttagcttaatgaactggtgtagttcaggtggttggttgggcctgttgcaacgtggtgtagcgttggacagtgtttggttaatattgattaattactacaactgttttactgctttcaactactgtttttaaatgcctgctttgtgcaaaagaacctttagcctccttcggttatatcctgcatcatacctcctcttccgatatgacttgctgagtacagtgggtagtactcagtcttgctctcttttccccataccagagctgaagatcttcctagtgggagctgtcttgtcgaagttggtttcgtcgctgccgtcaaggattgcctgtggagtggagtcgccccgctgcagaagtcaagtttccaagtctagctcgttttattttttccgctgcatttgtaatcttttctatttttgtaaaacatggatctgtatgtcaacaattgtcgtttgtgtaccctggctggtcctggacagggatttcatgcacattcagcttagaaattctggttcgtgaatttctgggcgtgacaagttggtatcagagccaggttgaccgtaggacaagccaactggaaaacctaagagctctctgaacccctttttcatctgcatatgcatttttgcacccggatttgtttcgggaaaatttggggttttgcctcgttggtttgtgggaaaaatcttggtcgttcattcggatcggatctttaaaattagctcagtctagggttttagtaaaattttatttggagtttattcgactgtcagtcgggaatctatcaggtgatatgcattaggtcgtatctatgttcgatggggcaattttatgcgcattattttctatgcatctattttatgcattaatttattggttagcctgttgcattagtatttttgtctaggttcatgaaaaatgttctatgcataaaaatcagccatgcttagttatttatttgagtcttttgttgctttgttcaatttggaatttagcatgaattggttcttatcccttgtctactttagatgtcagtcctatccctcgattgcaagcgccgctccgagcttcagagtcgccgcccttagctttatcgtcttcttagtttgttgtttgctagtttccgtgtttaggtctgctgcttgtgggttagtcggcggtcgatatcatgtgtcagtggtatggctgcctttattaggagttgcgtgcctcttttcagtgttttaatcaagattaagataattgcacttaaatttataagaaagattagtttctaagccctctatttttctctcttttctcatatttctacctatcccccttcagatggtgaagacaagaaatggttcccgtgactccaacaacgctagtggcagcgaagagcatatcagtggagcacgtgccagcgatgcatctgacaacagttcatctccaccgcccgagaacccaacgatcgctcaggtgttggacaatcagactcagatgatgtcaatgatgatgcaacagatgcaacaacagtaccatcaggtgttgcagcaggtgcagcagcaagtacaacagcagcagcagaacctgcagtttggtcttctacctcctcaatccaaactgttagaatttctccgtgtcaagccgcccactttctcaagcaccaccaacccaatcgaggccaacgactagctccatgctattgagaagaagctgaaccttttgcaatgcaatgaccaagagaagattgcttttgctacataccagctgcaaggtcccgcttctgtttggtgggacaactacgtggtgacccgtccagctgggacagaggttacctgggtagagttttgtcagagtttcaataaagcacaagttcccgagggaattgtggcacaaaagaagagagagttccgttccctgcaacaaggaaccagaacagttatagagtatttgcatgagttcaaccgcctcgcgcgctacgcccctgaggacgtgcgtaccgatgacgagaggcaggagaagtttatgtctggtcttgatgatgaattgactaactagttgatctctagagattatgaggactttgagaagccggtggataaggctatccgtcaggaggagcactgtaacaaaataaaccgtaagaggaaggcagctcagttcaggactccccaggggaagagtcagaagcctcgtttcacgatgggacgtcacggtggaccttccaccatgattatccggcagcaccgtccctaccacccgggtagcttcaacaagaaccaccatagtagcagtcacaacaacagtgagcagcacagcctcaaccctactccgagttcactaaagattccagcttaatcagttcagccagctctgccagaatagcccaagaggttgggagaaaaacccgaactctgcttcaattgttacaaacccggacacacggttggaaagtgcccgaagccaagacgtgctggacccaagttcgttcaggcccgtgtcaatcatgcatttgcagaggaggcgcagtcagcaccagaggttatattgggcacattccccgtcaactcgacaccggcagtaatattgtttgattttggtgcaacccattccttcatttccaagcgttttgctggtgcacatgggttctctttagtgaaacttaagataccaatgcgagttcatactcctagaggtggcatgaccacaactcactactgcccatctgtgacagttgaaattcaagggttgatttttccagccaacctcattcttctcgaatccaaggacctagatgtcatacttggaatggattggttgacaaggcacaaaggagtgattgattgcgccagccgcaccatcaagttgaccaatgcgaaaggagaagtggtaaccttccagtctccagtgccgcagaagccagggatcagtttaaaccaggctgctggtgaagaacaagaggtagcagtggagaaaaccactaagaagttggaggatattcccatagtcagagagtatccagaggtttttccggacgatctgacaacaatgccaccaaaaagggatatcgagttccggattgacttggtacctggaactacaccgattcacaagaggccttacagaatgggagccaacgagttggtggaagtcaagaagcaagttgatgaacagctacagaagagatacatccgcccgagcacgtcgccttggggtgctccggtcatttttgtggagaagaaggacaagaccaagaggatgtgtgtcgactaccgcgcactcaatgaggtcattgttaagaacaagtaccctttgccaaggattgatgatctgttcgatcagctgaaaggagctactgtgttctctaagatagacctacgatcaggctatcaccagttgaggatccgcgaagaggatattccaaagacagcattcatcactcggtacgggttgttcgaatgcacagttatgtctttcggactcactaatgcatctgccttcttcatgaatttgatgaacaaggtgtttatggaatttctagacaagtttgtcgtggttttcatcgatgacatacttatctactccaagttcgaggaagaacatgagcagcatcttcggttggtacttgaaaagttaaaagagcaccagctatatgccaagttcagcaagtgcgacttctggcttaaggaagttcagtttctcggtcacatcgtgaatgctcaaggagtagctgaggatccagcaaatgtggagtcgattaccaagtggaccccaccaagtttggagtttcttaggacttgcgggctattaccgccggttcattgagaacttctctaaaattgctaagccaatgacacagctattgaagaaggaagaaaagtttatctggtctgctgaatgcaataggagttttgaagaactcaaacaacggttggtatctgcaccagttttaattttgccagatcagacgaaagactttcaggtgtattgtgatgcatctcgtcaggggctaggatgtgtgttgatgcaagatggcaaagtggtttcttatgcttcacgacagttgcgtcctcatgaaggcaactacccgacccacgatctggaattggccgcagttgttcatgctttaaagatctggcggcactatctcatcggtaaccgttgtgaggtatatatagatcacaaaagtctaaagtacatcttcacccaacctgatctgaatctccgacagcgaagatggttggagctaattaaagattatgatatgagaatacactatcatcccggcaaggctaatgtggtagcagatgccttgagcaggaagagttactgcaacgtcgcataggtagaggaactatgttgtgaggttcaacgtgatttggaacatctgaaccttcgtatagttgagcacggattcgtggctgccctagaggcacaacccacactggtggagcaggttcgcatagctcaagcaagtgatcctgaaatagcagagctcaaaaagaacatgagagttggaaaagcccgaggttttgttgaggatgaacaaggaacaatctggatgggagaaagattgtgtgtacctaaaaacaaggagttaaaggacttgatactgactgaagctcatcaaactcagtattccattcatcctggcagtaccaaaatgtaccaagacctgaaagaaaaattctggtgggtaagcaagagaagggaaatagctgaattcgtcgcactttgtgatgtttgccagcgagtaaaggcagagcaccaaaggccagcaggattgctacagccacttcagattccagaatggaagtgggaagaaatcggaatggactttatcaccggtttgcccaggacgtcatcggggcatgattctatttgggtagtcgttgatcgactcactaaagtggctcacttcattccggtgcatactacctactcagggaaaaagttagcagagctttatttggcaagaatcatgagtctacatggtgtacctatgaagattgtgtctgatcgaggaagccaattcacctcaaagttctggcagaaattgcaagatgaattgggaacccatctgaacttcagcacagcctaccatccacaaactgatggccagaccgagcgagttaataaaatattagaggatatgttaagagcttgtgcgcttgactttggtggagcatgggacaaaagcttgccgtatgctaagttctcctacaacaacagttaccaggctagtctgcagatggcaccatttgaagcactgtatggacagaggtgtcgtactccgctcttctgggatcagacaggggaatgccagttgtttggtacagaagttttaaatgaggcagaagagaaagtcagagctgtcagggaaagattgagaatcgcgcaatctcgacagaaaagctatgcagacaaccgccgaagggagctcgttttccaagcaggggattatgtgtatctccgtgtcactccgctcaggggagtacaccgcttccaaaccaaaggaaagttggcaccacgctttgtgggaccatatcggattttggaacgcaggggtgaagttgcttaccagcttgagcttccctccaacatgcttggcatccataatgtgttccacgtctcccagttgaagaaatgtttgagagttcctgaggaacaagcaagtccggatcaaatcgaaatccaagaagacttgacgtatgtggagaagccgactcgtatcctcgaaaccagcgagagaaggaccagaaacaaagtaatcagattctgcaaggttcagtggagccacctctcaaaggaagaggccacttgggaaagagaagatgagttgaaggccgctcatccgcacctcttcgccagctcttcccaatctcggggtcgagattccgtttaaggggggtaggtttttcacgccctaaagtttcccccttttccttgctttaaaaatttgttaagtaaatcgtccggagaaattgttctaattaacctagagttgaatccctaattaataactgcaattattaattggaaatggcattgtgggatttttcttggtttccgcatgtcacaatacattaacaggatttttagtggaattttcagagccttggaaataattttaaccaattaaaaatcaccaaagtgcaatatttaatcccaggaaaatccttttcctctttttgttttcttttccttcctttttctctagatgggccgttggcccatctctctccccgcgctcggcgccccttcctgggccggcccg

SEQ ID NO: 19289 - DNA, 7148 bp, Oryza sativa
tttgtggcatggcaaaaattaatgaggcagcaaactggaacaggatgggatcactcaagaggcgtgattgtaatggatgatgagtggtggagaaaggcaaaaaaggtgaattagctttatacctgccccttaattattaactagaattagcttgcttctaacacattgtttcatggttgaaattgaataggatattcctggatgcggcaagtttaggaagaaacccttgcagaatgtagatgaccttaacattatgttttctgacattattaatgatgcatccgatcattggaatcctatgagtgagaaccccatcatacctgagcacatgactgaggaggtccaggaagataatcttgtagttgatgatgaagaggtccaagagacccccatggaggaaatgaatgacgaggcccaggagtgccatgaggtttctccttccattggtattggaaagagaagatctcgggctgttcttgacaaaggcaagaaaccaaagatagggacagcacttgttattcaagaacaaatcaccaagattgctgagtcagcctcctctttcacatcaaaaaagtcaaatgaagtaaccgtgcaacaaatcatggatctagttttggattgtggggcagattatggtagtgatgagcattttattgctacagagttatttgtcaaaaaggaccaaagggacatgtttatgaccctaccaaataaagagtttaggtttaattggcttaggagaaagtacaatgccaagtatggagcatgatccatacttgctgttatgcaggccttcttgttatttcataatttctcccatttgaaatatttgtaatggatttggtgtaataatagtactgttagactcatgcttgtttgtctgattgaatggatttggatgaaggctaggaaaagaaatggcatctacagattgatgtcacttggatgaagtttttttttctgtgattgtgttaagttaattagtataatttaacaagtgctgtgatggcgtctacagatataatatatgttaagtttattttttatactatttgtaacaagtgctgtgatctaacaagtgttgttctctttttttttgcctgcaggtgactgacggtgaaagtgagagtgagtcaggggactctactgatggtgaccagttctggaaacttgttttaggtggtgcccaaatagctcaagtttatgctgatatataccttcacaaaaatccaccaaggacatcaattcttagtggcatgggatggttgctagagacattgcggactcctggtgaatgtcattcacagcttcgtatgaacacagatctttttttggacctaaatgatttgttggtgcaaaggtatggactcgaaccatccctgcatatgagtactcatgagatgcttgcaatgtttctgtttacatgtggtggaaatgagtccaataggagagctcaaaataggttcaaacattctggtgaaaccattagtagaaaatttgatgaggttttaaattctttgatggccatggcaaaagattacattcgaccaaaagatcccaattttcgttcggttcataagaggataagagatgatagaagagcttttccccatttcaaaggttgtattggtgctcttgatggaactcatatccgtgtgtcattgtcacctgatgagcaagttagatatattggaaaaactggaattcccactcaaaatgtgcttgccgtttgtgactttgacatgcgttttacttatgttgcaacgggtcaaccgggagctatgcatgacacaagtgttttatacaatgcattaagagtggatgaaaaattcttccctcatcctccacaaggtaccacacttgtattatgctctctatttgtgctgactgtgcatgtgttactaaaatgtatcaataatcatactatgctatcttttgtaggcaaatactatgttgttgacgcaggacatcctaatcgtcccggttatcttgctccatacaagggtgagagataccatttaccagagtggcacagaggtatggaacccaatactccaatggaaaaattcaatcgtgtgcactcttccatccgcaatgttattgagcgatcatttggattactaaaaatgaagtggcaaattctgtacaagatgccgtgctaccccatatacaagcaaaaaatgatcgttgtggctgctatggtccttcataattacattcgtgagcatggaggtgaggatcctgattttgctaggtttgatcgtgaccctaattttattccaacaataccagaacggtacaacaaatacgcagttcctcgaacggcatctgatgagtcaactcccgaaagaagtgcaggaactatggatctcttccgtgatgaactagccaccgctttatcaatttcttggcgctagatttgtaagacataagatgataatgtatctttgttggacttcaattatgaacctttgattaaaatgtggtaccttgtgcggattttgctatgtgcggattttgctcccaactcgtttctcaattgtggcagatttgcatgtgttccattaagatgtaaaataaatattacgataaaaaattagctactcggaggtgcaattccctactacagtagcagcattgccatgcgtgttgctttgcactatgactgtgcgctctccagtctactgtgtagctcgatcgtggccattttggcgttttgctgcaacattacctctcgcagcaggattgaaataggtgcttgcatcgtcttgaaaaaagtctattttataattttttttattttttattataaaaaaattagctattcgagctaattttgtaccgttcttgaaatagctacttgcatcgtcttgcaacaagtctattttgtaatatattttattttttattattgttatggctgtgagaaatattaaacatcactatatattagtaatcaacatccatacaagatccatgggcaaaacagtcctttcactcctcctcctaccaaatctggagctggaccatatgtattattacccaaacaggtgctagctccaggagctccacggtggagaagatttcctggagaggagctcatttttttgtagagtcagtttggtagacttgtagtgccgccatcgctgctgccggcgaatagctggagctcgtctttcgctacgcgctgccaccgccgccgtcttgagcttcatatggaagctttgccattccatcttcctactaggactggatgtatcaatcggtagtgatgcagcatgcttgctgcccggaatttggattttggaacattattacaatgagcagagcagagcatgcattcgattcaactagtcagcaagtaaagcatgcattccatcagacaattcataggtttcaaacaacaccattcattactaactacaacagagaataagccacatcgtaaatcaaaagagatagagaatagaataagccacatcgtaaatcaaaagagatagagaatagagatcgtaaatcaaaagggattgaaaagaacaaaagcaacgcactagaaactacaatctccatagctaaaatatgtcttcagtaccatcaacagttgaacaaatgaagaacaacaaaaaatgaagaactaaaatatgtctttggtactttggccccgaaaaatgaagaacaacaaagaaaaagttgggcccaggcgatggctggtgacggcgcacgcttacaagcagacgagctccgagctagctagtcaccgccatcgtcggcatcgacagtggcggcggcggcagcagcgacgagaggcctcatcggattaactcatcagtgtgtcttgtcgggctgccatggactgatttcaatagcagttaagtatgcatgacacgtgagccgttggattgcatggacggtggataagtgatgactgcacgaccgtgccttcacagggtgaaggaaagcagatccaaatccgatcggtaggaaaaataaaatcttccttctcgaaatcgccggccgcaccgtctcctctctccccggccgtcgctgcgcctcctctctcgctggcgcgccacgccgccccagctccggtcgtcgtcctcctggcccctccgcgtccgcgtccccaagcgagcgctcgagctttgctttcaagctctcgctgagctccggagggtagagatgtcgtcctcctccgccgccgccttagccagaggcaaatccggaatctctgccgctaaattcgaagtacgaattctcccccaacccctctccctaacacacatggagtacacttgaatttagctgcggccagatccagacggctggctacctctccaaaatctaaatcgaaatcgatcttgatgcgcaggcgtctaagggattgggcgccaagccgaagcgatccgcctccgccaccggcagcagagggaagaccgagaagaaggtctactcgctgccaggccagaaattcgacccccctgaggaggtcagcttatttccactcaaccaaatctcatctcatctcatctgtgttgttgcctgatgccattaatttcgtccagagagagcctctcaggatattctacgagtccttatccaagcagataccctccagtgagatggctgaattctggtacgcacaaatttttacaccttttagcgtaatatataaattttcttctatctcaactgttagaaatactcctacccctatatggaatatatatacagtagtagtacatactagtgacattcaggtgtctgtctaactagtggagtactagctatctagtaggattctgacagtaaattcttctaagaatacttgtagcttcaacgcatgaagcttactgctatcaactgactaatatcgcctactcaaagcagacactagtactaaatttggttgcctcatgttagcacaagttcacacatcattctaatgaagggcatgaaaccattcatataaataagttctctcacttaccaatgataaatcctaggtttgtcttacaaactgcagtgatcaattatattaccctagtacctcatccacgaaaatgtacaacaggttgatggaacacgggttgttatctcccgaaagagcaaagaaagcatacgaaaaaaagcaaaagcggcaacagcaaatacgatcaggaacaccaattaaacccagcgtaaagaaagacaaaccggaaagttcaaaaaaaccaagctcatataatagttcagattcaaaggcaaaaaaaagagtcgattacagcgatgacgatgacgatttcattgtaaaactgaagagatccaggggatgatagttttcagataccagcatattcctatagcaccaaggctaataaacaggtgctgctctgaggtttccatggcaatggtaacaaccaaatgggttcatgatgattctggtggaacaacatttctgtttattgtcaatattggagtagaaagaaaaatggagatcctttacaatgataaaataaagtcatattggcagcattgtgtcttatgtaaagacaggcactttgtggagctaaagataaataggtttccctttgctttgctggtgtcgttgtattctgcaatttgtacctgcacggtaccgtaccttacctttggtagataagatttggtttgttgcattgctgttactcttgcattgggaatggacattgttatgctgaagttgcctagaaagaaaagattagatttgttgtgttacttacagtactagagctacggctagagcatgttggatgtgggactctgcactgcagcttaatatggaaattgattagaattacaaagcaatagaggcaaatgagaaaaatggtattgtcaaagggggggactggtttcttgctgttacgttgattgaatattatattatagggacaattgcatccatgcccccactttcaaacccaattgttgttttaccctcactttttagggtttgcagttttacccccaccttttgaatctgaatcagccgtctgccccccacttgtaatagttgattttaacagtgttagaggtagagaaaaggacatttatacccttggcggttattgcatttttgcccccattttttcagctgtgttattttgcccctattttgtgatttcagcttgtgtgattgttataaataattcaaatatgagcatctcttgtgatgtttttgtacttttaacaaaaaaaaatcacaaatactagggaaattacaaaatttgaccaaaatttgaacaaaattttgacagaatttcaacacaactagtacaagtcacatataacaaagtgtccacaaacataactacaaagtgtgtccacggcagtggtaggggacggaaaaaaaatgaggtatggctcatagacacatacatcagagactagaaggtagatgagaacagtatcaatcgcactacggcacgacattgtatcaacattcagcatggcaataatcactgatcacaatccgttatccatttgcaaacaagcctaaatagaagaataggcattgaaaaatacctcaagtaatgaagtttcagtaataaatcacatataggaatcagggaggatagatatacatagaatctgaaaaaaggagagcaaggattgattagggactagggtggattgaatcgggaggaaggccacttgcttctgaggcggtttcacgagtttcagctgatcaaatatctcaagcaacccatgcatcattccaacaacaacgcctcctgtcacagggatcagcagtattctgtgccaagtatcagctagcctctgaaggcagagccaagctgcaccttcgttgggggtacctgcccaaacccattcatggatgatatgaacctaaaaattccataacaggagctatctatagaatcagtcatgcaaggcagaactgaaaaatctcaaccttaacttacattggaatcactaggaaggttttaaattttaacaaaatttatcgtgttttgggcaaccgcagataccgtgtgacataaggcttttcatttactgctttcagtgcactgttaagttgctttgagtttgcacaattaaatgaaactgattttgcatcatttgggtgaattcatttgcactagtttagtctgcacacttccgtcaaaaaa

SEQ ID NO: 19290 - DNA, 13582 bp, Oryza sativa
cctccgtcgtcgtcgacttggatggacatggtggtggcggcggggggcacgtggggccgcccagggtgcttgcccttgcgccggcgcaggcggcagttgatccaggtgacttcgttggccgtctccagggcgaggctgtaggggagcgccggggtgccgatgcggacaaccaccacgtacatgcccacctgcgcgatgttgagcgcgcttcgcatcggcagctcgaacatgtccgtcttggacatgagctccggcacctgccgcatcatccgcctcatgtccttggccatcaacgcccggaagtgctcgcgccgctcctcccccgactccggaacgtggggcgcccacaccggaagggtgaagctgctgctgcctccctcctggtcctggacctcctcctcttcctcctcctcctcgtgctggaggcgcccatggatccctgccaccaacagcagcaggcttaggaggaggaccaccaccaagggaccgggaccggccggcatcatcgatccttcgcttccttccttcctttcctcttcttctttgtttaatttgccaattagctagctaccctcatccatccatccatccatccattctactactccatcctcctgcgcgtgcatgctttgtttcttccgcacaattaagatgattctatgttaagccctgtggccatgagctctttcaggaacacccaccactcctgaattactattttactatatatattcccccttattttccttctacatacatacttacatacaagagaagcgatcttcatctgcatgcatggcattgcctctcctcttcagtcttgcggccttgccagcttatatatatatgggccttttaattacatgggccaccaccgtaatcggaattggaacaagaactgaaaagataaggagtaagttcactataaatccctcaattcactaggcccatcccccggcggtatagtagctggttttggttgacgggatgagtgggatccacatgtcaaccgccaacccttcttcctcatctatttctctcccggactcctcctctcccctctcattccccatctctcgctccaagtcgggaggggggaggcgtgcgacggagagaaaggcggtggtcgacggggagaggggtgacggtcacggaggagctcatcggcgagctgtggcatttccctctccttctccaactatttcgacatcatgctggtggtgctatcgtgatgtgtgaagcaatgcggcccgctgttcaacccgctcatgctgatgctggtggtggtggcccgtgctgggctccctcctcaacgagaagatgcatcttggaaatctactcaacggcgtgctcatcgtcgtcggcctctactctgtgctctgtagcaagcagtacgagcaggggactatgggtcaagacgagttgtgcgaccgcttagggcctaggtcagcagggggccatcatcaccacacctgcccaatgcaggtcacccaatattgctgctgggcaccgaggcaggtcacccaataccgctactattctcggtgccttgagggaagaatgagggaggcagggagacgcggtcgtgtggctgtcgccgatctcaatgagtcgatcgaggcctcgaggacatgacgcaatgcgttgtttcatgttctcacttctaatctcacctcttcctcgtgtcgccattttatctcacgcatcactgtagcgcccgttccgtcgtggcgcctagcgggaaaattatctcttaaaaaccctaattgcgaaatttgtttccttgcttgttgtctagtgtccatgccatctcaagatctcaatccccgatctatcgtcaagttcaattctgaatccaattccttccaaatcaaatttctccgcaaaagtctatttggcctcccccgaggtcgatgggccgaatctcgctcggcccatctccccctcctctccctcgctctccgtctccccatccctcgctgccgctccccgcgctcgttcgcgcgcgcacccgcatggatgccgcccggtcccgctgccctgccgcctgcagccgagcagccgcccggtcccgctagccagcgcgcgcgcccgagccacgccgctcaaaaccaccgcgcctcccgttgtttcccgcgcgcgcgtgccgagtggccgaccgcccggtcgccgccgccgtcaccctctgccgcgccagcccgcgcctgtcgcccgtgtcgtcgcgccgctccaaaccgccccgctgtcatcgccgtcgtcatcgcccggccccgccactccgcgcgcaagccgccaagggacggaggcagcgcccctcctctctctgccgcgtcgcccccgctcccctcctcctttttcccaaatcggcaaaggggcaagcccctttctccccctcctttctccccttttcctcccgccggcgtcattcccctctccctcctgtcgccgttttggccgctagccggagcgccagctcgcgccttgaccgccaaagtcggtttccaaaccgacattgccgccccctataaaccccggcgccctcctttcctctcccattcacctccgcgccattgccgcccctctgttcgccatcgccgttcgtcgttgcgcgtgtcggaggagccagcatgagcaaggacgcggaaggggacttcggccgcgccctctccttcctcttccccggcctgaggccggagagattactcccgcgccgtcggcctctcgtcactgcgccccgcccgcacggtagtgcaaccctccgttcttcctcctcgctccatcttccccccttagattttggtagtagcccgagtagcctccccgtagttagccggcgccgccccgaccgttgccgtcgctcgccgtgtgctcgccaccgtcgccgctcgagcgccgtagcacccgcacgtcgccagcctcgcttggcgtagctccgtccaatccgacgctagcatcgagttcccgaagccgcgtagatgctctcaccgctgggaatcgacctctcgtggcctcgtcgccgtttccctcttctcccgccgccggttgccgccgccgcaatccgccgccgtcgagcaacccccggcaaatccgagccgttggctcgtctccccttgtcctgtacaaccgcccggtgtgctcgcttttgcccgtatcaccgtggttcgctccgccgctcgccgccgccgcccgccgtccattcgcggccgggtcatcgtctacctcccgccagcccacgtggcagccacgtaggcgccacgtcggcgccagctcagcctagaccgggtcgagccgaccccggtcagtccctcccgtgcgcgcgttccaccgcaagccatgaggctgcgcgtgggcccgcctcatcctttccaccgtgaaccgtgcgcgtgcaccgcgtccctttccgcccgcgcgcgtgcgccgcgtgctccctccgcacggtgagccgagccgctgacaagcgggtcccacccgggaccgcgcgtggtgagcccggtccaccggccctctccctctcctcccctctcgcgcgcgcgcttgggccgccttgggccggccggcccgttaagctaggccgagccgccccaaatctcttgggccgcaccctagccgcccgagaaaagtctaatttccatccctcttttctttcttttcttttctttttcaaaaaggatttaattaaatccttttcctttagaccaaaaattcaataatcttagaaattcaatatcttcccaaccgtaaatccgtttgactccgttcgacttccaaaattccccaaatctcgagatctatctaatggcacgcttagaggtcattaatagggctttattttcgccgtttgttgagttgtcccgtttcgcgtgtagttccggagcccgaagacccgcagtgcgaggatttcgaggatcaagctccagatctcgagcaaggcaagccacctttgaacatcttgagcctatatttgaaatttaattatgttacttgcaaaatattatgcattgataggatcacacttaatctgttgtcccgtctgcgaggcagattggcggacttacctaatttgtcgcatttgatccttccattgttaattgctataccatgtccccttgtaaccacccagttgcgcctcgatactcgtgcactctgtgcgagtatcgacggtcgccttcaaacttaaaatctgagtaacaacttgggtaaaactggagttttacaaaagacttggaaaacccaacacttgggtcggtgcttgcgaactaaatgaatttccaaaaccgcggaccgggaaacgtaccgggtgtacagtttcccgctcttgcacttaaggaccgtttccttggaatttcatccgaacataagacaagtacgaccacatgggtggaatgggacacccctggctgagtaactagcttatcaggggagccttgatgctgagagacatgtggattcgccggggtggtgtcggggaggacccctgggcttcctggcacagtatggtctgggacctaacctgttgttggtctgggacccctctcgtcggcatatggtaaacctgtgtcggctttcgaaatgccttgtcatgaaagcttggaggtctcccgacgtggctgatccccacgggctgggtgacccgggttagtaatgtcgtgtgggtaaagtgtaccccctctgcagaggtcattaaactgttcgaacagccgtgcccacggtcatgggcggatgtgaggtgattcctagcgtagttttgtttgactactgcttgtgaaattgctgttgtgaaactgggttcgatgtttggaaaatcagcagctgacgggatcagctaggcccgggtggccgtttgaaaagttgttggcccgggtggccgtttgaaaagctgttggccgggtgccaaccctgtttcaagatctaaagactgatacattgcacatactccgaccggacgagacgcactgtctcatccgtgtcgtttgagaagcactcacttagttgtttttagaaaagagtttaaataaaataaattgcgaaaacaacagcctttccttgaagcctgcattaaacacttatttcccctggcttgctgagtactcccgtactcacccttgctctatataaatatcccccctcagttgctgaagaagataaagcggatcctgctgatgaggagttcttccaggagcaagccggctacgatgagttttagggtttcggcctagttcccaagtcgcgcctgtgatgattggtccaagtcctggcttccgctttccttttgtaatgcagttgtgagctcgggatctgtccgcagcccaacatgactgtacttctactctataataaagagacctctgttgctgtgatattctgtctccctgtgataccagcactgcttcctgggactggtatcgattaacaggttaaattggagcgtcacgggccagttccggtcgggactagttcggggcgtgacaatcacgctaacttgctgactcgccaccaggaaagaaggaagatggccgacgtagcgaaccggctggcgacgtcgtcgcccacgcgccatgcagccacgccttgcccttgtggccttgccttaccttcacgaggcatctgattagcagaaaagactagggcaaggtgaggtcttctgatcttatttgcatctatgtagttcgaaaattaggttatagttttgttttgctctttttgtttaatgaatttagtttatgatttcaggtgttagaaattagaatattgcctcagaagcatctttcaggcctcaccttctggtatacaccaagtagccagcgtgcgggtcttgccttctcgttggctccctagcgtaacccctgcaagccgcttaccacatcgaatccgtagttcccggtctctacaatatcgccctatgcctccgcgctgccctactccttgggggtgggaggaggatgaagattagggtactaacttgtggggtttacgagggttccacgcttactctactgatttgattttattatactaaacttgtcacatcagtaaaacctggacataataccgtcttaagacctcgggtgctctggttttacaagttaagagacatgttatgtctggtattacgggcttgtttggcacagccaaatagtttcagctccacctaaagtgggagtggagttgggtggagctctctcacaaaatgaactagagaggtggagctgggtttaggcagctccacaactccactccaaacccaactcctgaagctaaatttaagagttggagctctactaaacatgccctacaattaaaaaatgtgattaaaacttgacatatctaaagtgaactcattcggaaagacaacaacaaacactcattctgcagtgcagctaggaggaatgtggcatcaccatcagcttctgcattggagtggattttcatccctggaggggatatcctctcgttatttgcgtatcactcaaatggttatgaaaaaattttaaaaaaaaagagagaagatgtattaacatgtatatcacttcacaaacatgcaagttcaaattcaacttctatatctcgcaacgaaaaaaacaaattaaactacaactagttaacagttaacgtatatccacaatcaagtttgtttttttcgttacgaaatatagaagctgaatttgaacttacatatttgtagagcgatatatcacatcttaatacatcttctcaaattttttaattttttttcataatcatttaagtgacatgcatacaacgagggaatatcccctccagggatgaaaatagtttccggcttctgcataccttgtgatgtccctctcttgtctagtactggcatgaatcggcacgcagcactgctgtggctgctgctgcttcatgtcatagtaacagtacattctcatgcaccggtgaccgatgcactgactggtcgtccgccacgcccaacaagaacaactactaggctagtactggaggactatcttttttccgagaaaattactctccatcccttcttatggagtaggagtattaaacaaacagaagaaaggataatgatactctgtttgggagtcctttccctccctttgatgcagcagcagcgtttttgattgcgcatttgcatggcgcgcggccagcccaacatcgcaacgcatcaaagtagggacgatatatatatatatactccgacgatcgatcccttgccttgctcacgtaccgagctgcttcaagaaaaaaaaatcaatggcgtctcagaagaaagcaaggacttgaagaagagctcatagtatggctctgcggcctcagcttgtgcctccgctgctctcccaccgccgccgccttgtcatacctctgcttgtcttgctcctcgccgccgccgccagcgacgagcagctgctaagcctgcgtgggcaggctgctgtccttgtgtccatcaaagacgccttctccccgcctctcccgacgccattgcgcactacctggagcatcgccaacgacgcctctctctgctcctcgtggcatgccgtccgctgcgcccccgacaaccgcaccgtcgtctccctcgacctctccgcccacaacctctccggcgagctctcctctgccatcgcccacctccagggcctccgcttcctctccctcgccgccaactccctggccggcgacctaccgcccaccatcgccgccctccggcacctgcgctacctcaacctctccaacaaccagttcaacggcaccctccactactacttgtccaccatgaacagcctcgaggtcctggacgtctacgacaacgacctctccggcccgctcccgctcccggacaccaacagcaacctccgccacctcgacctcggtggcaacttcttctccggcagcatcccgaccagcttcggccgcctgcaggccatccagttcctctcggtcgccggcaacagtctcagcggccgcatcccgccggagctcggcaacctcaccgccctgcgccagctctacctgggctactacaaccagttcgacggcggcatccccgcgtcgctgggccgcctcgccagcctggtgcacctggacctggccagctgcggactgcagggggagataccgccgtcgctgggaggcctcgccaacctcgacacgctctacctgcagaccaaccagctgaacggcaccatcccgcccgcgctcgccaacctcaccgctctcaggttcctcgacgtctccaacaacgcgctcaccggcgagatcccgcccgagctcgccgcgctcacccacctccgcctcctcaacatgttcatcaaccgcttccgtggcggcatcccggagttcatcgccgacctccgctcgctccaggtcctcaagctctggcagaacaacttcaccggctccatccccggggctctcggccgcgtcgcgccgctccgtgagctggacctgtccaccaacaggctcaccggcgaggtgccgcgctggctgtgcgcgctccgcaaactcgacatcctcatcctcctcgacaacttcctcttcggcccggtgccggaggggctcggcgcgtgccggacgctcacgcgggtgcgcctggcccggaactacctcaccggcccgctcccgcgcggcttcctctacctgccggcgctcaccacgctggagctgcagggcaactacctgacggggcagctccataatgaggatgaggacgctggcagcccgctgtctttgctcaatctctccggcaacaggctcaacggctccctcccggcctccatcggcaacttctcctccctgcagacgctcctgctcagcggcaaccacttcaccggcgagatcccgcctgaggttggccagctgaggcggctgctgaagctggacctgagcggcaacaacctgagcggcgaggtccctggcgaggtcggcgagtgcgcgtcgctgacgtacctagacctgagcgcgaaccagctgtggggcgccatgccagcgcgggtggtgcagatcaggatgctcaactacctcaacgtgtcgtggaacaagctcaacggcagcatccccgcggagatgggcagcatgaagagcctcaccgacgccgatctctcccacaacgacttctccggccacgtgccccacaacgggcagttcgcctacttcaacgcgtcgtccttcgcgggcaacccgcggctggtgctgtgcggcacgcccgcccccggccccgcccccgggacgacgacgcctggcagcgggggggacgggcgggcgccggtgatgtggctggcggcggcgctggggctgctggcttgctcggtggcgttcgcggcggcggcggtggcgacgacgcgatcggcgattgagcggaggcggcggtcggggtggcagatgagggcgttccagaaggtgcggttcggatgcgaggacgtgatgcggtgcgtgaaggagaacagcgtggtggggcgtggcggggctggggtggtgtacgccggggagatgcccggcggggagtgggtggcggtgaagcggatcgtcgacggtgggttctcggcggaggtgcagacgctggggaggatccggcaccgccacatcgtgcggctgctggccatgtgctggagcgcggaggcgaagctgctggtgtacgagtacatggccggggggagcctgggcgacgcgctgcacggccaccaccggcaccacgacgagtacgacgacgatggcagcaatactaatattattgggtcgttgttgttgccgtgggcggcgcgtcttcgtgtggcgacggaggccgccaaggggctgtgctacctgcaccacgactgctcccctcccatcctccaccgcgacgtcaagtccaacaacatccttctcgacgcccgcctggaggcgcacgtcgccgacttcggcctcgccaagtacctgcgcgccggcgcctccgagtgcatgtccgccatcgccggctcctacggctacatcgcgccaggtataagcttactactcctactaggcagctttcaatctttgaccgactaaaattaagggtatgtttggtagaactttaactcctaaattttgctataaaagttaggtctggtgtggagttgactaaatccagctccacctctctagtttattttataagagagctctatcaaactctgtttctatttttggtagagctgaaactatttggctgggctccagttctaaaagagatggaaagctgaagctgtgacaaacagtcccttactccactactctagactccagctactagctagacggaccaatcatgcatccatccagcattccatattggacggacgttggtggtgtagtgtactagtcgtcgtacgtggtgctaatctcctctcctactacagttattattattattagggtgtgcgcattcttttctttccatgcaagcatgtactccgtactgtgtgtcaccacaccacatttggcctgcactgcatctgcatgccattgccagccaaaggaaaccaagcagcagccctctgctgcgtctgatgatgactagactcctcaaaggacgagcctttctttctttttcttttctttgctgcatagtagtacggatgcatgcatggatcgactgaatctttcgctttcgcttttacttttactgctagtacatgtcttgcggttgatgatttgcctcaatgagtcgtcctcctatcctacctagacaagcgatgcgatgcggcggcagcagaacaacaaagccttgtttgcttttaaacagagtctaaaaagaatgaacaaagtctcttttcatttggtctttcttcttcacaaagcatatgctcctcttttagttagttttttttaaatttctgctgattaattgagtatataaatgtgcttttgcagagtatgcatacacgctgaaggtggacgaaaagagcgacgtttacagctttggggtggtgctgctggagctgataacggggcaaaaaccggtgggagagcacctgcagctgcatcaagaggaggaggaggaagcaaatacgacgacgacggtggtggacctggtgcagtgggtgcgggcacgctgcggcagcggcaaggacggagtgtggcgcgtcctcgatcggcggctgggcggcgacgtgccggcagcggaggccacgcacatgttcttcgtggcgatgctgtgcgtgcaggagcacagcgtcgagcgccccaccatgcgcgaggtcgtgcagatgctcgagcaggcaaagcagcagctcagccgctgccaccctcctcctcctcctccaacatccacgtcgatcgaccatgcatgcatgatataatatgatatgatatgcctgctactgtatatgcttagcgtacgtctcctaattgccttgctaataggagtacttctacaccacatatgcatatgcgtgcggatcgtttcgagccgacatacatgtccaacggatgctcatatgtctgatgacaacgtacgatcgagatatatatatatacgacatgcatggagctccggccggccggcttgctgactattaggaatactttgccatatatgtacatattgtattgtattgtttctttccttgtattctcctctaattgagaatcctgtacatgtgcttcctatattaatacatggccacccctcccattgggtgtgtggtgttctccccattccattctacatggtatcagattccaagttttcttctcctcttccgttgctctagcgctgcttcctctccggtcgctgcgtccaccgagcgtcgccgcctccctggctgccgcgcccctcttccctcaccatgtccacttcctcggctacttccgctaccaccgactccgctacggtgttgtcttccacctctaccgtcgccccggttttcgtcaacccgtatgcgaccgtcgccgtcaagtcccatgttccgatctccctcgagcttcataaccccaactacaacaagtggaaggccttcttccgctcgatgtgtgggaaattcggtctcctcgatcatcttgacgctgctcctcccgccaaccctgacgccgcctgggaacaggccgattgctgcctctgcagctggctcttcggctccgtcgccgacgacgtcctcgacctcgccatggagcatgatcaatcggcccaggacttgtggatcgccatcgacaacctctttcaagccaacaaggagcctcgcgcgatctatccgcatcacgagttccactccatgacccaaggcgatctctccgtcgccgactattgtcagcgcatgaagacggcggctgatgccctccgcgacgtcggccaccccgtcaccgagtcccagctcgtcctcaacctcctccgcggcgtcaattcgcgcttcaccagcacggccgacaacatcgcgagcgcccctatcttgtcatcctttgcctctgcgaggaacatgctggttctcaaggagcttcgcaacaccaactcggtacaagtccagtccgagactgccctcgtcgcagccaacaacgcccactccaactgcaccgggggcacttgccactcctctggcagcggtgggcagcagcagaaccgcgccggcggcagcaagaacaagggcaagaacggcggccgccctggtggacagaacaacggcagcaacagcttcggcaccagcactttctccatccctgctccacgccaagctgcaccatgggtgtgcttctcgccctgggcaggacagcagcaaccctggcgtgctcccagcgccgagatacttgggccgtatccttaggctcacattgccttcgccgggccatactcctcgccactgcctgcagggtctgtccagccggcttgggaccaagctggccttgtcgccgctctcaatggaatgatgctttacaaccccaactcgtgggttctcgacacgggtgcaacttcgcacatgtccaccgacggtatactcgttactcgcctccccaactcacaaacttatattaccgttggtaatggtcactccattccggttgtttgccgtggcacttcctttctccctattggcaccactagatttgaccttcatcatgttcttgttgctccctctttggttcgcaatttactctcctttcgccaatttacccatgacaataaatgttccattgagtttgacgagtttggtttttctattaaggaccctcggacccggcgcgtgattcttcgttgcaatagccatggcgacctctacaccctcccgaccgatgcaccttccatcgcctcccactgcaacctcgccacctcctccacgttatggcatcgccgcctcggtcatccgggtccaaccgccgtcaccactctccaacatttatccgccatacctcgctccaagacaaataattccctttgccatgcttgtcagttagggaaacacactcgtcttccttttaataagtccacctccagtacctcttctccttttgaacttgtgcactgtgatgtatggacttctcccgttatgagcatttcgggcttcaaattttatttagtgctagttgatgattttactcatttttgctagacgtttcctctttgccacaaatccgatgttcatcgcca

SEQ ID NO: 19291 - DNA, 10278 bp, Oryza sativa
ttaggtgctgatgacatttcatttatttcaagccgatgtcatgcgtacatcgatcggcaaatatcaataagtaaatcagaactaaatctactcgatcggctatagatattaatgatatataatccttatattgatatatacttaaatcaagtgattgggatagatcggtcgtcttgccgagacagtataaatcacttagatcaaaatatatattaatagtgggattatatacatttatagcatagccggtcaagtggatctagcacgtatcggctaatgctccgatactactctatattaagatgttaaagcaagtagaatataccaaacagaagcctaatatacctagatgcgacaagatcctaacataaagggcagatttaacatatagattaagcatatggaataaaagtagttaaatcagataagatcggctgaaactccgatactaccctaatcggcaaccagaaagtaggctagagattgcaattctaagcatgacttaatagatcaaactcaattgatgcagcattaagtatgaaaagaagaacaatatctagacaatcaagccgctgaaagtttcatagagtggtagatatatcacataatctaagttaacgtcattatgtaacctaatcggctgccttccattaacagatgttagccgattataggttagataaagatattatcaaagattatgtgagatatatgataactcgacgaattatatagacaagattagagtatcataaagatggaagcactaatcctgagaacataagtcatcatgacaagttttacctctttgttgaagatcgaaaccgatgcagctcaacccgagagtacgaactcgtcgaaataaaagtaaagcaaaaagggtggcgatgcgccgagattgtattggatgtctctttttttacatagggctcgggtctacttatacccgagaattacaagatacgtccataacggacacgactattatctctaacaaactctaagatactataagtctttacggcagacttttgcccaaacatatctctaaggaaattacacagaatatcctaattaatagatacaattgccttcccaggactctatccatgcgtggcaatcatcttgaagcacatcaacttgaacccgacgacatacgccgagtcatattatcggaatcggctgtattggctagccccgtccgactcgaactctgccgacctgaccttagccgatttggactgcagccgattcttactctgcttccgcaacgatcttcatcttggattccacttcgatctgatcttcagctccgatgccaatagtgatagaatttaccaaatttggtcgttaacacaccctcctattgggccgaaggtctagccaccgccacatacctcctgaaccgccgaccctcgtcctcggtaaacaactcaatcccattccagcttcttcatcgcaagattcccgattattccatgttacgagtgtttgggtgtttatgctatcctaaccttagtgccaccgctgcccacaaacttgcaccccgctccaccgcttgcgtctttttgggctacccctcctcgcacaaaggttatcgctgcctcaacatatccacccgccacatcattatttcgcgccatgtcatttttgatgagacacagtttccattttcgggagatcccgtcgatgcttcctctttggattttctactacaggatgctcctgctccctctgtggtcgctccaccactggctggtgttgagcagccgcacctgccgcacgctccgttccctgtgaacgttgagcagcggctacccacgggtgctccctcggctgaggacgagcacctgccctactacgtgcagccgcatcacactgcgggcgggacgacggcaagttccacatagccggctgccatatctccatcttcctcaagcaaggcaccgtcgtcaccagctatccggccgtccacgtcttcttcacgaccagccggcacggtggcgccattcccgtaccactaccaacgacgaccggcgccgactcctccaccccaagtcgtcgctccggctgcacccacacctccccagcgggtccacaccatggtgacacgctccaagaccggttctctcaagccagtggaccgactcgtgctctcggcatcccacagcgccatttctccactgccggccaactaccgctctgcccttgccgaccccaactggcgtgcagccatggccgaagagttcaaggctttgatcgacaatggcacgtggcggctcgtccctcgtccacctggtgcaaacgtcgttaccggcaagtggatcttcaagcacaagttccactccaatggctcgctcgcccgtcacaaggcacgttgggttgttcgtggctactcccaacaacatggcatcgactacgacgagaccttcagccccgtcgtcaagccctctaccattcgtgtcgtcctcagcatcgccacctcccgctcctggccgattcatcaacttgatgtgaagaacgctttcctccacggcaccctcgatgagacggtgtattgccagcagccgtccggcttcatcgaccccgctgctcccaatgctgtgtgcctcctccagcgctccctctacggcctcaagcaagcgcctcgggcttggtaccaacggttcgctacatacatttgtcagctgggtttcacgccatcggcctccgacacatcgctcttcatcctccaggacggtgatcgcctcgcctacctgctgctctacgtcgacgacatcatcctcacggcctcctccactgagcttcttcgccacatcacggctcggttgcacaccgagttcgccatgaaggatcttggtgacctccacttcttcctcggcatctccgtccgtcgcacacccgacgacctcttcctatcccagcgacagtacaccgtcgatctcctgcaacgagccggcatgtttgaatgccacccaccgccaccccggttgatgctcgcgccaagctctccgcctcggagggtgcccccgtcgccgatcctactgagtacaggagcctcgccggtgccctccagtatctcaccctcacccgtcctgagatcgcctatgccgttcaacaggtgtgtctttttatgcatgaccccgcgagcctcacctcgcgttggttaaacgcatcctgcgctacatcaagggctcactctccgccagcctccacatcggcaccggtccggtcgggtctctgaccgcctactccgacgcagactgggccggctgccccgactctcatcgctccacctcaggctactacatcttcctcggcgataacctggtgtcttggtcctccaagcgacagacgacggtctcccgctctagtgccgaagcggagtatcgtgccgttgctcacatggttgccgagtgctgttggctctgccagctactccaggagttgcatgctcccatctccaccacgaccgttgtcttttgcgacaacgtcagtgctgtctacatgaccgccaacccggttcaccaccgccgcaccaagcacattgagatcgatatccactttgttcgggaaaaggtggctctgggacaggtccgtgtgctccatgttccatctacgcatcagttcgccgatatcatgaccaagggcttgcctgtgcagatatttacagattttcgatccagcctttacgtccgtgatcctcctgctgcgactgcgggcgggtattaggaatactttgccatatatgtacagattgtactgtattgtttctttccttgtattctcctctaattgaggatcctgtacatgtgcttcctatattaatacatggccacccctcccattgggtgtgtggtgttctccccattccattctacactgacgatcgacctgatctgatcaatgtgtatattaattttatatatatatatatatatatatatatatatatatatatatatatatatatatatatatatatatatatatatatccaagagatcaatgtccctacgtacctactccctccgtttcacaatgtatgtcattctaacatttcccacatgttaatcattaacatcaatatgaatatgagaaatcctagaatgacttacattatgaaacgggggaagtaactagctactactacctccgtttcaggttataagactttttagcattgctcacattcatatagatgttaatgaattaaggcacacatatatgtctaaattcattaacatatatatgaatgtgggtaatgctagaaagtcttataatatgtgaaagggtcaattaggcctagagggggtgaataggctaatttaaaattttatgcggaagctaaaactgagttagggtcagaaagtctgatccacagtcagactatccgaaaatatcagatagtctgatgttggatcagactgtctgatccactaaagtaacactacaagtagatctagtgcacaaacaagaatatgccacaaacagcgactagatctatagcggcacaaaaaagcaaagctaaatgaggggagaagtgatatcaccaacaatgaagttcaccgagttgtttccggagttcaaatccttgagggattctactctccgttgaggagctcactaagagccgggtctttgctaaccctttcctcaagaggttgcactaagcactcctccttccactaaggggtatctctttccttgctgaggcgagatccggccttcacaaacttctcccggccaaccacacgtagatcggtggctcggaagtgacacctagccgtctaggagtcctcaacctccaagagtaacaaacaccacacaactcttggtcaaaccctagtgctcaagatcgagtgaaacacacactaggccctcaaacaccaaatccacaaccaccaagatccaccacacaaagaacaaggagggatttgagagagggagagagagctcaaagatccaaagcaccttagcaccaagctcaacccaaagtgaatgagaatgaaatgagttgggtaaccctagaaaagggttaggtggggggtatttatagatgcccctaaaatgtggccgttgggagagaatcttttcatcccacctcggaaagtccgaggtgacatcggatagtccgatgtttttgacacccaagcaggccagagacaaagaacgaaattctggagaatttcggacaatccgatcgatcggatagtctgatgtcatatcggatattccgttatttttgaaccaagaatttcatcctctcacagagactcaagttccattgaatttcggagtctttgggtcatcggatactccgatcacatcggatagtctgatttgaaactcactcaagaggaataaaaagcaatttaaaacagagagtgaagttctgggaaatttcagatagtccaaagtatcggatagtccgaccttatattggatagtccgatatttttagccaacactcagaccaaagacagagagcaaagttctgtgaaatttcggatagtctgagcatcggatagtctgatcaagatcggatagtccgacaggaataaaacaggaacacttcaaataaatgattttgagcactagtgttctaccaaatatatgcatgtggtatccctcttaatagtacggcatcctaatactcaagaacacaagatatacatggattagaagacaattaccacaaaagatgccgcaatacttattgtgttgacatccactcctttttcatccttgcatacatctcaacaaaaagcattagttaccctctaattgtgttgtcattaacaccaaaataaatgaggggtcctagatgcactttcaatatgaaatggggaagtacctcttttgatcgagatggtatgatgttgggtcgtatctaaaaaagtttcaatatgcggagactgagaaagcggcttgatatgcatgtagtcctaggcaaagtggggcaaacccagcccagccgagcaggtaagagggcctcaatctcccctccaacggggattgataggcccgggccattaatgtctcaactgaaaaaacgggtataacgcatcctccatcttcaaaaaccggtacagatagactacttcaattgtttgagaagtgactacactgacgtagcaagtttaccgcggtttgagttagcacagggcaagtgtccaccttgggttcgatgctcttagagaacaaaaaaaactcaatgtcagtggaggaggagatcagacgggtgttatccatggccatccagcaacacctcagcgttgaaatagaggtagtggccagcgtcctgagggacccgaggtctggtggcaaagatgacgacgagagtactaggagcaagacacgagcctttgacgctactacccaagccacggtggaggaagacgagttgacaggtgccgaggagcaaggccatgacgagattagtcggagtgaggtgcatggctctagaagcaagccattgccaaggagcaacgtgacgatggtggcagactcatgtactcgacggatgggccaccaacacgagctcgaccatagtgccagatctggaaagagggaagaagaggtgggtagaagctcgtggtcatcggggagaaatcttttgggtggtgggtgtaagcgatgttagtgaagatggccactcgcacaatctaggctttgccgccgtccgccactactgatcttcaccacccatcgagttggcaaatggcgagcgagacacgagcgtgcagtggcagtggctggttgacaagatgtgagcagctctcggacgaccggtttgacaagtacaagactatgttcggtgatggtgtaggggtagcgacatgggctgggtcgatacagagatgatcttggggttaccgagaggcacgacaatggaacctgcaagggtggccaccaagacggggttaattttgcaacaaaaatctcaaatagggatgatattttgtaaaaaatgagaatgtgatccttggttgagcctcgagttttttatagtaccgagcaccacctcagcctcgagctcaacctcctcctccttgtggcgtttagcgagctcccttttgattccgctatgcctccatggctccatcaagagaggaggtagagagattgagggagggagcctggtaaggagaaagtacccctggcatgtgggtcccacattatttgtcctaattttttccctaactaacattgacaggtgggtcctattggtatttttattatttattttgtgtttaatgtcacgtaggacaaaactgctatccaagttgttttttgggtggtaaattcactcgatttaaagagttgagggagtttttatatcgtgttttatgattgagggatacgaatcaaactctaaccacagttgaggtgttataaaaccgaccctattctgtttctgatttgcactaattgaaagtcggagttataaaataaaagaaaaattaaaggtagagagttcggagagaaatacaatttatttagaaagagagggacggtaggagagaatcttttagcgtccaaaatctttctgtcgtgtatccgtcttcccctctgcgtcgaaggaaatctcccgtctcgtcgtcgctccttgcgccgatctccatcccgcgagtcgcgagcagagagcaggggaggggaggggaggggcgcagtcacccgtcctgctgcatcctggtgaacatccacatcctctctctcccacctacttttatctcgaatttgcttgcgttaaccctagcttctcttctagatctggaagaagctcttcgatctcttaatttcagagccttaaccttactacaagtaacgatttgtttgttcccctcaaaacccccatgtcccaagttggatccgcccctgctacttagcacctgttcctattctctaccttgtacttacggtagcacacctcataaggccttataacaatacaacttaaaaggataggtatgccctgcttcaatgtgaagctatgttcaaaatacctggctcaatgtgcaattcactatctgtttttttttacccccaaatcatcatcaacaacaaaaaacaatctaactcctgcatccagcttatgttgtacgcgcatgcgccaattacaataagaagagatggaaatttctttcaaactactccaggcattaaatgaataatcaatcctaaacatgcaagtatgacaggggcggatccaggaacaaaagattgggggggctcaattacacagtttctttaacctccagctatctagggacctttagtttatcattcatggtgaaaaaattgaagggggtgctccgggggtatccatgagtcttgtgggtgtaggggggacttgagtcctgggacttgagtccccctgcacccacgttggatccgcccctgagtatgactagctaacatttttgggcttccaacacagtagtcaactacttgtattttcctgagctccccctttatacaaacagtattaaatactataaataaatttctctctagtaggagtatcatcttatccattgtccgttgacagttatttgcattgtgttaaacagactatgctctttctaatagaggtaacatagttggatggatgatgtttatggaaggatagaggtcttcccccagcacttcttaccatcacaacaatccatggagacccctgctgatggtctctccacaagtaagactaacctggattctccaccaaggtgatactttcaaccaaaggaattctctggctctgaaattattttcccccctttcttactgcaatagtatgttgctcttgtcatgttaacagttcacgtagacgttcctggactccgaaacgagtaatgggagctgcatcacttttgcatttattgtctcttcctcgcataagatggtcttccagcactgaggatgatgacaaggttaatcaagtacttcctagtgtagaaattttacatcatgctaccgtgatctctgtcttatatagcacaagcatttttcattggtaacagattgagttaaccagagctgaagtagaatcattaagaaccgagattgctgatgctgaagagagggaatctcagttaaaagctcggtacggtacattagttaaccaagtttattgaccttattttccaacaatgtcacagtatgtaagcattttttttcccgccatatgtgattgatatagtttgtgtcttccaggttggaaaatattgatgaagttttgagatatgcacggctctctgggtatctctatattagaagtgtaagaaacctttgcactttgaccttctccccattgcttcactcttgtcacgtggaggctgatatgatattttgttgcatatagagatggactcaacttcctggagagccacctattctagatgatgctgatgtcgatgattggcttcctcggtttgttgttctgcaagggcaatgtgtatactattatcttaaatctacaggtaaatattttgttatggagtatgtcatgtgttggtcactcaatcacacattaattagtggcgggtcaaggatttgaacatgaggcggggcaagaggcaatggcataaaagatgacaatatatattctgcatctagggtaatagagcatatctatatatattacatatgcgtttaggcatcttaggcaacacaaaagaatattttgccctaactgtcttgtaaaagcaatctaacattcttttgccttttcattagtctgataaacacataaattacatattcacaaaattacccagcaaaaatgtctaaccaacattccagtatccactaagatttcataataactaaaagtgaaccctaagacaaataacatgcatactgtgatcttctagaggcatggctaattaaccgattgatcacagggatgactcctggcttgtttcctgctttagcccattagcagttggctgcattagagcttagataatacataatttggtacttagctggtttggagaaaaaaaattgttggggtggctctgccactaaatacagtcgaaacatatgtacttaatgccccagcaacagcatattttgccgggtatgctggaatcttgatacagttagatcgactaaattcataaaccttctagcagggtttacaaaaccgtgcggttatcacgtgcgataaccttctcagtttttgatacctcacgataaccacgtggttaccacggtaaccgccaaaaccgtggggtggcagtaaccccaccccaaacggtttggtaaacc

SEQ ID NO: 19292 - DNA, 1005 bp, Oryza sativa
agtagaaggagacgatccaaagcagctaaaattaattccgacaagtgcagccgcgactacggcgcctctcttccaccttggcctcgccctccccctacacacaaaggctgggccttgcaccttggatcctttcctctcctcctcctcctcctcctcctcctccaccagctagaagcttctagaagccaaggttccttccttcactggcagctcgtcctctccaggagttactttaatttgtttcttcctcttactacttccttggcttgagcaagtcgccttcttcgatcttggcaaacctccctcgcactcttggctggctgtctgcaagagccttcctgcaagcatactgcaaccatgccaaacgatgcatcagtcagtgtcagtcagtcagtcagtctccttgtttgtactattattcatcagcctcaatcagcttctctaattaatcatgtagtagtaccttctctgtccttatgttctcttttttcttttctttgaaaaattaaaaaggaagaggacaatatatagttttaccttgatctttctgccaaagtttctcttcaccttcttctttctgtacctagatagcttctgcttcctttcttcagatttcaggtcactgatggttacaagcctctcgcaagatgctaattgagcgtttcctgagttcccgggtcgaggggtgctagctccaagattctgttggaaagacaactagcatcgtaagtacaattcttcaacaacctagcagggtctgcaaatgtttactcgaacaatctcacggcctttctaaaataatacagtatataaaaacaaaaaaccataggatatacacgtacgctttggcacctaggtagtctcttagaaaccaactttgtatgcaggagcttgcatgtaaaagtatcttgaaagaaaattaaaaccacaaggaaaaggcctactttgggcagaaatagtaaaatcagtgtcatagctttgatggcctttaatttgagtaaagaa

SEQ ID NO: 19293 - DNA, 11952 bp, Oryza sativa
agtacacgagtacagaagtattccgatgaggatcaagaggagcagcgatacgatgatgtgaatctactcgaggaacatcgcgattgagttgccgttcgagcagccagctaccaacatgcccttcgccgttaccacgagaagcgcatccgagcacgcacactttcgatcggcgactacgtcctccgacgggttcaaagccaagcagggcgaaacaagctctcacccaaatgggaaggaccgtacacgatcacacaagttctgcggccaggcgcattcaaaattgcagacggcgatggtcgcgagttggcaaattcttggaacattgatcaattacgtaaattctatgtataagtcaatagtatccatacttgtaaggcatcttacagcttcaataattcctattttcaggtcaagaccacaatcaaagtgttccttcccgatgatcccttacccagatgacacctagcgttgaaacctatcctcatgtccctttacgccgtcttgacaaggcctccgaggaacctaagggaacttcggctggggaagcccagagccgataaggccttgtcggatcctgtagagatgaaagaccatgtaagatctggtcgtgtaagagttcttgccgtgcgtattaaccaagccttgtaatcggaaataaactttgcaacttcatggctggaggctaggaacagtgcttgttcaaccaaggcaggtcaaaggtccaagagccttatcttccgagaagaattccccgatgacaaggctaggggctagggagggtgtataactcaaacgactgatcaaagttgcgaagtgacaagacactcatacacactacatccagagtaagaaagcttagttagatagatttcttttctattccacaagtatttcttacaattccatcaaaatccaaaactatattacactttttccctaagacatttgtcacaggacacaaagactaccaggaaggccaacgccagtccatcgactggaaaaccttctccgccagcggcgctatcaacttcgcttggccatctatctctgtaggagttctccgagaatgagaaacccttcgcggaggaactcgaggtgcagctgcggacgatgatctcgtatgcaggccaacacgtgccccccggcatattggcttgagcgacgacactcctgcttcaaggcctcgtcgaaacaatgaccgatgccttcgagctaggggcaggccccgttcagccacaagatgtatccggccgccgattcctcgggatccccacggggtactcggagctctctacagactctcgacatggatgtgcagcaactcttcagatacgagttgaaccacacctcacgacccgggagtgtctctacggcctggtcctttctcacttccagcatagtcctttcgagttccgcgacctcaaacttcgtcctccaatactggatgcgacgatcctggtcagcaagcgcactctcgagatctgctcagcatggaaacgactaagtcaagctgctcttctctccagagaacacaacaaatcaagtcgatccagatggaagggcaaaggaaatgatgacaaagacaatcaacctaagggagtcgtcgccatgctcgtttccacaggcgaacttcgatctacatcgccctccagcacatgtggctcggacgcaagtaacggaatgatcactggcaactcaggctgcccgcgctgctggacatcctcgacatcaacatctctacaaataacaacaaagtactcgagatcaaaatgctaaagaaatctaaggcaatgaccgcacacactaaggcggttgggaccaataaaagttttacaaagcatgactaaagagtacaagagagctaagaccctactcttcaaaaagcgggaggacggactcccccagatcgccgacctcctccatcacatccttccgcgcgtcgctagccgccccctgatccaggatcttccgcagatcgagtttagggagcgccagcctcacacacgcaaggacgtggcacgccccggtgtagatcccgttagacgtctcctctccgatcctggccgcatgctttgaggggatctcctccatcgccgtcactagcttcgcaagagaagacgtcagcgagaactaatcgggattcaccgggatggtggacttgatatcgcactccccggtgagctggtgcagaccagtattggtcacccgaaacgagccacggatttccgacaagttgttctcgagctccgacatgcggtgctcgaacccctgccattgtcgctcgttgccggccactagttccctcatcttctggaggtcctcgcgaacctccgccagatcgcgcgccagccgatcggtgcgctcgttcgccgacgacgcagccgctgccctcgcctccgcaatctcgtggctaacaccgcgagcaccagcctcgaggaggcaccccatctcgacctggagctcctcccatgtgaggacggcagtcgacggaccccgaccagccgagggatcgccggctgggccgctcggcgtcacctcgcggctcctgggtacgaccacgacatctgtcgaggccacggcaggagacgcgctggaagtccctccggacattcacttacttctcgccgagacgcactgcaattgagacagactgcaagagtttgacgaagtcacgaaacttcaaagtcattcacttacttctcgtcgagcgtcacaagccgctgccgtcgcggaggcgggggagacgcatccgaggcctagagtacaacgtatatgaggtgaggtggaagttttccgactacgcgaccaaagggcaggagaacttactgagggggtgggcggattccgacgatgtccgatcacagaggagaatgtcctccccttatatcgatatatacttaaatcaagtgattgggatagatcggtcatcatgccgagacaatataaatcacttagatcgaaatatatatcaataacaagactatatatgtttatagcgtagccgatcggataaatctagcatgtatcggctaatactccgatactactctatattaggatattaaagcaagaataatatatcgaacaagagcctactaaacttagacacagcaatatcttgatataaagggtagatttaacatatcaatgaagcatatagaacaaataaagttaaatcagatacgatcagctgaaactccgatgctattctaatcggcaactagaaggcaggctagagatcgatattctaagcatgacttaataggtcaaactcaactgatacagcattaagtatgaaaagaagaacgatatctagacaatcaagccgctagaagtttcatagaatggtagatatctcatataatctagatcaacatcaagatctaacctaatcggcagctttctgtatgcagatgttaaccgataatagattaggtggtgatattgctagagattatgtaagatatatgataacttgacgaactacataaacatgattagagtatcataaagatggaaacactaatcctgagaacgcaagtcgtcataacatgttttacctcttgttgaagatcgaaactgatgcagctcaacccgaaagcaagaactcgtcgaaacaaaactaaaacaaaaggatggcgatgcgccgagattgtattgaacgtgtgtgttgttaattacatagggctcgaggtctatttatacccgagaattacaagatatacccataccagacacgactattatctctaacaaactctaagataccataagtctttgcggcagacttttgcccacatttatctataaggaatttacataagatatcctaattaatagatacaattgccttcctaggactctatccgtgcatggcaatcatcttgaagaacattaacttgaacccgatgtcgcgtacaagtcatattgtcgggatcggctacatcggcttacctagcccgactcagacccagccgatcttatcgtagccgatctggactccagccgattcctgctctgttttcaaactcgatctccgcttccgactttgcttcgatctagtcttctctcccaacgctgatgttaccaaatttggttgttaacaaagtcataatacgatctcggaagaaaaacgcaaaaggaccgctgagtacactcacattgatggcagcgtcgcgctcggccgcccctttctcggaaaggggcacggggacgttgctcgccgtagtgggaccactgatcatcagttggccgacacggcgcttcacggttgcactatccaaacctgtagatcgtgactaggatccgataagtcgggaagaacacgcgcataagggagtcaatttaattaacaagaaaaataccccgaggagaaacctaggtcgcgtcctccagcccagaataattaaaggctggatgggctcgagcctggagcggctggatccgcctaccaatgaagtcggcagcgacttcacaccccgacaacccccgtactcggaggtcatcaatgatatctatgaaagattggagggatggtatcaaggcgggtttcgtagtctaagacgggatcttgtctagttgctcctcgggaacaataaagaccggatccgaatcttctatttgaagatagaaccacctcccccaccatttgctgtgagaagaagggcaccggaaagggatatagcgcgactttaggccatcccggagtcggaaaccgacgcatccagataccctgttggattccatccagcgcaactcatagtaaaagcggaagaggtcaagaaatggctctaccccaatgtaggcctcacaaagatgcgaaaacatactcaagaaggcgatggaattggggttcaagtggaggaaggaaagaccatagaaattcaagaccaagagaagaaattcagaaggtggaggaagaaaaccacagagaataaagtcctcgatcgcaaccatgcgacctaggactggctggggttcagtacctcctacttctctctccgcggtcctgcgaccgggaagggtgccatcttcctgcaacttcttgagcgacgcgctggtggaggtagacttgtcgagatccatttctgccggggatcaccggagaaaggaccgagatgagctaggtaaggttttttgtgggagcagaaaaaatgagggacgttcgaaggctggagagttttttcacaacaaacgggcttcaacttggattcccaaaactcccttaaataggcgcaccttcgacggtgcgaattcaaaggaaaggagagagatggccgccggaaatttctaggcccgttacgcgcagcagtttttcggacttcaatttaaattcactcatgaccgttgagcttcacccgacgttgtcgatcactccttgtgtctcggtcctcacaccgagaacaacgacaacttcaacatcataagtcgcgatcggtttcacgagttcatttaagcagaagtcgggggctactgtcagggttacgggtaaggtataccctctacccttcgatatacgtcacatatcgatatggtatgctcgcgcgtatatggacgttttcggcatacgttaaggaaattcatcatggagttcacagatggaaggagtcctactcggtcagaactgggtcgtcattgtgcgatataaaagggaccccctgggaggacctaaggcatcgaatcttagagccaacacatccaccacagcctacgaagtcggagcttatcggagccaggtcgccgggagatctagtcggatcaactcgactacgatcttgtcggtatcgtcgagttccactattccctttgtaatctatggtttccatcatataatcccatatcaactggattaggggtattacctaccaaggggcctgaaccagtataatccctgcttcctgtttgcttgatgtcgtactacgtagatcctcgtaccagcgtaccctaataccctctatatccggtctacgggtatccccgatcgacacagtggggctggtgtgggccaagtccaccaaaggtgggccccacgcgttagcggcacagggagccaccggtccaccgtggaccgggaccaaagggcggtccaccgctggtccacgggaaggacagcctagatcagccaagccgatcgggcggtagagggcgagccgctggggcatgggcgcggccgagaccggcccggccggccatggcacggtggcggcgcgcggccacctgcagacggcgcggggagctgcggcaggcacgggcggtggcggaggaagtggaatattaaaagaggaggaggcgacaagggagggcggccgatggtgaggagaggcggcggcgctgcgcgggcaaacggcgcgggcgaagcactgacgatgaccattaggtgaggaagggcggccgagcacctcctcgacctgtagaaccatgaggaggggttaggggaggatagggtggctcgaggcagcgtgaagcgccgatcggaggggattggaaaagggggagctcaccggtgcatgaggggaaacagattccagtggtggaggacgcgaaccgagcggcggccggggttctcattgtccttgcggaaccgatggaggcgacgacgcagtgcggggtcggccggagaggcgacgcggtgtagtgggcgacggtggcggagagagatggtgaatgtggcaacggcgtttcggcaatggattggggaagaggagaagtggacggggtgcagtggggcatggcggctgcatggctgggcaaggcaacgctcgccagcgggaggcggctgtaggcggtggtggctcgggttggtggtggggtggtggttccagtggcggaatggaggagcggaggggacgccggggtggagcgtggcgtggtgaagctagcggcgcaagtggcgggatgcggcggcgacgggagcggctgtgtcggccggttggagctcgacggcacgcggcggtgcacggctcggcgtggggagagcgcgggggcggcacagggatggattttatagctcgatgaagtgacggggagaccggggagtgatgaatttgaaagggaagtggtgtgtcggcaatgggtttaaatcggccccaaccggcgccgatttgcgagggagggggggaacgtgggcgcgggttggaggaggtggatggcggttgcgggcgagcggacggagtggggcggaggggcattgggcgcgcgggaaaccggcgacgtggagcggcaatggcggcagttggggcgtgggaggccaaaggtagggtaaggacctgacatgtgggccccgaccctccatgttagtgggaggagagaagagattgggctagggggcctcaagcagactttgggaggggggatggaagcagagtgggccgacggcccaggaatggggggagggggggatggagattgggccggtggcctgaaagggaggaagggggagtttatattttttttataattatttctcgagctccgaaaattcatggaaaaatctggagagtataatagggctcagagaatattacaaaatatttgcggccaatgatttttaaaggaaatttttaattctcccattatttcactttataaattttctttaacttttatttattttctagaaaatgcattattaaatgatttttaatcccgaacgaaaatcgggacattacagtctgcgccctagggcacccctaggacgtccctaatcatacttaatcactagccgtcattgtttagattccggttttgtttagattaatctgtcaagaacaatttcgccgctagatcggtttgtgtaaccccaaattcgagtgcttaatcattcatatgcaattatgtttcaatctatcttgatcttgcttgtgttcttcgattcgcatgcagggattagccttctcggcgaggtcaaccgggtttcgacacggttgataaccagaggagacgtggtgctgcgattgcggggctcagtagcgcgttcgttcagaagccggatctagttgtgtcgccactccgcccaaaacgactttttatcatcacctatcggaagatcgggacctaactccctcatcaagatttgttgggcacttatttcatccccaagaaatctttgtggcatttgttactcttggtggttgaggacacctagacagcttggagtcaacctcaagacaccgatttgtttgtggtgcggcgacggagtttgtgaaggtcggatctcaccttccttagtggaagtaggagtgtatttgtgcaacctcacaaggataaggttggaaaagactcggttcattgtgagctcctcaatgaagagtagaatcccctcaaggatttgaactttggtaacacatcaacttggaaaaatcctagtgatatcaacttggaaattttctataggaaagttgctttaaaaaatcatattaatccatttttgaagtttaaaatagttaatactcaattaattatgcgctaatggttcacctcgttttgcgtatcttcccaatcttctctatttccttctcctcaaacacagccttagtcactgtttgtgcaaacctattaactacttgtgccattgtctctttttgtttgccttactagcttgctaaaaactgagattttcggaatatcagaaaatatttcgaaatattcaaaaatattccaaaatattaaattattctgaaatatccaaaaagtttagcttccccatttacataatagttttaaatgcctattcacccccctcttggcgacattaaggtcctttcacccttaaaacttgtcaccgtccgagctccctcggtctcccctcatctcctcgcgtcttcctatctctccaccacaccggcgaactccagccaagcctccctgtcggccggagcagcgccaaaccacgccaccacctttcgtagcatcgcagcgacctcctcttccccggcttggcctccgttctgcccgaggcaagccagagcgccatgtacaccgacgtctagaacatcatcatcctccagcagcccctccccattgagccgggtgctgccagcccatgctgccgccgccgaccgccccacctcaccgtgctcatcctcgacatccccttccctaagcccgaagctattaacgaccaaatttggtaatatcagcatcgaaaaagaggattagatcgaagtggaatcaaaggcgaagatcgattcaggaacagaatgagaatcggctggagtccaaatcggatacgatcgggatcggctgaatccgagtcagactgggtgagccgatacagccgattccgacaatacgacttggtgtacgacatcaggttgagttcatatgcttcaagatgattgccacgcatggatagagtcctgagaaggcaattgtatctattaattaggatattttatgtaatttccttagagatatgtttgggcaaaagtctgccgtaaagacttacggtatcttagggtttgttagagataagagtcttgtccgatatggtggacatagtttgtatttttcgggtataaatagaccccgaaccccatgtaatcatttaacacacatgttcaatacaatctcggcgcattgccacccttttgctttagttttatttcgacgagttcttgttttcgggttgtgctgcatcggtttcgatcttcaacaagaggtaaaacttgtcatgacgacttgcgttctcgggattagtgcttccatctttatgatactctaatcttgtatatgtaattcgtcgagttatcatatatcttgcaaaatctccggcaatatcgctatttaatctattatcggctaacatctgtaggtagagggcagccgattaggttaaacatcgatgttgacttagattacgtaggatatccaccactctatgaaacatccagcagcttgattgtctagatattgttcttcttttcatacttaatgctgcatcagttgagtttgatctattaagtcgggcttagaatatcaatctatagcctgccttctggttgccgattagggtagtatcggggtttcagccgatcttatctgatttaactatatttgctctatatgcttcatagatatgttaaatctaccgtttatgttaagatcttgttgcatttaagtatattacacttttgtttgatatattctacttgttttaatatcttagtatagagtggtatcggagtattagccggtacatgctagatctatctgatctgctatgctatgaacatatataatcccactattaatatatatttcgatctaagtgatttatactgtctcggcatggcgaccgatctatcgcaatcacttgatttaagtatatatcaatataaggagtatatattgttaatatctacagccgatcgagtagatctagttctttcttatttatttatgactgccgatcgatacatatatgacatcggctcaaagataaatgatatgtcatcggcacttagccgatcggctatcgtttataggtttaaccgcaatttctttgtctttatttcttgttgattgcaggatcgaatcaactggcacgctagcatacctgaaggcgagttttggacctgcactagagttaagcagatctcccaggcctcgtgttttccgtcaacacgcttttggcacgcccggtggaaccgattagaagtcagaagttttctctcatggacgacaagccgccagcgtcgccgtcctcgtctagccccgattttgttaaagagaagattcagcagttgggcctatccgaggttaatgaaagcaacatcgtgaccatcactccagacaagctgacatccgatcaaacgaaggattttgaagcgatgatgcagcaagcacggaaccagttcttgagctcatttatgcaaacccgcaagggaacagtggtgcagaagtataaggtaaaggtagttgctgatgttcctgggattagttcttccaaggatggagaggtgaaataagctccagatggctcgggtcaaccgagtgacaaaggtgcttcagatggttctcaaggaaatcaaggtgacaactcccaaggagtacagggagttcaaggtgatggtactcagggggttcaaggtgaaggccctaatcaagacgacaatacagcacagttgccgttcaacaacttccaagatcaagttgactatgctgtacaccatgctttgatcaatcaatctggaatattaaccaatactttggcaaacatggtgaaatcaatggttgatggttcgatggctgggtatcaagctacaggaccggtcttcctaccggaaggagtgttcccaaattatcggccattaatcactcacaatcaaccagttgcctagtcaatccccctcaatgcaccatcggctcagccgatggcaccagtatcggctcccgcacttgctgcagcaccgtcagctccaggccagttagttaatccccggttgttggtgagagaacaaccacagcacagcggacagaacgtgaatcggctaatgcaagaccaggttgcatctatgttcttacctccttagcataccgttaatccaacccagcagcagccgattcaacaaacaccgccaaggcagcaggttgtacagccgattcagcaaacacccccaatccaacaggttgtccaaccagctcagcagacgccgtagagacgccaggttttgcaaccaattcaacagacgccattaaggcagcaggttgtctagccaattcagcagcaaggcttaatgaatgcatcggctgggtttgcgacacctggtggtcagcctgtgcagcatgctgcaaatcaagttgtcccggagcacttggttcatcacgtacaaccagatggcatggtgatacctcaagttattcctgagcatttggtgcgcaacattcagccggatcttcagaattaccaggggggcaatttgaattatcagtatcagccaccatcaccgcaag

SEQ ID NO: 19294 - DNA, 8530 bp, Oryza sativa
ttcaacctaatcggttcaaagttctagatttttcaaaattctcagggcaagatagcacatcaacttatgagcatattagccgatttttagctcagtgtggtaaagcatcggctgtggatgccttgagggcttggttattccggttgtctttgtctggatcggctttcacttggctttcttctttgccatatgggtcgattaacagttgggctgatttggataagcattttcacagctatttctatagtggggtacatgagatgaaattgtccgatttgatagcaattaagcaaagacatgatgagcctgtgtatgagtatattcagaggttcagagaaatgaggaataagtgctacaacttaagtttgactgatgcccagttagccgatttggctttttagggtatgattgctctaatcagggagaaattctcatatgaagactttgaaagcttgtcgcatcttacacagaaggtaaccttgcatgaacagaggtttgcagaggctaggaagaattctagaaaggttaatcatgtctgtccttatatatatgggtcggatgatgaggatgatgactctgagatagctgcagccgaatgggtaaggagcaaaaaggttattccatcccaatgggtgaagaactcagggaaagaggagaggtatgactttgatatcaccaaggctgacaaaagttttgacttgctactccgagagaagcaaattcaacttgctgccggtcacacaattccatcggctgaagaattgggcaagaaaaggtattgcaagtggcataattctaggtctcatactactaatgattgcaaggtcttcaggcagcagatccaagcggctattgaaggaagcaaaatcaagtttgatgattctatgcggccgatgaaggttgatggcaatccttttcctgtcaatatggtgcatacagctggccgaacagccgatgggggtcgtgcaagaggttttcaggtaaattcagctaagattatcaacaaatatcagaggaagtatgataaacagcaggagaagcattatgaagaatatgatgatggctttgatcctcattggggttgcgagttctttagattttgttggaatgaaggtttgagactatcatctattgaggactgtcctgggtgcagtgatattgcggagagctcaagccgatcgtatagtaggggcaatcggctaaggcatacaagggttccctgttcatcaaagattgggtccagtaaacaaagatcgtggccaggaggactatgaaaacaggaaaactcaatggtgtccttctggtatctttacaaagaatcagaatagaagggttaatcaagttcctgtagccgatgaagccacagccgatgaagcaagaagattggataaggggaaaagtgttgtaactgcttcggtcaacatggttttcacgttgcctgccgagtttgggatcaagcaagccgatgtcgatgaagttgaagaggaatcggctaaattaattttatcaccagaacatgcagttttcgagaagccagagggtacagagaatcggcatctcaagccattatatataaatggttatgtcaatgggaagccgatgtccaagatgatggtcgatggtggggctgcagtaaacttgatgccttacactacgttcaggaagctgggcagaaacgccgaagatctcatcaagacaaacatggtgctcaaggactttggcagcaatccatcagaaaccaaagaagttttgaatgtggagttgacagtcggcaacaaaaccatccctacaacgttctctgtcattgatgggaagggttcttacagcttgttgcttggaagggattggattcatgccaattgttgtattccttcaactatgcatcaatgcttgattcaatggcaaggcgacaagattaaaattgtgccagacgacaggtcagtcaatgttgccagtgccgatttagctctttgggagatgaatggtcttgattgtttatctggaaaagtttgggatggagattttctaaaagtgtccgattctgatatacatccaattgaagatggagagcccaagctattattttgaaggcgtcatggagggttcaaatgtctacaccgaggacacaatagatgatctcgatgaaaaaaaaaggacagggtttcgtgttggccgatgatttggaagaaattgatataggtccaagtgatcgaccaaggccgacatttattagtaagaatttatcctcggaattcagagccaagttgatagagctgttgaaagaattcagaattgcttcgcttgggagtattatgaaattcctagacttagccgatcgattgtcgaacatcggctacctatcaaaccaggggttaggccacaccaacaacctccgagaagatgcaaagctgatatgctccaacctgtcaaggctgagattaaacgcttatatgatgctggttttattcgtccttgccgatatgctgagtgggtttctagtatagttcctgttatcaaaaggaacggtaaggtcagggtgtgcattgattttcgaaatttgaataaagctaccccaaaggtcgaatatccaatgccagtagccgatcagctggttgatgctgcatcgggacacaagattttgagttttatggatggtaatgcaggatacattcagatctttatggccgaaaaagatatccataagacagcttttaggtctcctggtgcaatcggcttgtttgagtgggttgtgatgactttcggcttaaagagtgctggagctacatatcaaagagccatgaatatatatcatgatctaattggctggttggttgaggtctatattgatgatgtggttgttatgtctaaagagattgaagaccatatagccgatttgaggaaggtttttgagaggactatcacgtcccaaaacgaccctaaaatatatcctttaaattatgccaagaataattaaaatcagtgtgaaagcctccaaaaattaaaatgtgcaaagtaaaagtcaaataaggcttagaggatttttgtatatttcctaaaagcctgaaatgtgtaaataaattttagtggaattttcagagcacaaataataattattaagaaataaacaaagttgaaaaggttttataaaaagaaaaaccctaaaaccctccctccctctcttgggccggctcggcccacttccctccccctctctcctcttcccccgcggcccactcggcccctccccgtgcgcgcgccgctgacgggcgggcccgcccgccaccctctgacgggtggagcccacccgtcatctccttcctcccgccgctcccgccacctcgcccgcgcctagcgccgccgccgccgcgaatcccgccgcctcccgtcgtcccctcgtgaaatcaataggggggaattactccccgtgatcccctctccctttccccccattttcccctctctctctcacattcaaacggccggatttgctcccgcaaatctcgccggcgccattgatggcggctggacctcccggccggtttccttccttccccggccgccctctcccccttccaaccctatttaaaccctcttcgcgcctccctcgcccgtttccgccccttgccgcactgtctcctttccggcatcgagctcgcgccatcgccgtctctctcctccgtcgccgacgaccttcggccggctctctccgctcgccgggaccgtttcccgccccggcgtcgcctcctccggcttcgccgcaccgtcgccgtccccgtccaccccctcgtcgagttcaccgaccgccggagcgccgccgtccccgtcgacccgagccgcgccgccgccttcctccgctccggccgcctttttcgtcgtcgccgtcgacctagggtgagccgtggaccgccgcctcgtttcctcctttccctcccctctctcagccgccgctccgccgtgcctatggccgccgccggcgaccataggggcgcgggcgcgccgcctccggccggccgcgccgacgtggctgccttcgggcgcgctgagcggctgccgcgtggggcccggccgtcagccgcccgcgccctcgggtgcggctgacgcgtggggcccacggcgccggccggtgtgagcccgggagcgcccggtccaccgtggaccgtgaggctgccgcgtggcccccactcccgtggacccggttcgcgcgccctctcccctcggctgacgcaataaaccatttttaaattaaaatttaaatgaagaaattagtaaatattcacttaaagagcatataaacttcaaatggccataacttggccatttgaactcggaattggaccgttcatgtctctaatttttccttaagaagtcaagaacccattttggtgctttgttcctacttgttatatggagtttattagagtaaaagcctttttcctttccgttggtcgtgtagacgctgcagcttcggaagatccgctctacgtggaggttgaagccaacgtttgggaaagcgagcaaggcaagtcacatcatccttgaacatattgaatcccagtttataaaattattttgatttaaattattgcattatcgctttatttaaattcccgcgttatcactgttttatttagccatgcctatttaccattcttatgaccttattattattgttattgttattattaccttgttcaccctagaataaacaaaaccccaactagtgggtactctattcatggtaccactagtatgaatttaggtagatgcttcgctgtttaattaggcaacattaggtggttttacaactctagactttgggaatattcatgtcacctggacactatggaatggttggattattgtggaattggattcacacctccccctctattcaaaatcctcaaaaaggttttaagctgggctcggggtgcatggttttgatagtagtacctcggccatataaggaccggtcttcgggcctctgctgcaaagcactaccgtacttccacatgtctagtgggtaaggcttagtttgtggctcagtctggttataaacaaaagtacacggatggagatggacaaagtcaggggacgatggacatctctagggcaaatgaaggctacacgagctgtggcccggtagtcaagatgtcatggcacagggctggtgtcctgctgctaggggctcaatcctgcctacctgtcccggaggttccggccgtaggtggttcggtcggtactcttgtctatggctaggatgggttggaaactatgtcacgtcttccgtccgtataccgtggtggtatgtggcacgtggttacacgtgaggaagatgtgtcttgtgggtaaagatgtacacctctgatcagagtataatctattcgaatagccgcgccctcggttatgggcaagccgagcaatgtacccaagttagtggtttaattcttaaaacctgcttaacaactaaaatgtggaatggttggcctgggttggcttgggacgagctgggacccaaggtcgggttgccagttcggtccaaatcatcgtaggccttaggttaaggcaggttcgtgggggttcacggccttgattaataatattgcatagctctaggatcgtgtttacaaagtagctttgagcaactaagtgacttttaatgctgtttactgcaaaccctaaccccctatattataactcccttgtactcccttgcatttattctacactcgtgggtgtgtcttgttgagtacggtggttgtacccagtcttgctcaatttttcccaatcccagaagaggagttcctagatgatgaaggctttggtgtctagctcgtgcctgccgtcaagcgcctgtggtcgtcgccctagtcttccgctgtttttcgtttgtcttcctgtgtgctgggccttcgccgcccatgtaataaattatctatttacgcttccgcttgttaaactctgtattgtatcaacttttggtgtaccttgcctcctgggacaaggaataatacacgcacgtaaggaacgcccgttgggttatttccggtcgtgacaaggaccaggaaatatggcctgaagatggacccgacaatatgtgcttttggcgtatcggctggccagtttttggggtttcttgttcatgagagggggattgagataactcagaggagtgttaatgcaatcaagaatattcagcctccggagaacaagacagaactgcaagagatgatcggcaagatcaattttgttagaaggtttatttctaatttgtccggaaggttagagccttttacaccattgttgtgattgaaagctgatcaacagtttacatggggggcagagcaacagaaagctttggataacattaaggaatatcttagttctcctccagttttgattcctccacagaaggggataccttttcggttatatctgtcggccggtgacaagtcaatcggctcggttttgattcaggagcttgaagggaaagagagagttgtgttttatctaagtcgtctgctcttggattcataaactagatattcccctgtggagaagttatgcttgtgcttatatttttcatgtacaaggttaaggcattatctattgtccaatgaatgcactgtcatatgcaaggccaatgttgtcaagtacatgttattagctccaattttgaaaggaagggttggaaagtggatatttttcttaactgagtttgatcttcggtatgagtcaccgaaggcgattaaaggacaagctatagccaattttattgtagaacatcgtgatgatttagtcggctcggtcgagattatgccatggactttattttttgatggatcggtgtgtactcatggttgtggtattgggttagttataatttcccctaggggggcatgttttgagttttcttatactatcaaaccttatgcaaccaataatcaagctgagtatgaggcagtgctcaaagggttgcagttactcaaggaggttgaagctgatactattgaaatcatgggagattctttgctagtaatcagtcaattggcaagggaatatgagtgcaagaatgatacattaatggtttataataagaagtgccaagaactaatgaaggaatttcagctggttactttaaagcatgtatctcgagagcaaaatattgaagctaatgatttagcccaaggggcatcggggtataagccgatgatcaaagatattaaggtcgaaattgcagcaataacagccgatgattggagatatgatgtgcatcagtatttacaaaatccatctcaatcggcttctcggaaattaagatataaagcgttgaagtatactttattggatgatgaacttaggtgtgttgcttaggtgtttgagtgccaatcaggctaaagttgcaatcggtgatgttcatgaagggatttgtggtactcatcaattgactcataaaatgaagtggttgcttcggcgtgcagggtatttttggccgacaatgcttgaagattttttcaggtattacaaaggatgtcaagattgtcagaaatttggagcaattcagtgagcgccgacgtcggctatgaatcctatcgttaaaccaaggccattcaggggttggggaattgatatgatcggcatgattaatccaccatcgagtaaaggacataagcttatactggtggcgaccgattatttcaccaaatgggtagaggcgattcctttgaagaaggttgattctggggatgcgatacagtttgttcaagagcatataaaataccgatttggtattcctcgaactattataactgatcagggttcaattttcgtgtccgatggtttgttcaatttgccgaaagtatgggaatcaaactgttaaattcttcaccatattatgcacaagctaatgggcaagccaaggcatctaacaaaagcttgatcaagttgattaagaggaagatttctgattatcctcggcaatggcatgctcggttgcccgaagcattgtggtcttatcggatggcttatcatggatcaatccaggtccctccttataaacttgtttatggtcatgaggttgttctgccatgggaagtgaggatcggctccaggagaacgaagttgcaaaatgatttaacagccgatgagtattataaccttatggccgatgagagggaagacctggttcaatcacggttacgagcacttgcaaaggttaccagggataaggagagaattgctcgacgctataacaagaaagtggtgcccaaggatttttgggaaggcgaacttgtatggaagttgattttgccaattgagactcgggatagcaaattcggcaagtggtcgccgaattgggaaggaccgttccaaattcataaagtaatgtctaaaggggcttacatgttgcaaggactcgatggtgaagtgtatggaagagcattgaatggcaaatacttttagaaatattaccccaagtgtttcggttaatgcatgatcggctgatgttgccgataaatgatagccgatgtat

SEQ ID NO: 19295 - DNA, 3521 bp, Oryza sativa
ttttgctgtatgatagtttgacataccagcggagaaagtggagcaaatcaaaccaaacaggcgcatccaagccaccaccaccaccacctcctgcagtagagcgggccacgaattcagaacctgctgtgaagggtgaagacgtgccttgcacatcagcataatagtaatctatgcagccccaaattttgtgtaacttttggtgcttctttccctcatactgcctccttttttttctcttttctgggctgtttctttgcaccatgtgcttgaaattcgcagtccaccttaggctgggctagatgctaacaagatcttaacgataaatcccaaaatcttatttatattttcatatgcttgttcatccacattgtatgttagtatgctccctccgttcctttgtggatggcgccgttgttaataatacttatagatggtttatcatatcataaacgaaagctttgtgattatatttaggatgcaacacacttggataatatagaatcatttgaagtgtaaatgatctttttattaaaaaaaagacaagctctaaagttttactatgaatagtgcccggtgccatgtgactaataacttactccctctgtcccaaattagatgtcgttttgattttttttttgcaatgtttgacaattcgccttatttaaaaaatagtgcaaatataaaaaaagataagccatacttaaaatacttttgataataaaacaagtcatatacaaaataaataataacttcataatcttttaaataagaaaatggtcaaacgttaaaaaaatgataagtattttggaacggatgtagtattaatttgctgtcatcagaagataattacacaagctaaaatcgccacgaacaggaggtatacagggtagataaaaccagtagtgcagcatttgccatagatgctactatcccctgacgatttgctctccagcagcagcatggcatgtcttctcctgcgacgccgagacctccacttttcgagggcgtcggggaggggcatgaccaagagaggggacatgaggcggaacacgagcaacttccgcagggggcggaggtggaagaggccgagctcgacgcggcgctcgcggtaggctcggaggacggcggcgatggcggcggtggcggcggcgatgtccgggaggtggcgcgcgtaggcgtcccaggtgcggatgccgtcgacggcgtagatggtttggtcgaagatgagcaggtgccaccggagccacacctcccggcccagcggcgtcgtcttcaacctctcgccatcctgcatggacatcgtgccccccggggttcgcaccagcagcctgaatcgcttcctcggaatcttgaaccttaacgccgccattgttcttgctcttgctctgctagctaattcgtcgacgcgcgctctgtatgattttcttttctttttttttttttttagacagagagggagatgctctgtatgatcttggtcgatacttgcacagttattacacgtcgaaacttaattggtttttatataggagtctggacggtgacagctacaaattgtgtgacaacttaacgacgcggcccagtttaatctgggtatgtacatacaattggcccagcccggctgtctgagcggtcgttgtaagttgtaacacggatcggacacgacacgaacacgatcgatatatccaaaaagaagaaaagaaagtaaaaaagatggttcaaaaaaaaaagaaacaagtgagaaagatcgaacatacggtcgaatccggaggccaggcagggagatcagatggcagctcatggtggctgatggcactaatgcactagcatactcaaccaagccaaaaatgccaaaatattcgtcatttgatttcattgtaaccgaaaaagaaaatgccttgccaaattatgggtgagtttgaggagaaggagattgagaagattgaaaagatacgcaaaacgaggtgagtcattagcgcatgattaattgagtattaactattttaaactttaaaaatggattaatatgattttttaaagcaacttttctatagaaattttttacaaaaaacacaccgtttagtagtttaagaagcgtgcacgcggaatagaggtactttctcacctaaactcaccggaacgaacgcaccctatgtcaagatgcaactttggtacaaaaccccccaaaaaaatgactagccaatttctgccaaaaaaaaatcaacattgcagtttttttttttttggagaactgcatatgaatatcagtcaattagctagttagtgttagtgtaagagtaggcccgtgcgtgctacttgtgctaaatttgtggtctgcaagagatggtcataacgaacgcgaggaagcaaaaacctcttcaaatcaacatgcatgatcaaacgtactaatccaagcaaaatagaggctaggttattaaacccgcgtgcatcgatcatcacaccaagaaatgcatcaccacataggagtaacatatatccccagatcagcatatcacatatatatctttgttcaaatacgacgatcgagtgcaaaaccatacgtacacacagatatccatcgatcggcgatcgctactgatcctatcacagacaacatgcaagctacgtagtccaaactaaaatgcaacgaaaggtaatccagttctcaacgtaggccaacccgaccgcatgcagatagtatacctcagctcagacggcggcggtctcggtctcggtcgcctcgcctccggtggtggcagcagcacgtaggtcggtagttgccggcgccggctccacctcctcctcctcgtcccaaggaccaccagcagcagcaggagcgacgacggggtcggccgcggcggcggcggcggcggcgatgtcggggttggcgacgtcgatggggtcgccgtcgcaacgacccgtcacagtagcgacgacgaaggggtcgcgaggcgtggcgcgcatgaccgtcatgttgttgatggactgcagcattccgcgcgtgaaggagcggcggtcggagttgctgccgcggccgcgcgcctgaggagccgacgacttcttgttcttcttgttcttgttcttcttcttcttccccatgcccggcggccggcttttgctctgctcgtctactctcgtcggaggagtgggtggggtggggtgagaggcgtgagactccttatgtaacccgcgtttatatactcgagctggttacttgcgtggtttagccgtctcctctctctctctgacacctcttgtaacaagaaatgattcctcctagttatctctctctagctctctctctctctctctctctctctctgacaccttgtaacaagaaatgattcctcctagttaatgataacccgtctcctctctcacacggattgacacaggtgaaaacctgacacctgacacacaccctccccctcctctctgatcgctcgtctctccctctaatcgctcctctcttgcacggagtaatcatctagaataagtaaagaaaaatatctagaataaaa

SEQ ID NO: 19296 - DNA, 669 bp, Oryza sativa
ggccacttagctggaagtcccttctcatcccaaccgttctgcaagtagtcaatagcccgcaacatacccgcatgacgatcatgtataaggcaaacgttgggcctcatacgcaccactgcaatgtgcactctctctaggaaccagtaccagctttcagtgttctcactctctacaaatgcaaaagccataggtagaacctggttgttcccattacacccaattgctgtcaatatctgacctcggtatttacctgtcataaaagttccatctatgcatagaacaggtcgacaatgcacaaaagcattgatgcaagcacccaatgagaaaaaggctctttgcagcacactctttgttctatcttcaaccgatgtaaatgtatgtaggtcatagtaagtattattattcctctgggcaatggtggctaacaaacgaggcaaattatcataagaagcttcaaatgtgccatacctcatctcaatgatcttttgtttggctctccaggcctttgcatagcttatggtgtacttgaatttgttctcgatgtgcctaataattgattttggttcaaagccaatgttaccaacaacactgctgtacatctcacttgccacaaaagctgaagtgatgtttcggtgatacttctccaccccttgtaagtagcacttgtgc

SEQ ID NO: 19297 - DNA, 2886 bp, Oryza sativa
gtcgggatcgaaagtgtgcttatgatcaatattgccagttcgtatttcagtttgccccctagccgaatttacaacatttgaactctgtgcgtgtttgaaaatatacatagtactatttgattgacattttgaagatggaactactagtggaacgactattaattcggctataatcgctactagtatatgaagccgaattatttccactagatattatgtagtgcgacccataagactgagatataacatgtgactgaccgatacttggcatggcatgcaatgatctaatagaatcaactgaattataaataccgccatagccatacatatctttcatcggcaaattttgttgtgtagtaataggttccgaaataatcgccgatgaattaaaaggtgcgcctacatattgtttattgctaccattattaaaatttaaagcatgtgaattattttgcataggctgtgacttgttattctcataatttaaagatcttgaacattgatttaaagcatatctagcaacattgacatgagtgttgatggcacttgaagaattattttgtggaacgagcaatgtgtctgtagagtgtacctcacaactggcatagcaaggtgaccacgtagcactccagtacgcatccatgtatttttctggtgcaatcaatgatgagggaatgttaggtcccgatctttcgataggtactgataaacagtcgatttgggcggagtcaccacacaactcgatccggcttctgaacgaacacgctactgagcctcccaatcgcagcaccacgtctcctctggttatcaaccgtgccgaaacccgattgacctcgccgagatggctaatccttgcatgcgaatcgaagaacacaagcaagaacaagatagattgcaaccaaattgcatatgaatgattaagcacacgaatttggggttacacaaaccgatctatcggcgaaactgttcctgacagattaatttaagcaaaacctgactctaaacgatgacggctactaaataaaaaagattagggacgtcctacggttgccctagggcgtagacccccttgggctaagcctacgacacaattacaaggccgaaaacccaaatcagattcggactggatgagatacgtggcttgttttgcagatttctggcagctcggtaggaattttgacatgggaccaaaaccatatgaaagtagactccataatctttctaacaagtactcatgggcccaaaaattacttctagatcagcggctaggtccattttaagttgatgctctcaggagggccgaatccgaatccaaaacatgtataattttatctcgtcttctatgggccaaaagtgacatgatgaggtagaagtagacttggagaaggttttggtttggtccccaatcaacttctttaatcatccatgcattagttacgctcggtctcttttcctttgcctaagcaagtacgtctgcaaacgaaaacacacaaaactcattgtgtagcaacgtttgttcaaataaatatataacaagtaaatctaatgtagaacatatgaacatttatttaattaatacataaggtagttatttatggttatatccgagctagttatgttcttatcatcctccctttcttgattggaaaccgtcctcggtttcaccttgtcatggagtgtattgtacttatctttgtctatcacaacatcctgtgcggaacatttcttgatggacatatgattggatcctaaaatctttgtagtcgaaaacctcaacactcctcttgcaaaccaacttgtaactcatttaaacaactagaggaactagatagagaattacttatatgcatgcggtcctctagacaatacatttcatcatgaaaaggaggtatagtcaaattcgaacaaatatatactcgatgcacattatattctcctttactttcataattgccaataatatgaaaaatcacatcagaagggcatggcaattcaaatctagcaaataatttcttctttaagcagttgagtggacaaatatcatcaaattgaatataaccccaagtatttaaagaagatagcaatttaatttcttcattctcgctagcaatgtgaataacatgtttaaactcaacacttggtggctctactatagaactagcatgttcattcactagttgtggcatggatataagtgaagcatcgcacaactcttctttgtcacgagaaacatcaagcaaattgttttgtgacaaaggtatttcagcaattgtttccaccatgggttgctctaatgtagcgtaagtagtagacatagttggcacctcataaatatgcataccttgagtagctgtagcaccgttatcattaccttttttctcatctgcagaaattataggcgcttgttcaattgaacattcttcaaacatgcatggagctatagataggactttttcctcttcgtctttcttctctttgtcattattaccttggttattctcagatgcctgtaaaatattagtatccaaaacaataggcacaacattacgttcgttttgtaataactcagacttagttgaaggcatcacaatagtatctttcctggtatctctgaaaatcacatcgattctatttttcgtcctttcaatactatctttgaaaatttccttgattccattcttcatcctttcaagattatcttcgaaaatttcagtaaaactcatgggtaccaatttcatttttcgaccattttgtctaaatgtgtatgtattagcaacaaaattatgcgaaccattattatcatatagccatggttgaccaaacaacaaagaacattcttgcatagggacaagatcaaaattggcagtatcatggtaatttccaatc

SEQ ID NO: 19298 - DNA, 2233 bp, Oryza sativa
aatcagaacagtgcagtgcagtcacaccactagtttcaagcaatcgttcgtataagtgattgattttggcaagtcgctagagatcgaagcctacacatcgatcagtccgggcatgataaccgcgtcaccgtagtccaccaccggtcgccggagcaggaagctccggtaatccccgacggcgatcgcgttgatcagccctcccttcacctccactgcacacacacacagacacacacaatccacaacaagaagaatccgtcagcgacatggactcgctcactctgaaaacccaaagcattcaactgctctatcatcatcagagtaataatcaatcagtccacttgtcgtcgatcgaggtcatcacctgcggcggggccgacccgtccgagcgtgacgacgcgctcgctggcgatccagaagtggtcgtgggggagaaggctgcacccctcaccgcccaggctctgcaaagacaaagggattctcctcagctttctcgtacgagagaagagatcgcagattcgaataccgggggaaagggaatctcccggagaccttggaaaagggcgcgcggtagaggagcgccgccgcgagcgccgccgccaccgccagcagcggcaggaccctgcccttcgccgccgccatcgccatcgtcgtcctcctcctcctcctcctcgcgctcgtgacgagacctcctgtccttttctgcgtctgcttccttccttcctcgcgtgcgcgtgggctgcgcctccactggctctgggctgacgtggattcgggtatctgagtcgggtgggagtggatctgtacacctggtccagtggactggtgggtacgaggattcctgtggggcccacctgtctgtggcgtggtctagtggaccgcgacctggatgatccgattctggttttgttgcgttgtgtgagggcatccaagtggctggaacctttggagggatctcttgccttttagtctttcttttcgtttttttataagaaaatcgagattcttttttatttttttattaataaattagagaatctcgtgtgttgttttaaggaattagagaatctcgttgtagcggtgagggggtgggtgtgacgcggccgcggagatggacggcgtggattgcctgctcggggtttgaaacgtcactggataggaactgaaattaagatttaaataaaacaaatcaaattattcaattattagagcaagtttataatagtatagctcactactggctccaattcatctatagccgatctaatagacaatttatacaatagttgcttactatactattaatatatggtctcacatgtcatacacacattacatcttggaatccgtgctgcagctggctatagatctgtagcccgttgctcatctctttcatcttttatcttattaaaatatgtttacagctggcttatagcctgctattgtacctgctcttatagcggcctgcgctataggtggaaaattctacgtggggtaggacataaaattctttccagctgtataagaggaaaccagcggctaatttgacaagtagtcaacatttggtactccctccttccctaaatgtttgacaccgttgactttttaaaacatgtttgaccgttcgttttattcaaaaacttttgtgatatgtgtaaaactatatgtatatataaaagtatatttaacaataaatcaaatgatagaaaaagatttaacaattacttaaattttttgaataagacgaacggtcaaacattttttaaaaagccaacagcgtcaaacattttgggatggaggtagtatttgttagtggcttatcatacattttctttttataatttggtgggataccgttttattttgtaatttactctcatctttatatagcgcatacagacgtgtgtacatagagctgaaaatcattttatatttccatgcctccagtaaactccagctttgaatattgtgatgggactgtagtattatggtgcttatccgagtctcgtatgtactatctccatcacaaaatatgttgattttttatataacgttcgattatttgttttattcaaaattttagtaataactcctcggttgattaaaaattacaacaaaataaatgatatgcatataacatttttcaactaagatatatgatcaaacattatgcgaagagtcaatgatgtcatatatttcaaaacggagagagtagcaatttattattagtatc

SEQ ID NO: 19299 - DNA, 1370 bp, Oryza sativa
cacccccgcccccgaccgcgcgagctccggagcagttggcgtcgacaaggaagggaggtgaggcggcggagatgttctccggcgagtggacgccgccgtgcggcagctgctgcaccaagaagtacgccagcctcgtccaaatcccatgtcagtgtgctaccgcccaatacttccctctcgcaagtccccggtagaggatttggtttaatttgttgtgccatttttttgttttggcgcgattgggcttggatttgcagggagggtcttctgcaagaaggggtgcgacgcggacggcgacacctgggacgagtgtgagtattatcatctgccaaatgtcgctgtgaattgattcatccgctcattacccgattttggttttgctgatggtttagttcatcgccgattcaaatattttccataggatgagatatttatgttatgttattcgtggctgtccttgtgaatggatggaaaattaatattaggcgtatatgctttacaccgttgatggaaatcatgttttggagttcaatagtactagtatgtggctagttatctgacaaaataggcatggttaacataatgacccccttcattcagtggaatatagttaaaatttttaattggtaacttgcagtgctgtttgtgtcaatgctagctgcaatgagtcatgtactcgtgtttacagtggatcgttggtgcattccttgctcagaagtttgtgttgtttctgttggtgccctaggagcattttattcttctgttgataccaatctgtgtgatttagggctaagattcattccgattttgattgcacatgaaaaaattttggcttaaaattgctgatcactttgttttctagcatagcttagcttacttgccataaaaattctcaggcataagtaaatgtacggaaatatgctacaaagatcctgttttggaagatcaccagtggagtgcatatatcgatcggtctccaggacaggatagctactccttggtgagtttgtgatctgtttgtacaattcttataatttccatattccttttactgaaagtactttggtaagtgataacccattcgatggcatatgtttgtactgtatactgctgtcacagcgaaagattaggttgcattttgctgaccgaaattataatcaccctcacatgattacttgatcataaacaggaagttatagttgtcatatcttctataagaaagtgcatatatttaccatctgttgcatgatggaatagaattaactgcactagttgattttgagtaagagttgtttgttcaagattttgtatacctttcacatgattatcacagtaaagatcagtacatcagactgctgttgtatggtccg

SEQ ID NO: 19300 - DNA, 1576 bp, Oryza sativa
cgccccgctccgacacgccagtcgcccgcttcggtcgccggccgcccgtcccactcaaccggccgaagagagaggatagagaggaggggagagtagtgaggccctgataggctgtcaatgtcatcgtccacgtggcatgctatgtaggtaagaccacagtcaaatgaggctttggaccgggatgatacattaaaccaagtttagagatctcgatgctcgttttgcaagtttgtggatttaagtaaaaccttgttacaagtttaagtactactagtgtaatttactcttgatttttcaaggtaaaattctctcctcgttgatcaatcaatccatccatcttcaggagtagattcagatcagattttgagtgagaacccagatcccagattatactacttagtatcattttatttgattgtatgatatgttattgttttaagccaatttcattgacacaagaactaaaacggctggcaatactggggcaaagcaaacctagcaagacagcaataacactggtatgccgtttgcccacccgactagccgaaccgagcaatagctcaggctaaccagcaaataaagcatttctaacatcacgcgtttattattccagttcatctacataaacagctgataaagtaactgaattacacttccacgtaaactagattacaggagtatctgaataatataaaaaatacaatcactatacgctgtccacatgaagtacaatgtagcacaatcgaatggagagtggtatataacaatggaagagccgggctaaattatacacacagggacattgccatttgcagttttgccgcaaatcaaaatgtgtagcgcatacgatcatatacactacaaatcaacaactgtaagcactggatccacctgaaagacaagaacaggagcaatatgtattaacataaatattttcgatacttgtgtgcagtgagctaaacagaagcatctcactactacacctgaattttatttggcgaggattggagcaccacatgcagcctttgcatgtttgtcttcagcgaacacaagattcccacccacaaaggtggacagtatcttccctgaaagctgctttcccaaatatgccgaaatattctgcaaaaatgtgaaataaactttacacatagaatccagacttcacatataaaatgtgatcttcaatttgtagcattttctagctgattgttgaggaagaggtcaaaagttccacatggtccgacattttatatggaaacaagtggaattctaacgggttcgagttagaaagcaaacccgatgcttatggtagacaggatggctgtcatcaagatggaattgagcctcaggtttccataccacaatatcagcacggtatcccggcagaacagcaccctacaaattgagtttaatttctttttagcaatatcagcatgtactgtatcgagtgagacaacagatgatgatataaacaaagatgaaaacattaatcataaccattagctggttttaagttacacaagtgtcatccagtaagaacagtagtatggcacaatgatgccatgcattttgctaa

SEQ ID NO: 19301 - DNA, 3735 bp, Oryza sativa
gacacaatccagcagtggaattaaaattaaaccatgcacatgcatatgatgccagaacacgctctctagtatatatttcctctgatgcattcctgcagctagcagtacttgcatggattccattctctacagtacatattcccttctcatttctccatgctactctttgttttcattttctcttcccaaataaaaaaatatgtataccagaagacattcctatatttcttttttggttcttgtatttatcatctgatagaatatacagtttcagtcgggctctgcgctcagtttgttcccttccttgcgcagccttgaggacagacacaagccccatccctagccttaacttttccattgcttaacgagaccaggcaaagtttccctgtgatctgcagagcatttaacaacaagacagtgattgcatccaggaaagtcacacttgtgtaagaaactgagaagaaaatgatggggccctattgggtactattattggttggaggaactaattaatagtactacagacgatcagaatatgagtcagttgcatccataaagacaagcaaatcaagcctctttctaacttccccggctagcttgcagctcttcttccccccttctgctccggccctctcatagctagatcctcacatgtactgctgtcttcctcaatcctgggttcagatgtttcacctcttctctatctagccctctttccatcatctttggcacctgcaagagctagagctgtaaaagttagttagtgtcatttgatggatccagcaaggtactggatcttggccaggaggaagctgggagatcagaaggcgcctctcttccccacccctcacatcaccatcggcgccggcggcagctccacctcctactacgagtcatgggaggaacgtgccttcgcggaagactccgcagggcatctcgggggctgcatctggccgccgaggtcctactcctgcagcttctgcggccgtgagttccggtcggcgcaggcgctgggcgggcacatgaacgtccaccggagggaccgggcaaggctcaagctctctggggttgtggaggacggcaccggcggcgaaagccacggcatgccgccaaaccaaaagtacatgatacaaccatgccctccccaaattggcaccctgcagcacgcctacagcccaaaccctagaagtggcagtattctcgctgctgacactaaccctaattccatatgtgatgttgtcgcgtaccctgctagatccttgcttcaagttgcagctgctagaactgccttgggcaaacaagtcctgaacgcccctcttgtctcatcgaagtcgccgtcggctggtagagaacatggtaagagggagacgttgtttcttggtgctgttcgattggcacaggatcatgacacggtgagttctaatcttgacctgcgtgttgggaaaaatgaattgaagataactactgttttggggtgccgatcaagaagggactttatgtacgataacgaccgcgcggatgatgaaaagactgttgaagcaagtcacaagaaaagaagaatcgatttggaggtaaaccccctgattctaacttcttcaaccagtaatcatcaacagcaagatggtggtgatgaccaacatcatgaaaagatactaaaactttatcgtagctcctcggttgaagaactagatcttgagcttagactcggggaagccccaaaagaacagtagatttcatatccactgttgtatctcaacttgattacaaatgtttaatttgtatttattcaccactcgtgtttcattgaaatgttggtttgcactatctgaatttatccttgttttatcctatatgttaattctgcttatttccttggaatgatttgaagaaatcatttttctcttgaaagggaactgtaatgaaaaaaagaactaaagtgacttgttatatgctgtgtaagaaggtactgaattccaatttaaaaccttacttgcattgatgcacaaaaattatcacataatttagttgcaaaactttctctggttaaccttatatattacactaattgaatgaactgaatttgccagttaatcaaaacatcttgtggctaatctcgaacaatgtcaaattagattacgctaaacaaatatagttgtattcgtgtttatatcctttgttaattctcttaccccccatagatgatatgtgggaatagtgtatattttgtcaaagataaccacatgaaaaaaaatcaaaaatttgtcatactctgtcacaatgtgttgaattgtagttataaaattttatctagtagagcggttaattttatcgtgcaaatgatataaaactaaagttacagaaatatctcccagctgtactgctggacaaagggtttttaaccccggtttataaccccctatagtcccggttatgcaaccgggactacgaatacaggactacagatacccatctttagtcctagttaaaataaccatgattaaaaatatccatttttaggcccgattggtgttaccaaccggaactaaagatggagccaggccagctccagttggtagattttttttctttttttcattgttttaactttgaatattcatttcactacttccccaaatcatccccaaatcgatcatcgcagaaaaaagtatcatctctaaatctctaaattgatcatatccaaatacatcacaaattctaaaaaaaacatcacaaatacttcacatattcacatcacacacaaatcaaatacatcacagattatacatctcagatccatgcaatgaatcacaaattctcaaaaaaaagaacaaaaacaattttgcgatgtcgctgccgcctcctctctggcagaggcgccggccgcccgccgccgcccgcccgtcctactcgctcgccctctggcctgcttgcttgagaggataagaatagagagaggaaagggagaggataagaaaaaagaggaggataaagaagaggtgattgctagaggataagtgctagggattatatactatgcaccgatttttagtcccagttggtatttccaaccgggaataaaaagaatagggggcatacacttttttaaccaggactaaaaacgatctttagtaccaaccagactaaagatcataaaatagctatgggcttttcaaccggggctaaagatgatttttagtctgggttctttttggaaccggggctattaattgtggttttcggctaagccaacaaagattagttctccagtagggttgatagcataaactttagatggcacatgtgttatatcgtggtcaatattatattatctggttcttattatgcatgttggcaaagtattctcagccattatccatttctttttattgctggtgtcagtttaaattaattatattagtgctctttcaccgtgtcgtctattcaacgcgtgcaagtatatgaatatcaaacaattaataacaacggataatcagttcattaaaactcatatgtgctcagcttctataacaacggatatctatccaaagatcaatataattaatttacagtaactatgtcatatatatctgaacttttcatattggtagttaattttcaatatcatggaaaacatgtctatttttcccctgccagctgagatttaccagcataatatataagaagtttcttaccatccacggtaccacatatatttttatgataatatgtccttag

SEQ ID NO: 19302 - DNA, 1539 bp, Oryza sativa
aattcctgcagccctggaaaaataaaaccaaccacctacattattttattcatgggaaaggaaacatctaattagcgtaatacttattttcctttcccatttctacgaatgcgcgcttgatcttagcgcacaaaccgcgactaagggtatcgaaattatttctaatttcagcaagctctacccctagctccgtgttgcgatccctaagctctatattctccttgcggagtttcttcacttgcacggcgagcttatggatcgagggctctgacgacttcacctcatcttcttgatattggccgggaacccgtcctgagatataccagccatgggtgttcactaggacttggatcaaaggtttttgagggtgaatgggagattgaatagagaggcttttgcaaaggaggaagaaagagaggaactagctcaggagagtgatccgatcgctctacctccaaactcgcatctaaacagactcaggacgggcgggggagtctaccatccaaaaatggggccgaacgggtgccgccctggttcggccgaaccctggtgggtccggcaggcctccattttctttcctaagcctactaatttctaagctaagcacaaacatgacaattataaagggttttaagcatgcataagatgagatcatcatggttcataattgattaattcaacgacatccacttcttcatctaaagtttcatttggctaaaggaaaatttttaagcgttgaccgtttaccttgaatatattacctgaatcgttgcggagagtgattgccccgtgcgaagaggtattgatgacgttgaacggtccttcccatttactacgcaattttccgtgaccgaaaagcttaacctcggagttgaacattagcactttgtctcctggcttgaatttcttgatttttatccttttgtcatgtcagtgcttcgtcctttctttatatatctttgcgttgtggtaggccttctctctccattcttcaagttcggtgatttgcattttcctccattctcctgctccgtcaaagtcccatgttccagtttctgatggcccagtatacttgctcaagttccacgggtagtcgacatgacttcctgtagattatctgatatggggacattccaatgggtgtctcatacgctgtccggtatgcccacagtgcgtccgacaatttatccttccatcctgtttccattttgttgaccgtcttctacagaatattcttaatccgtttgtttgatgtttctgcttgaccactggtctgcggatggtaaggagtggccacattgtgtttggctcccatctctcgtaggaggtcttggaaggttttgtcaatgaagtgagaacctccgtcacttatgaccattctggggataccaaatcttgtaaagatgatttctgtgaacatcttcttggcatgcctcgcatcagcggtgttgcatggcatagcctcaacccacttggagacatagtcaactgccaccagaatgtactcgcagttgcgagacttatggaaaggtcccataa

SEQ ID NO: 19303 - DNA, 682 bp, Oryza sativa
aaaaggaatgatttgccagccgttccaacatttcatcaatgaagggtagcaggaaatgatccttttttgtagccttgttaagtttcctgtaatcattgcgggattagttcattttgagcatttgcaacgaccgtcattcctcccttctttggcacgacctggactgggctaacccactcgctgtatggtacgggatagataatcccggcatgctagagtttcaagaccactttctttacaacctctcgtgttgcattattaagccatcgttgaggttccctggaaggagtactctcggggtcaataggaatacgatgggtgcaaagcacgggattaatccccctgaggtcttgaagcgagtagccatgaacagaacgatgcttttccaacatggtgagaagacgttgagtctcgttttcagagagcttgtcactgattatgacaggagcttctctgtcattgtgtaggaaagcatatcgtaggcctggaggtagaggtttatgctcaagcggaggtcgaggtgacggttccatgattggcaggtcgagagtctcaacgggatctgcttcttccttgataaaatcggggacctcatcttccagaagggcctcgggagactcgtgagtggggagctgcactaacctcctccgctgactcaatttatgggagggaatcggtcaag

SEQ ID NO: 19304 - DNA, 827 bp, Oryza sativa
tgagcttttccatgaaatagctcctactgtgagggtaaatacgtatcccgatgttgactttgtattatcttttgcaaagtcagaatctgaataccccactgtctggagcgattctgattttctgtaagacagcatgaggccttttattccttgcaaataacacaagactttctataccaatttccagtgctctgggcctggattactctgaaatctgccaagtaacccggtaacaaatgccaagtcaggtcgtgtgcacaattgagcatactgtaggcttcctacaactgatgcatttggctttgttttcatttcattgagctcacactgatttctgggacattgcgatgccccatacttttcgcctttgactataggagcaggtgcagcactgcatctgttcatattgaatttcttcaacaccttttctatatatgccttttgagaaagtcccaatgcatactttgttctatctcggtgaatctctatgcccaaaacatgtgagtcctcaccgaggtctttcatgtcaaagtttgaggataagaatttctttgtttcctgcagtagactaacatcactactagcaagtagaatgtcatctacatacagaattaggaaaataaatctcccattcttaaactttgaataaatacagttgtcctcgacattctcttgaaaacccaaatttctttattgttccatcaaatttcaagtatcactgtctcgaagcttgttctaagccattgggctgggcgcccccaatcagggcgcgggtcaaggcccccttgagccgttgggctcaaggggagggagatctatctaacagt

SEQ ID NO: 19305 - DNA, 4143 bp, Oryza sativa
cattgggaaggtttcttggactacaattcacaaaggggtttttaaataaatttaaataaaggaaatcatggtaaaaaaggaagtatcaaatcacgatataactgaagataggttttaaataaaagtcataaaataatttaaataaacgaagaagttttacgcaagttagttttaggaggtctctctctctctaattatattttcctaggtttagaaggttaataagaacataagaaccggcatgatcaggaaattcttcccgggtgcacacgagtgaggacaaagtgtgcagaaaagacttgtgttagtctgtgagggcattctatgacctatgagagctatcagatgtaagcggcccggcctgggagaggcggaacgttacagtcaggatcaagtgtgggcaaaatccatagaatattcaagtggtcgaagtggagcatggtgaagttcatgcagaatttcctgaaaaaggaaacaacgtttcccaggaaccgttattggaagacgctagtaaaatccagtacaccggccaagaagctagagcaaccggctcagaagaagccatctcccgcaccaaaaccaaagagggtgtggaaggaaaagccaaagacgcccgctccatcacctccggagacgggtggaaaatctgcgaactaaactgaaaggaggtacggtcttgcacgtcggacccaaaatgacacgaccctcgccaacaggtaaattggtatgtatccgcatatttattttcatcaatttgaatttttgcatcaacacatgtttgcatcaacacaggtaaattaggtttactaacctcttgcagagaatgaactcaaaatggaggagaatggacatcaaatcagacgatcaatcaatcggacgatgtcgagaatcagacttatcaatgaataggccaagaactcagaaatgacacgactaattgggccaaagttcagaagtctgtggaggggagaagtccaagaagccagcagccaaattatgggctggttgggccggcctctggttcggccgaacccccctcatcgccgttggatgcagggtttctcctggacggtgtagattggcccccaatgccggttggagggtatttccgaccattccaaccatcacaaccgtcattgggaggctatataaacccctcactctctccatttcaaaacacactccaagcaaatctctctcattttctctcaagtttagtttagtgttcttaagctagtagagtaggaatagaatagaaatcagagtccgaaagccttcgaaagagttcgggtatgactctagtagctctcctttcctcttttgtaagctttgtactttatttagaatactcttctttatacatttcttgtaacaaacccaaattgtagaaacttggaaattcaatataatgaaaaaaatattattgtggtgaaaatttgttttaggtgtttttggatcttctatgcatcatttcattttgcatatataaattaaattaaacaaaaaagggtaatacgattagtgatgagtataataaacaacaaatttaattagttataactcagcttttgcatctcaattaaaaagatgaaggcaaccacaattaatttaaattggaataaaagaaggaaacttgtttgaatttccaaaaaataactgcacatgagaaaaatctcaaaaaaaaaatcaccaaatggagttcaccactacagtaacttgcagtaaaattggcgcatgcttttgagcagtgtagtcattccaaaaaaaaaaaagaattcgtcagaccctcagccctctctaaaaatccctgggaagaaatgttcctcacctcccctattcctgtacttctctgatcaacgggcccaagcaccctggaccccacctgccagtggcccagcaccccatcccactctccttctctttcccatctctttccttgcagatatttcatcgaacacataggatgcgagccgaaagtcgtcgcctccaagccgcccattcctcctctgcccgcgaatctcactgcaaggctgtgcaaagctgacgacgcctctgccccgcctctgcccgatgccctgccgcgcccagcgctgccctcgcagccgctgcgcccaaccgacgccgtccctctgcccggagcgacgagacgctacaaactcgaccgttgcttcctccgtctgcaaagccgccgacctgcgtctgccgtctgcaaagccgacgcccctgcctccgtgtctcccggctgcaaagccggcctcgcagcgcgcctcgccaacccggagccgccgccctctgccaaagccgacgcccgaagcgacaaggcgagaccgaccgcccctggcttcctctgactacccctgcactccctctgcaatccctgcgcaaagccgacgcctgctgcccgccgtgttccccgccgaccaccgcctgcgcgcgcgagagacgccgaacgcgtcacgacaacctccgcgtccgcctctcgctcctccctcgcctataaatcgaaccctcgcgctagctaactctccagaccaccttcaacctccactcctaaagcggaagccctaaaccctctgattcaccgggaacggccgcgccaccgtcgcgccccgcgccggccaaacagaacgccgccgctgagcccacaccatcgagccgtcgcctcggtgagtttcctctcgattcctcgcgccatcaggctcataggacctccataaatccattttcgaaatctcttttatgacccctcgaccggagagccgccgccaccattgccgccgccgaccgcctcgggagctcgtcgccacgccacctcggaccgcctccgcccaaaaagaacgcggggtaagccaccacatagtccctaggtgcttccctgtcctttaatcgagtcgccgttcgccatagccgccggccgccatcataccgaaccactgccgccgcttgccatggccagccgcctctagccacccccggccacgccaccgccactaggagatgcacgtgaacctcctctagccacccctgcctctgccctagccagccccgcggccgctcgccgccggccagcccatccggagccgccctcgtgctcccctctgtctgttgcgaacggaggaagaagacaggacctgttcgtaaataagaaaaactctagggctcttgatacaaagcgccaatacacttacatgttggaccgagacctagatctcaatagccgcaagattagggtctgttctgtgaaacatcgagacacttacatgtggaccccactgtttaaagtggatgcgcgctaccgtaatacgttttgcatgtaggaaagcgtactctatatagtacgcttcagccttttgtaaagagaaattaataaatctaagaaaatggtttcggttaattatttatgcactataaaatgctgaaactttgtaaaatcatagaaaattcattttaactccgattgaggtgaaccaaatttcgttagattcataataatgttgtctttaatactgtacactcaaattatcaccactgttgtgaaaattttcactaatttaaatttgaatagtaaacttcgtatttaccgtactttaaatattagaaacacgataacttgcacatacaacatcaggtttaggcgattctttctcatttatattaaatcactctctttacactgaacatgttcatgcaccatgcatcatattttatcttggagttttattggatgttcatttgaatgtacgtttaaatttaattagaggacgaatcgattgttgccgttggcgagagtgtgcaggaccaagagttatttgaggaaccaactgagcaaggcaagtcctattcaattcctacttcgatcatgttgaatcctatatcttcgcaaatgctttattattttataaattgcatgcgatgttttataaagaaaatggggtattggtagaaataacctaattgctgcattacctaccttgatatattgattatcgttgaagccctaggctgagaatatgtgtgtgttgtacatgcacaatgtgggtatattcgagctgctactatagctacttgcttagccatgcttagaaaatttccaatggttatatatgacatggtaatcattctttacaaatggagggctgcagg

SEQ ID NO: 19306 - DNA, 2312 bp, Oryza sativa
  unsure (1)..(2312): unsure at all n locations
gagtccagcaaaacaacatggtaatttttggtgtcaaagtatgcaacaccgacagtcattgtaatgccacgctccctttcatcagcactctcatccattgcccaagcatatgcaaatgatcctttcccctggaagaagaaacgttatatatgaacagctcccaagatgcataaaaggcacatactgagataacatcaatcattaaaataagagaaccttttctttagcttccttctcatatttatgcatttgcttttttgaaatcctccccagggcatgtaacaaacgaccacatagagttgatttcccagaatcgacatggccaacctagcatgtttctggtntgagttattcataaagataggcagatagaaggcaaacaagtaataagcaaaatgatggatacatcaaatatatcgtgtatatatagatatgtagttgcttacaatagcaagatttaattgtctagggatgccttcatcttcatgctggagcatccatggttctggcttgtacagggatgaagaaactggctttttaatattggctttacttttttgtgacttcctctccaaactcaaatgctgtagctcatggtccaagcaaagtgtttcattttgactaccaacagaaacactctcactactttcaccgaattcattcgactttacaggcaaatttgagtctgcagttgtatccttctcaggtgtagaactatcattatccatcaccctcttttcagtgacatggggagcatctgtgtcaactgatgtgaatcaagttactatggaactatagcacgcactgcacaaccaaaattattcaagtgtggaaaagaaactttgtttagaaaactatcttagcataacctttcattggtaccaaccacataaattttgaaaataacaatatctataacaaggaacagttcaaatgttcaagtgtgttggcacacagtagttctctatctgaccagactaactcattcagcataaactctaatcaaactaattaactgaaaaggttccacaaagactcgcgcatagaaaagaaaataaaggtttcacatatagatgttaatgttaagttgttaagatgcatccttttcactagtctgagttagtctaactacatgggagtgggggaatgcagagataataccttttctaaaacttctcgacgattttagtcctgtagcgaccacgtcatccggagatggtgtatcaaacttgaaaggcactgtgaacatgaagatatgcagtcatattacagatttctccatcaggaagtctaataaataaatgaaacataagttcaacatatggatctcccattggaaaaacacgggtcaactgaatgcttaccctaattcaggggaagaactgaacattcataagtaggttaaaatttacactgactatcttcatatttcaaagttcaggtaaaccaaattatataaaaccctgtaaactcccaagacctgtaagctacctcccacatatgtgcttcagtttgtttgtttgcagaaggaccatggcaggctagctaagcttatagttcagacagtcacttggttttgaaacaggaaaattttacacccaaaatggtagtcacaccagatgcacaatgaggcaattgagagttaagctatgcaaatgactagcatatatagaatcatacaacattaaatatctggtttatatatagcagcaagtacatataactacaagaatttggataatgccataaattaaacaaatcaaattaccaaaagcgcttgatgtacaaatgcagtgtacctatgttaatgtggcgttctttacgggtcatgtatgtcttatgcagcgcatccacgtagctcgtgtacttcctgttgcatttctgctagctttaaagccaccagaaagaacaacgtcttttgacttggcactggatggtgagaaaagagttcttgccagtacagataccgcataatgcttgtctctccgtttagctggatgtcatgatagaaaaataaataaattaacaggctagaaaacataaatatatctaatcaaagccataagtcaacagtgcaacaaaaaactaaccataccagggaatggaacaacaaggaatacactatacctctgccatcaacttcaagggcattattgaaatacagcgagaaatatcgaagaacaccgcattgctcacatgattttttttttgcatcatttccgtgttcgcaaatggtgcattgccaaatgccaggatttcttgatggctcctgaggatcagaccggttatctaattcaggaataaactagaga

SEQ ID NO: 19307 - DNA, 1499 bp, Oryza sativa
gctattcgaatagttttactctggccagaggtgtaccactgtacccacaagacacaacctcaacatcatgtcaaccatgcatcacgatacttatcaagtacccgaatagagattgtgacaatacccttcgcataacacaattcaaagcagtgcaccgttcctggatcataatcaccccttataaaacaaggcatggactccccagcgacccccgtgggcttatctccgccacttctcagtctggtgctctacaaagaaccacactctacaaaaggtaaagccgttgcccacgctggcttgtggttggcacggttaatgtttcacaaccgaaactcgtgaaccggttcttaattgtcatgagcacgaccatcaaaaccatgtgctcacaacccaccattactatgttttagttggcatcttaattaatcaacctatcatgattaatcatcacgagctactattaagccatcattaagtaatagtgaatcattaattatcccattcatatgagctagtgtctctaagcatggctaagcatcctaattactttagctaaaaccatgtaatgttctagctaatccaattattaaccaagtgacaaagtataggtaatcaataacaaaaggctataacaaaggcaataggttattcccacccaatgacattcaaaaataaatgcaatagttgaatagaaacaataggttgaaacgggatcaacatgctcaaagggttgtttgggatctgtgtgacttgccttgctggccttgaaactcttcaaagtcttctcctgcaaaatcggactctccaagaacgtcggaatctatacataaaaaagcaaaatcaccaaaacagtacataaacaatcataaacaacacatgtggatatttttaacatatatatctcgattttacaaaaatttagagacttgaaccaactaaatctgagctaagatgaattagatatgaatttttgaagattaaaccggattaaatcatttatttagattttaattggattatgacgcaataaagaattatttttgaaaaggaaaaaggatttattgtgtcagcgggctcgggttcacggtggaccgggtgcacggaaacggtctacggaacgaaatggacggccgagatctaactgatctaccgcgggtctacgactgacgtggcgctgacgtcgacgatgacgcatcaccagcggcggctcggcaccccgtgctcatcggcgaacaacggcgtggcagcgcaaacggagggcatctacgcgtagagggtgacacggcgaactaaacgagggctcggccgacgacggacggcaaccgacggcgacggagggagttcgaccgatgtcatcttcgccgaagcatatgccaggatgtgattgcccaccgtagcccttaccccagcaccagcctcgcaccgtggtttcggcggagaagcagttcaagttctaggccaagcacaatttctggtagctttcggcacaggcgaaaaca

SEQ ID NO: 19308 - DNA, 606 bp, Oryza sativa
ggcatatccgaaggacgatttccccttgccacggatcgaccaactcgtggattcgacagctggctgcgaactcatcagcttcttggatgcatattccggctatcaccagatccacatgaactcggccgacatccctaagacagccttcatcacgccatttggcaccttttgtcacctcaggatgtctttcggcctgaggaatgccggcacaaccttcgccaggatggtgtacaaggtcctttacaagcagttggggcgaaatgtggaatcttatgtcgacgatatcatcgtaaaaagcagcaaggctttcgaccacgtgttcaacctacaggagaccttcaacaacttacgcgcggcgggtatgaaactgaatcctgagaaatgtgtttttggtgttcatgcgggcaagttgttgggtttccttgtttctgaaagaggcatcgaggaaaaccccgagaaaatcgatgccattcatcaaatgaagcctctgtcgagcgtacgtgaagtacaaaagcgcgcaggccgaattacggcactcagtcgattcctctcaaaggcagccgaaagaggtttgaccttcttcaagaccctccggggcacccgtat

SEQ ID NO: 19309 - DNA, 675 bp, Oryza sativa
ctttttggtctattgaaagaccttcggtcattgtctacgaaatttagacaaagtcttacaacgatgccaagagaaggacctggtacttaattgggaaaagtaccatttcatgggccatgaaggaatagttcttgggcatcgagtgtccgaacgaggaatcgaagttgatcgggttaaaattgatgttatagatcagcttcctcctcctgtgaacatcaaaggaattcacagcttcttgggacatgccggcttttatagaaggttcatcaaggacttttctacaatcgctagacctctgaccaatttgctagccaaggatgcgccctttgtgttcgatgacacgtgcctaaaatcttttgaaattctcaaaaaggcactcgtctccgctccaatcattcaacctcctggatggactctgcccttcaagatcatgtgtgatgcaagcaatttcgctgttggtgcggccttgggccaaaccaaggataaaaatcatcatgcaatctgctctgctagcaaaactctaaccggagctcagttgaattatgcaactaccgaaaaagagctgctcgcggttgtttttgctatcgataagtttaggtcttacttagtgggaggcaagctgataatctatactgatcatgctgccttgaagtacctgctcactaagaaagatgc

SEQ ID NO: 19310 - DNA, 3097 bp, Oryza sativa
ataacggttcttaggcatagttgtttccttctccatgaaattctgcataaatttcaccaggctgtccattttgggtggctccacttcgacctcttggatattctgtgggttcggcccatactttattctgaccatggagtattgttccgtcctcggttgaaactcaaacttctcttccttgccgttgacgtggaacgggcgccccaggatgagcggcgtctcttttcccgtgtccatgtccagcaccacgaagtcaaccgggataaagaaatcccgtgtcttgactgacacatcctccgctatccctgccgggtaacggactgacgaatcagccagttgaaggcgcatcggtgttggtgccaacactgtgaagttgagtctatcgaagacgtctttcggcatgatgctgacactggctcccaggtcgtataaggcctggtcgaattgttgtgccccgatctagcaagtgatcgtaggacacccctgatttttcttcttctccgggagcttgtggagtatcacgttgctgcattgcttgaccacctctgttgttgggagcggtctcttgttgttgactatgtccttgagataacgggtgtatgttggtacttgcatagcatccaacaacgacacgttgatatggatcttctggattacttcaacaaaacgagcgaattgctcgtccactgacggtttcctacaccgttggggaaacggcagcaaccgtgtgtcgcagtattcctgcggcacggtcttctctggctgaacctctttgtcagccgagtcactagatggcgcttgttttgatatcccgttagttcctacagggttaggatatagcggatcacgagtggacttacatcctctcgtcgtgatcgccttgactttacctcctcacgagtcgggtcgccccagaatcctcccagtttcatttgcagggtttaaggatgccaactgagctagctgggtttctatcattttattgaagctcagctggttttgaaaagcagaagcgaagccatctaacttgacattaatgttttctaggatcttatcattggccgcaagctttttgcttaatgcatcggtggttttagcttgcgcaaaaacgagatccttcaaggagggctgttagaaaaattaccgttgttgttacctccttgataatataggcgtggttggttccacccctaacctccttgtgaacgatacccattgttgttgcccatgtacatcgcctcctcacgggtttccgggtagtcattcccagaatgacctgtgttgccgcagacctcacatgtgacgtgagagtccaaggccttgacggtgccttgtggccgtttctcgtggtcgtccaagcatttcatgaggaggtccagcttggcagcaagtaactccgactccttgacggtgtgcatgcctcgctgacgcatctgaagtcgttcctcgttccaacccatattggagaccatcttctctattagttcaacggctccttgaaccattttagagaagaaggctcctccagctgccgcgtcgaggtgatagcgggacatcggggtgagtccattgtaaaagttctgcaggatcagctagtcgtccatcccatgatgaggacaggcggccacttactcctgtagacgctcccatgcttcaagaatagactcatctcttgtctgctggaaactggaaatccttccatgaagggcattggttttgcccatcgggaagaatttcgagagaaatgccctagagcatttgtcccaggtgttgacagcagcacggttggcatagaaccactgcttcgctctctcaagaagggagaacagaaatagtcgtagcctgatggtgtcgggactgacgcccttgatggtgtacatgctacagatcttcaggaactgttgcagatgagcattggcatcctcattaggcttgccacaaaacgggctagcctgcgccatcgtgatgaggctagagttcaagtcgaaatccacgtcgcctatgttcacctgtggcccaatgaccacattgtcagcagagggagcagcgaactcgtggagagtcttgttagccatagtcttgaacgtcggtggcgctggtacggttggtttctttgtcggtagagttttctgcggagcaactacttgaggcctgacgctccggaagaaagcgtcagaaatgcttgttggtatttcttaacgacattactagaaatataatccccggcaacggcgccagaaatgcttgttggtatttcttaacgacattactagaaatataattcccagtaatggcgtagaaatacttctggtatattatggttacagagttcatccgcaagcgcacggatataccattgtagcatttcacccgagagtattccaagggtatcgtatttatttaatcccgtgagaagatcataatagagagaaccgtactaataatttatatattacttgtaataatcatagtcaaagcaggggttaatataatccaaagggtagaatgacacacaagaatgaagctactcattctcctactaaattatctaagctaagtggaaagaaaatagaaaagaatatattcctatacttctagtatacatagttgttggtgtttcttaacaacattactagaaatataattcccagcaatggcatagaaatactcctggtatattatcttttgggagatgaagtaagcacaaaggagtaacattttctttaattttcttcacatttccaccatatatcacagacacactttgcacgatcttgatcttgagtatgtttggtaatctattttagtctatgcttttgacttagtaataaatgtgaatgtaagtatgccatgtttgatcccttccaagctccacatatcaaaccttagagtaggaatcaaaaaggtaaaaaggtgaggaattcatattgatacatttggagagacatagtgaatcatttgaggaacttggatttcttttgcaaaatcatttgaaaacttccggaaaaaagttgaataaagattgggtgattagtgcgctaattgctattctgtctttcaaccgctcaaggcaaggatatgcaatgtctcgtgagaa

SEQ ID NO: 19311 - DNA, 1734 bp, Oryza sativa
ttcaagtttgcatatgtcagtgacttttttttaatctaacgatttttttgttcggcttcgtttgttcatcaggtttatgtagatggaacgaccaccttgtcaactcatgaaaggaaagcgagcattagggaattctatggtaaatgctctaaaatgttgagctgagattttctttttctttttcttggttcacaattgagaggtgtttactgtctaaagtgttaacattagcctgcattgttttcagctgttatatttccctcactcatgcaactccacaagggtatcagcgatgtcgatgaccggaggcagaaggcaatctgtactgagagatacagaagaagagatgaggatgagagcaagaggcatgtttctgagattgatgtcgagagagaggaagagtgcgggatttgcatggagatgaataacaaggttgtcttgcccaactgcagccatgctatgtgcatgaagtgttaccgtcaatggtgagaatcaaatccttccatcccaaaaattgtttgtcatgttcatcactaatggttaatcgatgccgtattggtccttggtaacagtctgagatgtgtttagttcttcaattcaaagttagtttagtcaaaacacgagtaaaactctgtccagatatagtggaccattttggttctgagaggttaatagcagcacgctgttttactctgtatgaatggctctgcacaataaataagatggtgctatgctgcaacctcattaatagatctgtacctgattattacagcaagacattgcatatttttcagtcattgcagcaaggttgtcagctttgtgcttaactcttactggtctttcagagatcactttttctttgacactataatttagctcctgtgaaatcccttctatggcataaccccactaagcaaatgatcccttgcaaagggaaaaacagccttaagaacatcagttcagtttcataatttcccaaacttatgtcaatacatagctctgcaaaaactctgccaccaaagcatgtagtaccgcacgtaaatgacagtactaatgtttatgtataaaataccttaccagttacatgaacataaggaattcaaaggacatacatatcaatttatatcttcagtacatgaacttaaaaatagcttctctgctatatgaataactatgtggtcactggttacgaactctcttaagatattgctgcattctttgaaccatgtgctatccttgttgcaggcgctcaagatcccagtcctgccccttctgccgtgacagcctcaaaagagtaaattctggtgatctgtggatgctcacagatgaccgagatgtcattgacatggcaacgattactagagagaaccttaggcgcctgtttatgtacattgagaagctgcctcttgttgctccggacaacatcttctatgcctatgattctcatgtaaaataaccagagctactcataatgacctactcataattgttttcggagagtgacgcatgtcttattcattcatgcagaggatgttccttgtcgtaggatgtggctaaccccaggagcagactgaactttgacaagagaacttgtgaattctgactagatccaatgctgtggtcagatgttgtaaatgcttgtacagatttgtaatttgcagtgtaaaaaaattagtgaggaaaaaccttgtgttccacattgaactcctagtgtgaaattccaagtacatatat

SEQ ID NO: 19312 - DNA, 1787 bp, Oryza sativa
gtacatgctaaatatctctacttcatagagttggctcctggaagctcgtcggaagtcctgattacctctgcagattcaagaatccgtgttgttaatggtgatgaactcgttcacaaattaaaggtaatgcttcattcactgtacttgtgtatcctctagacgttgacggatgtagaacacctagaaggaacctggccgatttaaagtagtaagtaacccaaattcaagtgattcatactttggaaaacccccacatcccacctatttacctcagttcctaacatgttcacagatcaaatcataggttccatttccccaatttcccccgatgggtgtgtttagttcacgccaaaattggaagtttgattgaaattggaacgatgtgacggaaaagttggaagtttgtgtgtgtaggaaagttttgatgtgatggaaaagttgggaactaaaccaggccctaatcacaagaactgtgcacttgattggtgcattagctcactcagtaggccagtatttatactgtttcacttacattttatttgatcttttcaccagggttccgaaatacaagtagccaaatatccgcttctgtagctccaaacgggaaatatgtggtctgtgccagtgaggactcccacgtgtatgtctggaggcatgacaatacttcccatccgagcagaagcaggagtgcagttgatgtaaccaactcatatgagcatttccattgccatgatgtcactgtggctatcacatggcccggcgctgaatcccgtggctcattcgggtcccgtagcagcagaaacagtgattcagacgatgcagtgatgaacacgggtcgggatgcccctgtagagaacagtgagcatgatctgaatggcactgtcaatagatgcaccaagcgcccagtttgtgaaggtgttgcaagcacaagcaatcctccagcggatggagtatcaacgtcctggcctgacgagaaacaatcgtctgccaagagcagtcctggtcactgctcatccgacctttgcattggagctttggatgttcagcgccggtcagcttggggattggtgattgtcactgcaggaaggggtggtgaaattagggtgttccagaatttcggcttcccggttcaagtgtaaagctagtgtgagaatattcagagatgtccgtttgtttactgtatagatatcgttagttttttctccatttcacctagttcttttactagctaaaagatttccctgtttcgctgtcaggttgggagccccagtagctcaatccaacttgctaagcaccacactattttttaccctctgttgatacaaggctttgtgtaattgtatggttaacaaccaatacatcgatttgtttgttcatatattgtttcttggttatacactgattgatatatgaagataatttctaactccatgataatccattgtgcaatcttccctcccagtatggcttttattgaactacactgttcagcattctacagttcatttaattactaggagcacatgctagaatcttgatggcaacaaactcttattattgtcattaacactgcacatacgtaaacacatcttccagctacagatcacgattcactgatcccaatgataatcaccacatcattgtgcaagcgtatgaaattggtgagagaagaaaactgcaaacaccacgttggataattgagctgcttaattacattcccaataattatatcataatccctagctcagcaaaatatacttcataccgatcgaagaacacactacctg

SEQ ID NO: 19313 - DNA, 2525 bp, Oryza sativa
attcctgcagcccattgttgaattctgtcaaaaatggatttatttgtgtgaagtttgtgcattttgaacaagtttttgattggattatgtgtgacgactgatcagggtaacttgagcgcggtggtgaaggagccggggttccttagcgtgagccagaaggccaagaagccgtcgctggtggtgagggcggtggcgacgccggcggcgccggtggcgagccccggcgcgggcacgtcgaaggcggacgggaagaagacgctgcggcagggggtggtggtgatcaccggcgcgtcgtcggggctcgggctcgcggcggcgaaggcgctggcggagacggggaagtggcacgtggtgatggcgtgccgcgacttcctgaaggcggcgacggcggcgaaggcggcggggatggcggcggggagctacaccgtcatgcacctggacctcgcctccctcgacagcgtccgccagttcgtggacaacttccggcgctccggcatgccgctcgacgcgctggtgtgcaacgccgccatctaccggccgacggcgcggcagccgacgttcaccgccgacgggtacgagatgagcgtcggggtgaaccacctgggccacttcctcctcgcccgcctcatgctcgacgacctcaagaaatccgactacccgtcgcggcggctcatcatcctcggctccatcaccggcaacaccaacaccctcgccggcaacgtccctcccaaggccgggctaggcgacctccgggggctcgccggcgggctccgcgggcagaacgggtcggcgatgatcgacggcgcggagagcttcgacggcgcaaggcgtacaaggacagcaagatctgtaacatgctgacgatgcaggagttccaccggagattccacgaggagaccgggatcacgttcgcgtcgctgtacccggggtgcatcgcgacgacgggcttgttccgcgagcacatcccgctgttccggctgctgttcccgccgttccagcggttcgtgacgaaggggttcgtgtcggaggcggagtccgggaagcggctggcgcaggtggtgggcgacccgagcctgaccaagtccggcgtgtactggagctggaacaaggactcggcgtcgttcgagaaccagctctcgcaggaggccagcgacccggagaaggccaggaagctctgggacctcagcgagaagctcgtcggcctcgtctgagtttattatttacccattcgtttcaactgttaatttcttcggggtttagggggtttcagctttcagtgagagaggcctgtcaagtgatgtacaattagtaatttttttttacccgacaaatcatgcaataaaaccacaggcttacattatcgatttgtccacctaaattaagtaattaaccacttgtttaggggagccaaaataaaccttaccaaattttggcaatttgataatattgtcaagttttgacatgatttattttatatttaccaaagtttggttaaaaaactaaatgaatgcgtatctttgttaactttacttaagaaaatagtatggtttgaaatgacattaatacgatccttaattaatccatacgaaaattagaaacaggatggtgggctccaggccggatgcaaggcccagtacccaatccaaccggcccgtttcttcatttaaatgggccgaccagcactggcccattaagccacttctcacgccatgagcgctgtcacaccgtattcgtcgccggaagtcgtcgacgtcgaggggacgaggagcccaccggcgagcggtggcgccacgggggaggaaggcggcgagctgggcgtcggcgagaactcgaggagaccgacgagaggccagtccaccaccgcgcagccacacaggcacggggaagagtggcgcgcgcggccgccggagaaggctatggcgtggatctggatgctcatggcggcgggggccgtgctcctgtgggcggtttctctggggcgggtgctctcctcctcctcgccggcgtgtctgcctgccaactccaccttcctctcccctcctcgcggcgacaggatgagccggaatgtcctcctcgttctcgcccaccccgacgacgaatccatgtactgcttcttcctcctcatgtctcttatcgtttgcgagcctcgctgtgtaaatcgtggggctacagttccagtaaccgctaacaatgaagcttaataggctaactcctgtgcacggtacctgctcgatgaaattcctgaacaagtgaacagtttttttttttttgagctaagggagcattctccctccatttccatttaacagaaatgaaacaaagttcttacaaaagcaggatgattacagaaatgaaactaagtgaacagctgaactttttattattttgtggaactgtttaggggaaatcttgtttatagtatttgttttggttgattctgattgattgtcatgttgctgatacaggttttttgctccgactattcttttcctcaagtcaaaaggtcacagcattcatatcttgtg

SEQ ID NO: 19314 - DNA, 3482 bp, Oryza sativa
gcttcgagctttactgttctgaacaactttaaaaataaaaaatatagtgaagaaacaggagcatcaagtgcgcctatctgtattatatgccatttaaaactgtattagttaatctgttccaaatctcagtgcggtgttgctgcaaacaggtacccaggttgagtacatcatatgattgtgcaagtgaaatgcctttttcgtcctgattttctagacctcaaaatatggaaattttgcattttgttcattccgattcccctatttactcctgcaatatttgttgtcattttagattgttgccttcgattcccgaggagtatcaggccatccaaatcattgcgatgttcatcatggaatctggttagttcaactttgttgtttagcatttttagaataacaactgtttgagtttgatgccctcttgtaagaaaaattttctggtactgatgtattttatattgttagcttgtccgcacaagcttctataatatctacatagttgttaagttacatatcttgtcaagtcacaacatgttctgccgaaagaaagtgtattacctaacttcaacataactgtggcctcccctttcccatcaccacacccctttgtaagggttctctctttctctcccatgatctcatccctttcatgcatatataatataagttgttttggggtcacactttaattgaacagtttggctaattcatgtatgtcatgactatggcctgtagctcttggttggtgatgtgcacttattccatctatttaatgccggatttgcttacatttctttcacttatgacagtctagattacacatatgtagcatatttctgcagggtgtttctagcatttttctttggagtcttaataaatctatttttctatgaacagcaagcttctgcgtgacaacgggcaaggacacattgaagcatgggagcttgtaaaattcttccctgatatcctagctttattttcttcacgttgccatatactctacttattccagagtctaaaagagcctgtgcattgctttcttgaatttatgaattgcgtgcttaaatgcattgatatcatcattttcgttggaagtaaagacagaaaacaataacactacacatgccttctctgcatagatttgaattgcttgatgtgtctatctcatttgatggctaatttctatgatttttattggcactaggctagttaacctctaaacaattccctgtgaatacattaatttgaagaagctaacctggattatgcctgtttatttggataggtaagcttgaacatttttcgcaagtacagtggtccagttgacatttggctatcttccaccctctcctcaagctcaaaacaaccaacttatactcttgttaataatagcccttccagaagctttgaggcaatggcttcacacaaaagccagtgggtttggtaagttgaaaattttgttttcactacttaaatgttgtctacttctaggaagtactatatatattgtgtggttcaaaattatcacttaaaaagaagtttctaccttgcaatatagacgtagtacctcataagaatcatccctttgacacccaaaaaaagtcatggccaacatatacaatctcaattgtttctttgactactgtaagactggttgtttgtatttttgagaactcattgttagacttgttttttgtgtgatactgcatgatgggaaagaaatgaagcatttaaggggctcaaaattctcaaaacttgtgtgttttacaatatattcaggaaactgacattttgcttgtgtttataggttcaggagattgtttgtcctattctcaagctacacatacataaatgtgctccaaaaaatttgaagtttgttgtcgtgccaaagcaagcaccttccggctcagattgtcaaatgcctgtacatgcagagtgccagagtgtaagcgggaagcttctctgaagaaagacaacaatgttgacattggatcaggaattcgaaagatactgaaatgtgatgatgaaatgcaacagtttaggaacctttgtgattatatgccctttatacttgtgttgtaggccatcgattgtgttcatagagttagattggacctctgtatcctcagctagtttctcttgcttgaagagttattgccgttgttggacgatcaatctatattgcagtgttacacaaggtaactgatgaactgatattactatgctgtcgctcaagctgtattcaagccagacaattttgtcttctttttgagctttatggacttgattgctaactactacaattgtagattgagaatttgagttttgatcaagaagagcggtaccattttactcctgaaagatataagctactcctccgtagcattttttttcctgtgaaactaatgcctttgcaaacgagacctacctttttgtgccggcaggagtacacaatctcgggccctgtgatttagatgactgattggatttttgtcacagattatctacttacttaattatagagataaattaagacttctataacaagtggtctaagcaatgcatagaagatttttttttttgaagtgtgaagtaaataatctgtttcaataatccggtgagtaatacgtaatatcaaaagaacagaggccggcgtgcaaggttgttcagaaccatctgttcatccatgaagtgcaagtactgcccagcccaatgccccaagagcccacagtacccttgtcagaaatcacgagtagtacaagggcttgaacacaaaatgacccatttgaaaattcgacctcctccgctttggcgttgaacagcaaatcgcgtgtcaaaactcaaaagcggacagaattagaaacttataaaatctctctcgctgcctccacttcttcttcctcctcctcctcctcagatccagcaatccgcgataccaccattagtaccattcgaagcgccgccctctactcgccggagaggaggaagacggagcaaagggagcgcatcagataagcagaaggcatggggctccccggcgccgagccgccggcggccagcggcggcggcctccctggattcttcggcggcaagagcaagtacgtccgcatggacgacgtgctgccgcaggagcaggaggaggacggcgtcggcggcggaggcggaggcgtccgcgtccgccggagccacagcagcaggcgctacgtcttcgcctgctctgtcttcgcctccctcaactccgtcctcctcggctacggtaactaatctcctccgtttccacatgaatctctctcgcacgtatatgtgttcgtgttggctgaatcgatggagaatttcgatacgcgtgcttggatcttggcaagttcttggtgatcctgcacaaggagtaggaaatgttttggccaatcgcgttgactatttcttcttcattagtcttcggtctttgatggcgactctccagcttattccatgtctgttacctt

SEQ ID NO: 19315 - DNA, 4487 bp, Oryza sativa
atgctaatttcagtcaacggcagctagctcgtagtagctttttttttttcgacagcattttagcaacacactaaaaatttgactagaactaactttttcttttaagataatggaattgatttcattaagatgaaattgcacccgggcaaaaattaagtttaagataattacacacaaaatgcatatataattcaatttctgtgtggtaataaaccttttgttcccagatgttggtgtgatgagcggctgcattctcttcatccagagagacctccacatcaatgaagtgcagcaagaagtgctcgtcgggtgcctcagcttcatctccctcctcggcagcctcgccggcggaaggacgtcggacgccgtcggccggaaatggacgatcggcctcgccgccatcgtgttccaggccggcgcggccgtcatgacgctcgccccgtcgttcgaggtgctcatggtcgggaggctgctggccggcgtcggcatcgggttcggcgtcatgatcgcgccggtgtacatcgccgagatctccccggcggcgtcgcggggctccttcacctccttcccggagatcttcatcaacctcggcatcctcctcgggtacatctccaactacgccttctccggcctcccggaccacgtcagctggcgcgtcatgctcgccgtcggcatcctcccgtcggtgtccatcgcctttgcactgctggtgatcccagagtcgccgcggtggctggtcatgaagaacagggccgacgaggcgcgcgaggtgcttctcaaggtcaccgacagcgaggacgaggcgaaggagaggcttgccgagatcgaggccgccgccgccgtcgcgagcgccggcaagtacggcgacaagacggtgtggcaggagctgacgaggccgtctccggtgatccggcggatgctcatcaccgggctaggcatccagtgcttccagcagatcaccggcatcgacgcgctcgtctactacagcccgacgatattccgggacgccgggatcaccaccgagagccagctcctcgtcgccaccgtcgccgtcgggttcttcaagacggcgttcatcgcgcttgccatcgtgctcatcgaccgcgtcgggaggaagccgctgctgtacgtcagcacggtcggcatgacggcctgcctcgtcgtgctcgcggcgacgctcgccgcgctcgcgcacgggtcggcgtccaggagcgctggcatcgccgtcgccatcctgaccgtgtgcggcgacgtcgcgttcttctccgtcgggatagggcccatctgctgggtgatgagctcggagatcttcccgctccggctgcggtctcaggcggcggcgctcggcgcggtgatgaacagggtgaccagcggcgccgtggccatgtccttcctgtccgtctgccgcgccatctcggttgccggcgccttctccgtcttcgccgtcatatccgccctgtccgtcgtgttcgtctaccggtacgtgccggagacgagcggcaagacgctggaagagatcgagctgctcttcggcggcggcggcggcgacggcgaggcggcgcggggagaggtggagctcggtgacggcgagcacctggtgcacaagggatgaggatcttgagttattgaccaaatggatcaatgtgaacttggccatttttttaggtgggttttaacagtattactagatactggtgttgcggtgaatgcaaattgcaaaccaaattgttttgttttagagcactaataggaaagaaaatatctcatactcttttccaacttcagaatcctctgtagcatcaacgaatcatacagtgtaaatgttggtgccactgtgccagtcaatcagtcacagttggtaatgctagtaagctacacttgcacatccatgaaaccattacagtgaatgtaaatagattctgaactgaattattcaaattcattgaaaaagagcgaatttccagtgagttatatgatattttagcaaatagaagaaattttatgccaaatggaagtttgacatctaaccacatggtataagagcaattatctcgagtgaatattcagaacaaggtgatacctcaagtttaatactctgcaattcagcaattgtgcaagttcatgccaaaatgactgaccacagctccaaaatttcactctaagccttactactgaatacacaataacacaaccatgaaaatgtgggcagattcctgatacaaattttgacaatttgactttttgcaaaaactatttttacaaatgaaccgctgccaaaacttatttcaaatctgacccttttgctcaatgccaaatcatgtggcgctgaacttagacatctcagcgccacgttagctggcgctgaatgcggtgccacgacggatgggagactaagtcagcgtgccaacgtacattcagcgtcatgctatttggcgctgaggtgtctaattcaacgctacacaatttggcgttgagcaaaagagtcagatttgaaataagttttggcaacgattcatttgtaaaaatagtttttgcaaagagtcaaattgtcaaaatttgtggattcctgactccaactcttttaagctgaacaggtagtcatcaggttaccaaacatataaaaacgcctcattagtcttaaacaaatggttccctccttgtttcttcctcctcctacagtctcctccttcctccagatccaattgctagtccttttcccattcacaagccacattcttggagcttgcaagaggagagaagaggatgagccaaccatagccagagcacagcacaagaaagacggtgagaatggggcttcgtgccaccgaggcggcgacgggcaacggcggcggcatgaggagccttccggatttcttggggaggaagagcaagtacgtgcgcatggacgacgtgctcccggatgagcagggagatggcggcggcggcggcggcgtcgttcgtgtccgcggcggcggcggcagcgggagatacgtctttgcctgctctgtcttcgcctccctcaaccatgtcctgctcggctacggtgagcccctctcctgaatttgactgttcttgattcagatttggttgtattacacataatcaggggtttattttctgattaaagcaagatttgcagctagtaaaatatggggattgtatgtcatgttaatatgcttttagaagatgaagtgtttgaaaagttatcatcactgacagcccactctgcttcagattcagatgaaatgtaaattttgaccggtaatttggttcagatacttgttatggttgttaatctttatctgagtctctctctcagacagccattgacattgtttgtctcgtgaacaatcgatcaaactttcaaatggatgaaatatctttgcacaaattgtcaaatcctgtgttacatcgtggctgttaattttcagatgttggtgtgatgagtggctgcatcatattcatccagaaggacctccacatcagtgaagtgcagcaagaagtgctcgtcgggtgcctcagcttcatctccctcctcggcagcctcgccgccgggaggacgtccgacgccgtcggccggaaatggaccatcgggctcgccgctgccgtgttccaggccggcgcggccgtcatgacgctcgcgccgtccttcgccgtgctcatgatgggccggctgctggccggcatcggcatcgggatcgggatcatggtggcgccggtgtacatatcggagatcacgccggccacgctgcgggggtcgtacgcctcgttcccggagatcttcatcagcctcggcatcctcctcggctacgtctccaacctcgccttctccggtctccccgaccacatcaactggcgagtcatgctcgccgccggcatcgtcccttccatctccgtcgcgttcgtgctgctggtgatcccggagtcgccgcggtggctcgtcatgcagggccgggccgccgaggcgcgcgcggtgcttctcaaggtcaccgatggcgaggacgaggcgcaggagaggctcgccgagatcgaggaggcggcgcgcgtcacggccaccggcaacggcaaggccgtgtggcgcgagctcctgaggccgtcgccggtgatccgccgcatgctggtgaccggcatcggcgtgcagctcttccagcagatcaccggcatcgacgcgctggtctactacagcccgacgatattccgggacgccggcatcaccaccgagagccagctgctcgccgccaccgtcggcgtggggctctccaagacggtgttcatcgtgatcgccatcgtcctcgtcgaccgcgtcgggcggaagccgctgctgtacgtcagcacggccgggatcaccgcgtgcctggccgcgctcgccgcgtcgctctccctgctcgcgcacggcgcgctgccgcgggcggcggcgatcggggcggccatcctgacggtgtgcggcttcgtggcgttcttctcggtggggatcgggccgatcaaca

SEQ ID NO: 19316 - DNA, 4390 bp, Oryza sativa
gatcacaacaggccttggaatgagatggaactacctcgcaacgcaaaagatgtacaactattctaggcttgcactgaaattgttattggaaacgaaaagaaaatcctattctggaaagacaactggctacaaggaatgtgccctaaagatatggccccaaacctctttcaacttgcaagaaggaagaacaaaaatttaataactgaacttgatcacaaccattgggtctactcattcagagaaattgacaatggtgaagtaatccaagagcttgtgcatctcggcagccttcttactcaaacacaactaacgtcagaaaatgaagactacataatctagaagagaaatagcaaaggtatatattcagcccaaagtgcatatcaattccaattcattacctgtcaacatgatcagaccttcaaagccaactggagagcccaggcattacccaagcaaaggttcttcggctggctcatcctgcacaaaagagctctaacagctgaaaatctgctaatccaccattgggaatgtgattggatatatcccctttgtagaagcgcctgtgaagacactgaccatctttttagggagtgtgatttcattagaaccacttggagcctagtggcggtagctcagggcatgcaaactgcgataaattcaaactccaccgctgaatggatgatggctttagctcatggaaccaataaggctgaatcaaaacgaagagtgggaattctgatcaaaacctggtgacacgtttggctacaaataaatgctaaggtcttcaagcaacaagagccatatgcacaacaagcggcccagcagatcggggaagacattcaagaaaatgagtttgtttttcagcctccttgatgaagtctgctctactgctttctttctttctctattgcagtctacctcctatcgtttgtctgctttctttttgcttgctgaaagttgttccgttacgtctctaataatacgctcctaagcgatttgtaactcatactccctccggattgataataccttgtcgttttggacaaggacatggtctctaaaaaaacaactttgatcattatttaaattgttaacaaatatatgatcatattaaagtattttttaagactaatctatacatgtagtcatcatatttgaaagacaaatattttaaaaatgattcataatcaaagattgtaaagtttgacttcacccttgtccaaaacgacaagtattatcagctcggagggagtagtaaatttcaccttaattaaactatataacaataataaaattaaaatagccttcacccgttgtaacacacggacatcttttccagtaaaaagaaaaaaagggaaaaataattctccgtattgggcctaacgtatatgaggcccatgctctctagtagcacctaaaattaagcccaaaagggaccgatcagttctattacgaacggattagcgaccattaattaagagagcgcgtgacggattaagcgaagcgaaccacgcaaataatactacacacgcgcgtcacggacaccacccagtcccctccccacaccacgcgccgcccaaaacctccgccgcgtttcgcaccaccaccaccgccgccgaccatggcctccttcttcgccgacgacggcgccgacgagctcccccgcaccgcctcccaccccttcgacgccgacgacgacgccgcgcccgatgcatcaggaggcgccgccgccgacgacaccggatacggcggctacgcctccttcgtcgacggcggcgtagaggatgtggaggaggaggaggaggagatcgccgtggagtccgagggggtcccgatcggccacgtctccggagggttctcgccctcgcccttctcccccgacccggagctggacggcggcgacggccctatcctcccgccgccggcccagatgggggcggaggaggggatcctcctccgcgagtggcgcaggtgagcaccgcatctgatctgtccgggcctttgccgtttcggctactgcttgcttgctttcgctggtgctagggttccgacgcatcgagcgagatctaacgcttagatctgatatttcgcctaattttcagctaggtggggcggaatagagtttgtagtgaggctgtattatcgtattatatgtcgattttagttaggatgaaacttgaacttgttgtttaggaattgcagtgattgattaggctgaggcttcaactggttctgaattcttagctagtggtactgaatttagttagtgcaattgaatctggtttggcaggagctgttgttaaatgcctttgcttgtgaggaaagtttgttagctctggtactggtatatgtacaaaataatcgctagttagcttctactcatagaacaacaagatgcttgatcagtgttgcacacactccaaaggggaattgatgtctttgcatgtgcattaaaaggctcatgtttcttgtttagtgaagttaaaacactttaagtacttgaaccattcttctctatcatcatggtgtggaaatgagcataaggccaatctcattttgcaattcacccatggtctgttacatgtttcaactttcaagataagcctcaggcttaagcaataatgcagtacacgtaacagttttctgagttaatgagcaaatgcttagtttatcttgagctatcttacatgtttcttggtgaatggtgatattaatcctaggtcttaccatgatgatggttcgcacccttactccttttgatgcttgtcttaggatgctttaattgatcttaaaatcagcttgatttgccagaacataaatcaccatttttagtgctatgccacatgggcatggaacgtgctcggcaaaggtgtgtgccaacaggagcaaactggctacttgtttgtgcttctgaaatttgcattttgtctgtcatgatcttatattctgcacttgcacgctcttctgcacctgtcaaatttttagtagtttcatgtatatccattctcagctcaaattttgtaaggtggtaatgttagcagttttactaccagtggtatgtgtttttgtgcctaatttatcctgtgcttggtataatctggtcattacaattgcaacagtatattttgcattagtatatagcgcaggtgagccacatctgatctgtttcggctatgccatttctgctattgtttgtttgcttccgtgggagctagggttccaccccttcaagcgagatccaacgcttagatctgctatcttccctaattttcagctagggagggcgtcatacagttgtagtgaaattgtcgttaaggaaatggcaagtgatcgattagtttgaaggtacaaccaattctgatctggttctcatgcccctgcagtatcgttcttcaagagctgctgtttaactgcctttgcttgtgaggaaagttttctagctctggtatacgtacaaaataatcattacttaacttttaccgatggaacaacaaggtgcttgattcattatgcgcacactccaaaggggggctgatgtctttccatgtgcaataaaaggcttatgttgatttgtttagtgaagaaaacctaagtacatgcaccgatttcttttttcagcctggcatggaaattagtgtgaggccagtgtcattttacaatacatgtatggtctattacatgtttcaactctcaagataagcctaaagcttaagcagcactgcagtaggctaacagttttgtgatttatgatcacaggcttgtaaggctagtttgtcttgagctacattatctgttttcttccagttggatatcttggtgaatcctaatatttatccagaacttactcctttggatatttatgtcctctaatgtatcagatgctttatgtgatcttaaaatgagtttgtagtgccagaacataagtcactgcttttagcgctatggttggccaaaggtgtatgccagcatgagcaagctgtctacttgtttgtgcttctgtaatgagcactttgtctggcatgatcttatattctgcacttgcacactcttctgcaccagcctatccagattttttgttagtttctcgtatatccattctcagctcaaaagtttgtaaggtggtaattagcaattttactaccagtggaatcgtgttatgcctaatttatcctgtgcttggtatgatctgaacattgtaatcacaatattatacatcttgctataatgtttttgctttggctgttctctagtaactgttttccttatcatgtaaaattatattatgttcatgatctatcttttgaacagcatcactattgtttcaggcaaaatgctatagttcttgaggaaaaagagcggaaggagaaggagctacgggcccagatacttg

SEQ ID NO: 19317 - DNA, 1634 bp, Oryza sativa
ttcttccctgtggatactctgtgatcataagttcagaactgaaagcgcaactgagtgatggattatacacgatttctctctcctgtgccatgtctacagaagctgttctgttcaattgcccccaaaattaatgtccaacaagcagcgatcttgaattgctctgacgtaaacaagtcaggatcaacctactactatttacaagatctagatgccgcaatttgcacaaggaatggaaagaaacaacacgattcacaattggcacacatctaaacgtgtgccctctatgcactgtcactcaactcaacatgcaaaggtaagacaagaaacatagacccagcatcagcatcaatcagcctggtgatgttttccttccattttcaccttgggctgatctcggacaccgtgggtggcaccaccgtgctgaacatgtcggaggtgtcggacgccgagtgcttgaacctcgagttgctggagttggtggccttggagaccgtgccattgtagtcgtggatgtagcccggcgccgtgagctcgcgctcgttgatgcggatgggcttggacagcatcgtcaccacctgcggcatcgacggccgccgcgccgccgccgcctgcgtgcagaagagggccgtcttgatgtaccggaggacctcctcttcagggtaatctcccatttctgaatccaccagctccttgagcttccctacctcatgtagctcccatgcctgttaattgtgaaagctaggctgagtttggcagcaagagttggtaactcatcccccacacgcacgtaaaacggagcgactcattagtacataattaactaactttttttttttcaaaatatggattaatatgttctttttaaaaacaacttctcttttgcaaaaaaaaaatagcgtttaacagtttaaaagacatgcgcgtggaaaacgatagagatgagttgggaaatatagctgcgtaattaacacggccttaattgatgcagaggctggaattatacttccattctctaataaaagatttagatggagagtccagcgattacggcttaattggaatgtctctagagcaaatgtctgaaggtgaaagcaaatctctgaattttggatagtaaagatgatagtaagactgaccttctctaggagaatcttatcgtcagccaggagactccttgaactactcttgccacttacgatctcaagtacaaggacgccaaaactgtatatatcggctctcttcgtcaattggccatgccatgcatattccggtgcaaggtagcctctgcattgaacaaatagatcagttcagttactgcaactgcaaggttactttctactcaaacaaactgctaaatgctgaaatactcacgtcgttccagcaacacgggtactgatgtgggtgatattatcagggaataacttggctaaaccgaagtccccgatcttggggttgtaaagcttgtcaagaagtatattgctagccttgatatctctgtgcacaatcggtgacgcaatctcttcatgcaggtatgcaagtcctttggcgattcctatgcatatagcagatcttatgctccaagtaaaatttgcaggttcgctattagaacctacagaacacaagataaaaggttg

SEQ ID NO: 19318 - DNA, 2368 bp, Oryza sativa
aattactagttcatatcacaaacttacaaggaatgtaaatgtctagatgtttatatggtaaagtatgcatctagtatacagaatagcacctttgacatcctaacggcaagaaaggtatgaataacagcccaaattaattggagccccactatggtgctctccattggcattagaaagcaatctgaaccgttaatctcatttgatcgaagggtttagatctatttatactaccatcttagttagcagtaatagaaatgtggaggggcattattgtaaaaaaaaaggtgcggagaggtataatcgtcatcggtcctgcttgtttctgcatcagattataacttaaaacaatttcgaattttaaagcttgatttctaaagactagttttagataggtttttcagctttccattttagcaattactatgaaactagagccagacaagaaagtggcgaagaaaaccactaaaattagtcctaaagtttaaaatctaatctgaagctcagccaagcaggcaccaagtctaggaaagcgattgtccaacccaaaaattattcgtttatctccttcgcaagtgctatcgcccaaccagatccaatcaactgtcgcatgtcccttttggttgggccatccattgcattaagccattgcgtcatgctccaatatggccctagctacattgcagccgccacctaaatttttggggtatgattccaaaaacaatactacttcatggtgatcacctcaaccaccgaaattctctaaattctaacatccactacttttcttccgcatcactgtacccaaatttggagcaatagtggtatgctgagccgagtattgtccatcacccatcagaaaaagggtaaactttaacttccacaggagaaaaagagaggtgcttgctttttcctttgggtggtgggggtgggttcggctaacacgcaatttccaaacctccctgttcttgcacggaatcctcagataaactgtatagagaaaaccattttctccaatgaaacagtatggagtatatgcattttgcttcgacgaattcgtctcgaagtttcgcggaagcaaagcatatgggacagttagcagttagcacagggttacacgcccagatcaagaaacccaaaaggggggaaaaactgcaatcgatgtagtgataaaaaactaaagcagagattgagaaggcgagagagtagtagcagacgagatccgagttggggaggaggaaggagatgggatgaataccatgggaccgggaggcggtagtggaggtcggcgacgtccctgtaccatgcgcggagcatccagagcgcgtagaggatgacggccatcccggcgagccccagcacggagttcaccgccttgagccccgtctgcacgcagctccgcaccaccctccccgccatggccgcgccccacccgcgtctctcaccaccaactccggctactcctcagctcggtctgcacccccaccccacctgtgcagctgttctccgcgcagcctcgcgtgggagcaaagaatgggaatgggagaccgctgctgctgctgctgatggcggaggttgacggcggcggtggcgtggaatattggggaagaggaggggacgtgtggaggtgggagggaaagaggaggcgatggatggatgggtcgctggagaaatggatgtgggaattttgggttggattgtttcggcacggatgtgacatgagttaattgctgcctgcttcatttattttgtttttattttatatattacttattattgtttttccgtgaaagattaaatgattgttgcttctactctattgtattttgtactaccgtatatacttgtggaaatacgggtttgccgtgacgctgctgtaccttgaaaagaagtgtacttgtagttttttttcttagtcaaacttggttaagatgattaactaaatttatagaaaaatttagtaatatcaaaaataacaaattagtttaataaaatccagcattggatgtctgttttatgttaaaaaatgctactatattcatttataaacttaattaaatttaaagaagtttggctagagaaaaaaaataaacaacttataatatgaaacacctagacatagcaaaatgacaaatctctcggctcttcgcaagacgaacaagaggactaagtaagtacacccataatgagaaagcattagcgtatgatcaattgcgtttcaataattacatacttcaaattatatttatttgatatattttagaggaaattcttatatagaaagttttcacatagaaatgtactatttaacaatttaaaaggcatatcttaattattaaaaatgaagggagctaattagggctgcaggaat

SEQ ID NO: 19319 - DNA, 2307 bp, Oryza sativa
attcctgcagcccgttttgtgactattggatcgtaggtttttttatttgattgtattaggaaatagtcagttcatgtaaaatttcgtgtaaaaaccatcctttccaaagtagaaaaaagaaaaaaaaaacaaattctatattactccttgtggtagcatgtctaaaaaaaattacaaagcaaaataggcgtaactaaaatgattatcctgtgatagaactagctcacctgagtttaaattctaaacttgacattattacttgtatttgtggctaattattttttcggtggtagacgatattcgtcaacaacaagcttctgatgacagtctaggatttgagaaagatgtatttgtaaaacccaaagatcgaactactcctatatgctaaaatctggctgccaaccctagtttcttagtataatcttactattaattctttaaacaggggtagtgcttggtatcggtattaattgcgtgacagtcggcaagtatcagtttcattttcgtattgacttttgatctgaccatttccagcttcaacttgtccgccggatttttttttcattggttcgtagtacttggtagtaggaagtagtacaggaacaccatttcaaaattccaactactacttgtctacttaaaccacacatgaatttccttttagcaaaaattcaaaaccacatgtattgatgtataaatttggagtttgacgtcgcagcagacgagtgctcggcgaaagtcatgtaacgcgcacctttggttttgtgtggcgaggaagattttaacacggaaagcgatttgacacgtacgtgtacgtcaacattggtgatgtccagactctagacttgtaaattgtcatgttggtgccagtatacctgtgaaatgatttcatttttctagtacattttatttctttcacatggaaaaaaaattggacggctaattgacggattgatcctggaaagtacgagtacggtactgaaattgaaaaaaacgagcaaatattatacacgttcgggggttcttttcatcagattttagttaggataggaaattgtagttaggagtatgttaagcacgttcatgggtagttttaaaataaaagcacattcatgggagcgtgagcgtgctgtgtagttatgcatgagtctttcgtctaaacgaaaaaaaacaagaaaaaaaatataaataattatccatgcatggacaactttgaaacacaaacttgccaatgggccaaaatgggctagggttgggtagcccaatcctttcattcaagaggcctgtagcccaatctaacataaaagggaataagttcacttcgtgaccctcaactgtgatcgaaatctaatccataaccctaaaccacaaaaccggatatttcgacccccaaactcctaaaactggtgcaatttaactccctcggcggttttggagggcggttttgctgacgtggcgcctacgtgacgatattgaccgagtcttcgttccacgtgacacttaggtggcattagaattaaaaatatgtgtggaacccattaatcattcacagaaaaagaaatgtgggccaactgacatgtggggcccacatgttagtcctcttccttcttcctcctccctctctcccttctctctctttctctccccttcttccccaagaagctaaagcggcagcgccggggacctgcagcatccctcggctcgtgctcccgcggtacgacgccgcgttggccgcgcccaccggcaacgtctggttgtagcagtcgccgccgccagatgaatccatcgatccagacaaatcacacacaaacaatctcacaaacgaatccatcaatcgttcacgccatgtatgactatgtgtttgctagctagcagcttataggatctggatcttgtcgtcggtcatccactagcggtgggagttgaagacgaggacgtcggcgcccttccagaaggtggagtgcttgttcatgggggcactgcggatgaggcggtcgtcgaggacagcggcaccgtcagagttggactcggcgagcatgggcgcccagtataactcgatggtggcgtcgtagtccttggccctgaagatgttgagcgagtccaccgtctcgaaggatctggacccgccggcgccgggagcgccgcggtggaggaggcagagcagcgaggcatacagcccacagagcagcgagtcccgaacttccaatcttgccgccgccgcgtcagcttccaccgccgccgccgccgccgccgctcgccgccgctccagcccgtgctccccgcggccggccgaaggggagagaagag

SEQ ID NO: 19320 - DNA, 1022 bp, Oryza sativa
ttggccacatccatgtgtccagtgctagcgcatgtgccatgctgtgtaaccactcccagtctacaccagccatgcccaccatgcctgcgcaactgcgatacacgcgcccgtgaaaccgcgagagttggctctgataccattttgtaacgtcccgcctcccccaggcctgtcgcacccgtgaaaccgcgagagttggctctgataccattttgtaacgtcccgcctcccccaggccgggcccgcttacatctgatagctttcataggtcatagactgtcctcacagaccaacacatatcttttctgcacactttatcctcactcatgtgcacccgggaagaatttcccggtcggtcacccatcccaaattgctccaggccaagcacgcttaaccctggagttctttggagattggcttctgtaaaagaagttgcaacttgttgatatgagtattctattaatcctattaagccctagaccgggatgttacaaataagcataagcacaagagtttatcctatcttactataaagttatcccccactaacttcttaagcttaacatgcaaagatgccacatcatcatccactaacaagatgccacatcatcattcactaattaacaagatgttacatcatcatccactaacaatcatcacatttaaacatcatacaaacatgatatatctttacagtttttataatttaagagcttttcaaatacaaacatgttaaattatcatccaacataattacataatgtttcaatgtatatctttattatgttttatgatatcctatatacttatatagttcattctcacttagttcttaaatgattaatctatggtccaaattatctctctctttttttcctctaattaagtcatatcccatcaattgtttttagcctttagatgattaatctacggtccaaactatctccctactttttacgtttgaatcaccattctacatactatttaaatttaaattatcataaaccacattaatttacttaatc

SEQ ID NO: 19321 - DNA, 807 bp, Oryza sativa
atgatgtcattatcaaatggacagaccagaacgtattaatgattcatctgtttttgtgaagtcatgaaagaaagttctgtctcaaccaaacaaaagaatattatattcacaatcgccgagaacattttacattgcttatctaaactgattatttattgttgatgaaaaagcttatgcacagtggagtacgatttattcaaatgacttatggttttcttggtccatttattactccaattttttatatggttgtaggatgcaaaacaaaatggtgcaagggttagtgtagaaacctgtcctcattacctggcgttttcagctgaagaagttcctgatggagatactcgctttaaatgtgctcctcctatacgcgattcaaccaacagagataatctctgggaagctctgcttgtacgccattcttcttattatgattggtttgttgaactttactaaactgttataggctaactggccaactattatatggctaacattaggatggacacatagacatgttgagctcagaccattcaccatcagctcctgatctcaaactcatggaggaaggtaacttcttaagggcatggggaggcatatcatctttgcaggtaagttttttagtgcatatgaataaatgtaccgtgccaagagtgccaagtaacgattttattttcccctaatcttaatacaaattggtcaacgttccaccgctggcccgtgaaaaacattttgagtaaaatcataatggtgaagtgtgaaggcctccagattgtgcttgcatagtagtaattagtttggtatgaa

SEQ ID NO: 19322 - DNA, 1239 bp, Oryza sativa
tcctgcgccccaattatctaaccgcacaaaaaggattttaacagtattgggcaatttcgtcgtgagcaatttttgccaaagcaaaaaatatgcctaagtccctaaggatcacaaccagccacacctaaagtgaagttgggctgaaaatactgttaaggcccaggcccattagtatttcccgataccctagtgaaataatcgcaaaaatagaacgctacttcgtcttccccgccgcgatctcatccattttccccacttctcgctacagtgccaaagttgcgccggcgaaaactagggttcacaaacacacaccaattcgcctcgtccgaagcttcgtgcttttgcgaaaatcttccgcacaaccaccgcatcaatctcccttccaatctccgccaccctcgctccaaatctcatcatccatctcgcatctatggcagaggagagagaaagctttgagagtcaatgggcaccctccgatgtcacagagaagaacttgaaggaaatggtggcgcacggcgttctcccggcgaaggaaatcatcggatggcgtccagcatatggcgaagccttcccgacccccgacactcatgaggtcgttgtattctcccactacttctatggtggttttgcccttccaacttcgaagttctttgggggattcttgaattttatggaatcagtttgcatcaccttaacccgaactccattgtgcatattgcaaactttgttcatgtatgtgaagccttccagggaattaggccgcatttcgccctattccgtcgcatcttctttttgaaaccccaaccaaataaaaacaagccggctcccatcatatggcctaaacagccaaagaataagccaattttaaaattttcaaacttaattttgagattgattttgagatattttcaacgtagtttctttaacaacattggtttttaaatcaccaagaacacatataaaagttttacctacaaattcatttgtatttcctaataagccgttttggcttattatggataaagccaaacgatgggggttgcaatgtgttatcgggggagcaggtttccaactacggggtaccttgagccaaaaatacttctccatgccttttaaaacatccaacaagggttggcacgcaaactggttctatctccaaaatcctgaaccggcgcttcccgagtactcttgtcttcccccaaaatatcaggaaacatggaactcactttcaatgggaga

SEQ ID NO: 19323 - DNA, 4049 bp, Oryza sativa
ttgttatatcgataatatttacattattacaaaggcacttaaggcctgacaatcaaaaataaacagcagcggactagcgggcctacggctccatcttcacaggcgctcaactggggtataagccaggactccacctaagacttcttctccaaagcttctcttactgaaggggggagaaagatagagcaagaatgagtacaaccacagtactcagcaagccacaccggcagatgcatgattaatgtaaggggggtacaaggggataataatataggggttaagttttgcagtaaacagcatttaaaagtcacttagttgcccaaagctattttgtaaacacgatcctagagctatacaatattattaatcaaggtcgtgaacccgcacgaacctgccttaacccaaggcctacgatgattcagaccgaactggcaacccgaccctgggtcccagctcgtcccaagccaacccaggccaaccattccacattttagttgttgagcaaattttaagaattaaaacactaacttgggtacattgctcggcttgcccataaccgagggcgcggctattcgaataggttttactctgatcagaggtgtacatctttacccacaagacacatcttcctcacgtgtaaccacatgccacataccaccacggtatacggacggaagacgtgacatagttcccaacccatcctagccataaacaagagtaccgacccaaccccacctacggccggaacccccgggacaggcaggcaggattgagccccctagcagcaggacaccggccctgtgccatgacatctcgactaccgggccgcagctcgtgtagccttcatttgccctggagaatgtccatcgacccccgacttcatccatctccaatccgtgtacttttgtttataaccagactgagccacaaactaagccttacccactagacatgtggaagtacggtagtgctttgcaacagaggcccgagcttaatccttatagtggccggggtgctacttcccacaactggcatgcacccaaaccccaccagaaaacaggttttaggggttttgaaagaggaagagaggtgtatgtccaattccaccataatccaacaattccatagtgtccaaatgatatgagaattcccaaagtctaaagttataaaaccacctaatgttgcctaattaatcagcgaagcatctacctaaatttatactagtggaaccacgaatagagtacccactagttggggttttgtttattctagggtgaacaaggtaataataacaatagcaataataatgtcttaacaaagttaaataggcatggctaaataaaacagtgataacgcgggaatttaaataaagcaataatgcaataatttaaatcaaaataattttataaactgggattcaatatgttcaaggatgatgtgacttgccttgctcagagagaacggccttccgaaccttcagcgacgaccgcgaaccacgcttcgggaacctccggaacgacgaaagctacgcgaagcacacaagcaaagctacaagcctataaagaagcaataacaacacataaaaagaaagcacacagttctttaggttataacaaacattaagagacttgaacgggtcgattcggagctcgtatgaccaagatatgatcatccgaagtttgatgctgttatatggagatttgcggattattataattaagctttgcaattataaaacatgtgtaagcgctagcctggaagagacaggaaggctgcgctgttgacatgcggaccccacatgtaacctaaaggaccacggtagaccgagtacacagagacggtccacgggtcgacggaagcggaccccgtgtgtcaaccgaggcgagtggccaacaaacggactccactagacaccacacgggctgcacacgtagaaaccacgcggctaccgagcgggcacactaacacggtcaccacacgcacaagcgaacgactaccgacaccggtacacgggtaccggtgtcgacaaccgcacaacgggtacggggcgacaccgaaaggacgagggcggggaagcgagaggacggatccttaccaccacgcgacgaggcgtgggaacgacaacgacgaacgggcgcggcgaagacagctcgggaacgacggaggcgaacggcgagggaacgacttcggcggcgatccttggacaaggcttgacgacgcggagccgaggacgaagacgaggacggggctgccgcggcttgcttgacggacgcggacgacggacgagaacggctcgacggagggacgaacgccacgacgaccgggaacgacgagaggacgacgacgacgacgacgaccgggaccggcgagtaggcgacaaggacagccggcagcggctgcacggagacgaggacggtgtggaacacgccgcagcgatgatgatgacggaggcggtgccgcgagacgacgagccgggcgaccgacgggacgtcgatcggcgaggacgaacggtgacgaggaaacgatgatggcaggcagcagcggctgagcggaggaggggacggcgtggaacgcgctgctgcgatgttggagaaggtggtggtgcagcggggcgacgagccgacgaggaggaatgggtggttggcgcggcggcggcgttccggcgaacttcgggcgaggaggaggtgatgctggggaaggagacgatgccacggtgtcgaaggaggagacagcggcgtcgatcggcgcaccggcgacgaacagcagccggctggagggagtgggtggcggcaatgccaccggttgccggcggggacgcgcctccggtggtctccgcgcgaaacggaggcgacgccggtggaggggaagtgtcacgcccagaaattcccgaatagaattccaagcagaatgtgtattaaaacccccgtccaggaccagccggggtacacaaacgacaatgttgacatacagatccacgtcttacaaacattataaaggtcttacagaaatgcagcggaaaacaaaagataaccggagctaatccttgacttgaactgcagcgggaacaccactccacaggcatcctcgacggcacggacgaagcctactcctcggagaacccgccatcggacacatactcgagctctgaggttggggggaaaagtagagcaagactgagtactacccactgtactcagcaagtcataccggaatagaggtatgatgcagggatttaacaagggatagctaagcaggttcatttgcataaatactggcatttataaacaggaattgaatgcgaaaacagttgtaataattaagcagtattaaacatccgctgtccaacgctaacccacgttgcgacaggcccaaccatccacctaaactatccaaattcaacagattacactagggtgagactaatcacggtgaatctggttgaccgcccataaccgcgggcacggctattcgaatagttttactctgatcagaggtgtacaactgtacccacaagacacagccccacgacacgtttccgtgcgccgacatgtcaccacgacatcccggaaagaggccgtgacaggacccttcgcataaccccctctagccaagcacaccacacctcaggtttcacccccgtccccagcgggcgacgggcagtcccctctcgtgcctaggtgaatccggaagcgacagaggccgtcgcagggcccgccccgctccatcacgcccacccttgcctggatgcgtcgactagaggaaagctacactacaagcccagccgttgcccacgctggcttgtggtaagtacgataaattcttccagggcatcccgcgaaccggtccttaactgccatgggtgcgactagcaaaaccatgcacccacagcccaccatgtggttcattttatttaaccaacaccagagcggtggtattaaaccaacattatcacataaacctatagtctaggttttaaatgagatccccaatgtgtgctagttgaactaagcatggctaagcaattcctagtccaaaggggctgcaggaat

SEQ ID NO: 19324 - DNA, 1188 bp, Oryza sativa
aaagggggagagggagccgaacgtggccgggagcggcgggattcgacggccgacgtgggggagtggggaggagagagaggcgggattcggttttcgaatcccggccatctcgggcgcgggcgcgaacgggagggagaggggaaagggcgcgggagacgcggcgcacgcgcgggcgtggccgacgtggcccgggagagacggaggcgtgggcgcggggcggtttcggcgcggcggcgcgccgggatcggcgggaggtgggggaaggacccgacaggtgggccccacctgtcggcgaccccgagagaggaggcgggcggcggctgccaggctgggccctcggcctgcggccggcccagcaaggaggagggggaggaaggaggggaatgggccggcggcccatccgaaaagaaaaaaggaggaaaaagggagggaaaagaaaaagaaaaaggaaaaggattttccctggaattaaaaattgcactttagtgatttttttttaattggttaaaaattatttctagagctctgaaaattccactaaaaatcctgttaatgaatttcgacatgtagaattcaagaaaaattccacatgtcaaatccgattattatttgcattgttttcttagggttttatcttgatttcctctgcattttcttggggtcatttgaaatttacaatttggcttgggaggaaaacttcggggtgtgacaggaagcagctgcgacgctgctggcggcgacggcgcgaccggacgacgctccggcgaggagggagaggcggctggaggcggccggcgtggaggaaagagaagggcgacggcgggaacgtgcctccggcggtcaccgcgcgaaacggagggcaggccggggtggaggaggtggcggcgacgctggaggaggcaacggcgcggccggccggcgcacggtcgaggcggcacaggcggctggaggcggccggcggcgtgggagagagaggagggcggcggggagagggctagggacaacggggaggctcgggatggggttaaaacgatagaacggagtgaggggatcccattttatagcggagggaagcgaaccgagcacgggagagggcggaacggcgacgggaatggcggccggcggccatggttggtggccgggaaaagcgcggccgttcccgacgattgggggcgccattcaaggggg

SEQ ID NO: 19325 - DNA, 845 bp, Oryza sativa
  unsure (1)..(845): unsure at all n locations
attttcttttcgtttccaataacaatttcagtgcaagcctagaatagttgtacatcttttgcgttgcgaggtagttccatctcattccaaggcctgttgtgatcnnnnnnnnnnnnnnnnnnnnnnnncagtcacaaagccaatgaaaatctttccaaatcaaggatccccagtcctcccaaatctctcggcatgcacacggtctgccagtttactagactcgtccccggtttgacgttctccggttcctctcccttccagaggaaagtccttctcattttgtcaatcattttgatcacccactttggggccggcagggcagtgagatagtgcaccggcattgccgtgaacactgacttaacgagagtctcccttccaactgatgagtaatatctccccttccaacccgggattttagatccaattttatcaagcagtgggacgtaatcgattttcctcgacttgcgcagatgaaggggcagacctaggtatgttgttggaaaggatgataaggtactcgggaagtgctggattacattgggggcattcaaatgcgaacatgcaataggaagaatctgagtcttttgtagaaatatggtctttaagtggtgttcattaactaagaaatcatatcgaactctatctttgtttatgcctaaagtttgtgttaaaaaaaatctaagtagtactagtcagatttctatttgtgttttaaatttatccaaaatcactatagaaaaactcaataaaactggcagaaaaacgtctcgtgcagcaagcaaaaatggcccaatgccccaatccgattcgtggtgcgaccttgaaaaattttgctggtgggccgt

SEQ ID NO: 19326 - DNA, 685 bp, Oryza sativa
tcaattcatcagaaaaccatatgatctctactttgtcaaggtgcatgccaactgccttccacatcatgatattgtagcggataatagcctgtattttgtttaggttacaggtgaatctagggttccgctgcggaaaccaatctgctatcaatattttaactgtacagccagctctaaccattttgttgacatagattgtcttcataataccctgaaaatgataacagaccatgacctagttatctgtgagcagtgtttgaaatgcaaccagagaattggatttgcataggagcacataaaaattagagatccacgtctgaaccatggcatagaaatcaagcttcttgtactactacaaatatactactggtattatattagtaccaccattatgtttttatgatatttcttggttcatacccctcttgatgagtttcatcctagcctgcccaacttgtccttaatatcaggggctaatggcagaaccaccaccaccactattatcttttatactgtactctctccgtttcataatgtaaaactttttagcattgtccacattcatataaatgttaattaatctatacacacatatatgtctagattcattaacatctatatgaatgtgggtaatgctagaaagttttacattatgaaacggaggaagtagtatagatatatattt

SEQ ID NO: 19327 - DNA, 3951 bp, Oryza sativa
tgactgctaagttttgtgcgcggccgtgggcgggtgttcaacatattgtcatgttgagtcgatgctgttgcacgtcaggagttccgaaaagactcccccacacttgttttgtaccttgactttattcaacaaaatgatggaaagcaaaatgggcttccaccggggtaaaataccggtgagccaaattttattcaagtaattctaggcgcatgaagtgcctaaaattacttttattttatttcacttttattttgtttttatttatatttatattttatatttttttatcattttttatggcagcaatagaggtgatgggtaacctagcagggtggacatatgtgacgcaatgatacacagggtgtttcgaattcttactagataggacttaccaagctttgattcggatgcaagaatgcaacacaactttgcatttgctctgcctggttccctgagcatctgtcttctcatagtccaaggagcgtggtatgaatgttgagattattatacacttccccttagttgtctttttatttcctgcagaaggtcagtggacaacaaataccggagggaccacaaaaagttgaaaagattttatcatagcctcaagattagttgttcacattcatgctaaaaaggaattggattgaaaacttaatgagcatggatcccataaatttgccataattttatttttgtcattatttttactttttactcgagagaaaaatgtttttttttccgagagacatttcttttattcttgaaaacaatttttatcaaacttttatttaagaaaaactcatatagggctgagataaagttacataacatagcaaaggagcatttgacaataggtcacggcagctaaggcgggagtagaccttgcaaagcagggcgaaccgggcttccatggcgccatcgacggtgaccttgggcttcttgttcggcgcgatcgccctgcgccgccatcggagagctttcgccgactcagacccggcctcgaaggggatggagtggtaaaaccacttcgacatccagtggcgagccaacttgaacatggcggcgttgaccggccaaagatcagagtgctcggggcgaacattgaagttcacgctcccgaacgctgtcttcttcgtccctgcgggagtgaccaccgtcttcgagtttacgttgcgtaaaaaatggtgccgtaaaaaatggttcgaacccagcggtccggcacgcccagtcgaagatggcgattcggacgagagccgatgggcttagttgagggagctccacctaaaaaaggcgaaggatctccgaaaacaacacgttgcacggaaaccgaaggccgtctcgaagaacacggcgaagaccaccgtccggctatcgccgggcttcggcacaacagcctttcctgggggaggcctgcttctccgccagcacgccggaggtgaccagctttgccaactcatcctcgtccacaagcgaagccccgagataggcggtggtgtcgtcatcaatcctgccgggatcagggcccgtcacggaagctgggttcggcttgcgaggagccatggtgaaaagtgtgggccgtgacgaaaagaggaacagtcgaaaggtactagtgactcaagaggaccgtgaagtgagagggcggaaaagagagagctcgcggtgaaaatgacgggggtgcggcggtgaaaagggggggatatataacccacccaagcgtcaattcgccttcccacccaatcgtaagccgccatgtgtcacgagggtaggcaaaatggtaaattcccattcattgagctacacagtgctaagcccatgaagggaagcctgtcactgtttattgcggcccacggaaaaaaataaggacggcttcgccgtttgcaaaaggcgaaagctaggaaaatttactaaccgtaaaaatacatatgcacaaagtgtacacatttcctgtaggactgtattataggtttcggcaggagcgtcggtcgaaagggggcgcctcataccataccacatggtttgcacggtctcggccgaagctcctaactcacccttgcccgtgaggggcttgttggcagtatgtcatgagacccttcgaccagacctgccgaaaccgtgcaaccagcgaggactatgaagcaaagatggcgaaggccgaagagtcgtgctggtatccggcaagaccaaatgcgtcttgggcgaagggtgtatgccgaaggatggagacttcgcaataacaagcccaactttgaggaggctcaaggggccatcccggccgctcaggcctgttcgccaatcggcccattagaggcccatgtatccaaattacactgtatacccaagcaaacgtccctttcataagggcaaccatgtaaattcccctgtaaagcctaaaccctaaaggggtgaacctgtaataggattataaatagtcctctagggacatgtaaagggggatcccaaagaaaaatcttaaattaatacatttactgtttccaacactgtcggtgacatggggccgggggtatcgtgactagaggcttgggtagccgcggtcaccctcgtggcctgaccccctcgggggggtcgggctcgaaggtgacgtggccacccctccctctgtctccccgaggggtcgggccgctcccgtttcggccccgagggctggggtgccccgaccccctgtggttttggcgccacgtgtgtgggttaggtgagcacacagggctcacctaaccgcatttatagcaggttggacgagcgcgccacgccgcgtttaatgcggcgcagcgcacgcttatccggtccgtgaccggtcgcggtgagtgaccggtcacagacaggtcaagatcgcgggttaggtggcaacaggcggcctgtcacacgcctcgccccgtcccgtcggaatgatgagagcttcctggctctcgtccctagccggagccggcatgccaactccaggagtgggtatgtcagtcccggtcagattcattccaggcttcagcgcaagcatggcaaggaagtcgctggccattaaatgaaggttgaaatgggcgtccccgggaaaagcgggcgagcggggcaggaggcgtgtgctctgcttgtcagatgtcacttccggctgtagactagccctcattgtaaaaagcatgtttcctttcttaggcagcgagaggcccatgtggtgacccctgaccaaataaaaaaggaggcccaggcctaaggagaggggaagagaaaaagaaaagaagaagaagaaaaaaggagaagagggagggcctgaactctccctggctctccggctctcggtattccttcactcacagatccaccaaaacacaggagtagggtattacgcttctcagcggcccgaacctgtctacgtcgcctgtgtcttgtgcactttctcgctcgctgacgttcctcagatcgagggcgaagaatctcacttagcgcccccggccgaaccggcaaaggggggcctgcgcggtctcccggtgaggagccccacgctccgtcaaacactgttgagtaaccacgtccttcgacgtacgcagttatcgcttcgacaacactccattaaggaaagaaataaaaaagaagaaataaaaacaaaaatacgaggatgacctagactcgaataaattagcaacagttccctagcaacgacgccagaaatgcttgttggaatttcttacaaccatagataaatccgaagcgcacggaataccactgtagcactttacattcggtgtcatgccctgaagtttccccgttcttctttctttaaaagttggttgaataaatcgtccgaagaaattgttctaattaacctagagttgaatccctaattaataaatgcaattaatagtcagaaatagcgtggtggaatttttcttgagttccccatgtcctaatgtattaacaagatttttagtggaattttcacag

SEQ ID NO: 19328 - DNA, 2445 bp, Oryza sativa
ccggtttagccatagccattgttgagtcgttcactcgttcgttcgaatgaggtgttccccgtgcttcattcgttcgtccgtgttgagtcgtcctttaggttagagccgttcagagccgctggttccgttcgccagtttcagttgatcttttgggtggtcccgtgtcacgtagaattgactcgttgagtcgatatctcgtgaggctcgcttgccagatcaatctaagccatccgatcttggtcgacttggtcaagattaatctcagccatataaatcctttcctctcttttcaatggcatattattcattttactatatgtcatctaccaaatataatctaatattttctggaggttgttttaatcttttccctcagttataaatcatttgtaaattgtttaattaatttggaatagtcttttctttaataggtttaattggaattaaatcttgtaaaattcataactaattcatatgaaatcggaatgatgccgtttaagtctctaaattcatctaaaattatgatctacatgtttgtttactttatatgtactgtttatttggtttttattagtctttttctttgttttgcgtgttagcttgtcgtttccgccgttgcaaaggttcgcgtgtgcatcggaagtattccagaagacttattaaagaccgattattgctaggcaagtcacacagatcccaaacacaattcctttgagcatgttgatcctatatttaaagtctctatttatttcaactgtgcatttattttcgaatgtcaccgggtggtgtgaacttattcctttgttatggtcaatttgcattgattaccctatttcttgattaccttgggttattataatttgactagttgagctttatatattggttcagctagatgttagacataattgcttagccattcttagaaacattagtacacgattgggataactaatgttttactattacttaatgatggatatttaatgattagctcacgatggtcaatcgtgattggttaattaattaatatgctaactaaaacttgataatggtgggttgtgagcacatggttttgatggtcatgcacatgacaattaaggaccggttcacaagtttcagttgtgaaacattaaccgtgccaaccacaagccagcatgggcaacggctttatcttttgtatagcatggttcattgcggagcaccagactgagaagtggcggagataagcccacgggggtcgctggggagtccatgccttgtttataagggggtgattatgatccaggaacggtgcaatgctttgagttgtgttgtgcgaagggtactgtcacgatttccccctttgcagtgacgtggtggtacttcagggcatggtaacatgtgtggaatcgtgtcttgtgggtacagtggtacacctctggccagagtaaaactattcgaatagccgtgcccacggttatgggcgggtctaacaatgtctttcatgatagtctcacacttctcaccataatagatgatgctataactggtaaaatttgattagctcctggtttggaatggtatattcctggtttggagatagatctgtacagccgggtatggttgtttaggtttggttgggcctgtgcagcatgggtgtgatgttcagtgttgattaaaattgatgattaattgctctactattttacttctcttaaatgtttgctaaatgctgcttttgcaaatgagcctattgttaacaaccaaatttggtaatatcaacatcggagatgaagatgaaatcgaagcggactcgaagataaggtttttttcggaaacagagtaagaatcggctggagtccggatcggctacgactgggattggctaagtctgagtcagtctggttaagtgatacagccgattccgataatacgacccatgtgcgacattgggttcgagttgatgtgtttcaagatgattgccacgcatagatagagtcctgggaaggcaattgtatctattaattaggatattttatgtaaattccttagagataaatgtgggcaaaagtctgccgcaaagacttgtggtatcttagagtttgttagagataagagtcgtgtccaatatggacatatcttgtatttctcgggtataaatagaccccgagccctatgtaatgatgaacacacacgttcaatacaatttcggcgcatcgccactctttttgctttcgttttatttcaacgagttattgctttcgggttgagctgcatcggttttgatgttcaacaagaggtaaaacttgttatggcggcttgtgttctcgagattagtgcttccatctttatgatactctaatcttgtttatgtagtccgtcaagttatcatatatcttacataatccttgacaatatcgtcatttaacctacaatcggctaacatctgctaccagaaggcag

SEQ ID NO: 19329 - DNA, 5021 bp, Oryza sativa
ttcctgcagcctacacgctatatctatctgatcggctatgctatgaatatatatataatctcattattaatatatatttcgatgtaagtgatttatactgtctcggcaaggtgaccgatctatcccaattacttgattcaagtatacatcgatataaggattatgtatcattgatatttacagccgatcgagtagatttagttctgatttgttttcttaacaattgccgatcgatttacatataacatcggctcaaagataaatgatatgtcatcggcatttagccgatcggctatcatttatggatttaattacggtttctttgtctttgtttcttgttgattgcaggatcaaatcaactggcacgctcatacatccaaaggcgagttttggacctgcactggagctaagcagatctcccaggcctcgtgttttctatcaacacctatattatgccattctttggtatccttgtgcacttgcatatttgttgtgtgccttgctgagtatgtcatatgctcaccttgcaataatcaatcaaatctcagttgaagacaagtcgcaaaggagaagacgtttggcttataccccagttgagctgcctgtgagagtggagccggagcttcgctagaccgtaattccgcagcagttttcttttcttttgtaagtatgtaacgttattattatgatgaatctgtatattaaattgtcagtttgtgtacctcggctgattcctggacgaggatttcatgcacaaattagttcggaaattactagggtatttccgggcgtgacaaccgcaatatttaatcccaggagaatcctttccctttttcccttttcttttcctccctatttcctttgttgggccgtcggcccaaccttccttcctcccgcgtcctctctccctccttgactagtccggcccatcaccccactctcctctctgggacgctgacaggtggggcccacctgtcaggtcgtcccctacctccagtcgcccacgccccggcgccaaccgccaccgaaaccaccgctcctcatgccgcccaccttccccgcctctcgctcccgcaccttgcgcccacgccacccacctcctccaccttccccgcatctcccccgcgcgcgtgcccgcaagtggtgggggacttgaaatcccccaacaccctctctctccccacctcccccacgtcgtcgccggcgccaaccacgacctcccggccatgttctcccctccctcgcctataaaatccctccccggagtcccctcttcctttttccgcgctcgccgctctctcccgtgcctcctatcgcgcccgcgccactcgccgctagcgccgccgcctaccaccgcctccggccgtgcgccgtcgccgctagagccgccgccgcgccaagccgccgccgccgctagcttcaccgccgtgtgggtcatctcggccaccacctcgcgtcgccggaaccccatcggaaccccatctccctcgcgagccggtgagctatccattcccctccatctccggccggcgtttaaagccgccgtggtcatcgtctcctctcctaactcctctcctcccctcctctaggtgtcgccgccgctcgtccgcccctcctctcaccgggtggtcgtcgccgccttcgtcttccactccggccgccgtgtcgccggtgaggcctctcccccccccctttcctccccatcccgcgagcgccgagccacgctgctactccggccatgcgccgctgcctttcggccgtcaccgccgtcggtggccgtgcctcgccaccgcctcgccttggtcggccggtcggccttgaggccaagccgagcccggccggcgcctccactccctccactttgagccaccgcccgtggggcccacatgccggtgccctttcctctctcttgagtcgctgacgtgcggggcccacctgtcggcgccccccttgctgacgtcagccctggggatttattgcgccataattaattaaggccttttctttattagtaaaaacacagattatcttctaaaattcataagtaattcatccgagctccgtttaagtccattcaagtctcaataaattcataaaaatccctagaatctattaaaaatggttttgttctctgttacagtagtcttatagcgtgtttttcttttgtgctttgtttgtcgcgtagatttcggccgcttcgtcgatccgcggtttctcgaagacgttgctgtggtctcatcagtgcgagagcaaggcaagtcatgtattacatttgatcgtattgtacccaatttacaaatatcccgcatttctattaaatgttgcattcttttacaatatcatatgggatgggtcctattattcagccatatattgtttaccttatgccattgataacttgggtttcaaaatgattagatgttggtttaggaaatgcttagccatgcttagttcaactagtacacaaagggggatcgcattattacatagactttgactattagcatagctttggattggttccaccgcaatggtgttagttaattaaaatacactgaatggtgggctgtgggtgcatggtttcgctggtcgcacccatggcagttaaggaccagttcacgggaaaccctgggagacttaccgtgctgaccacaagagggagtgggtaactgcttgatctgaagtatagctcgacactttcctaggcaccggtggcgatggtgggcgtgatggagttgggtcggccggggtgtccggttgtctagctgccggattcaccgcggcgcaagaggggaccgcccactgccttttgaggggtgggggtgaaaccttagcgtggtgtgaatggttaggggagggttatgcggagggtcttgtcacgatttccccctttgcagtatcatggtgatacttcggggcatggcgacatgtgtggaatcatatcttgtgggtacagttgtacacctctggccagagtaaaactattcgaatagtcgtgctcgcggttatgggcgatcaaccagattcactgtgattagtctcacccctagtttagtttaatgcacattcagcttagaaattctggttcatgaatttctaggcgtgacattcgggtaaccccaaacggatatcgaactcagggaacgtgtataatctatctaaggctaagactatccaagaacaacaactgaaggtaggctaggcaggctagagaggactttctatgtttttaattatctaagctgagtaaaacataatttcctgtatgatgctccggacaccgacccctgctggtctgccaacgtggttccggctatagctctatgatttatccgaatgcggaggattactgggacgggattcagggctgtcaccacctgccgtctacctctgacaaatctgtgggatacacaataaacaattactactctaatacttgcgtaggaacttccttctctatccggagtcctagtactagagcacttagtacgaatactaaataatgaacccacaaagatggaaatatatctcacttagactaaataattaaataataaaaaagaaaggatcccaaatgcttactttatagaagaagtttctgcgaacccggagtaaagtgtaccgacaactccggtactcctccagaattcctactatgaagctacactcatcgtggtagaagtcggatgagcaccaaacttccgggcattcctccagagcttcccctcactctctacctatttttaatgtacaaaagatacaacagagcctcttgtaattcagctcaaagttgtgtgttggaaataagagttagctcctccttttataggcaggtatgacggttagagcctatgccaaatgtccaaaatgccccggaaccgccattaggatgtaatcagggccatcgatgtaaaatcaggcgatcaacggcctccaaatgggtttggctaaactggtggttcaaccgaacccgggatggctccgttcggctcatttttcctcgtggacactaattttgaggcccttagcccattggcatggaggattgggccatctggaggcgtttaattgggtttttgggtccaaaactccataagttggtatatgtgtttgattatcctccttcatgtatatttcctctcaactttgttagtttgtcacctgcatccaaatatataccaacactaatagaaatgattagttataaaccctaccactaagttgaataccatattttattccattatatgcaggtattgatagtcatatattatgatttaaggaccgccaatagatacgagcggcacgagtgcttctaaggcaatcatcttccaggacaaatcagagatttgtgcagccttgaggtgaggtttttggcgatttcgagctgggcttttgtggaggccatgggatcggaaccagaagaatctggtaccaagatgtcacgggctagagagttggaatgaggattgcgatgcagttgatatttgaacaaagtggatgggcgtggccctggacctcgtcggcgcaacgtaatttgcgacatatgttggaattggacatacaactcctcgtcattcaaaattcccaaaatgttttagattgcgctcggggtgcatggttttcatagtagcacctcggccatcataaggatcggtcttcgggcttctgtttcaaagcactaccgtacttccacatgtctaatgggtaaggcttagtttggggctcaacctggacatgaacaaaaggacacggatacagatgtcgtggtagtcgagatatcgtggcacaggacgggcatccgggtggtcactcctgagggatgtcctgatgccatggggctcaactataacctacctgtccggggagccctgtccgtaggcgggtgttcagtcggtactcttgttcatggctaggatgagttaggaactatgtcacctcctccgtccgtataccatggtggtatggtgcatgcggcgacacgtgaggaagacgtgtcttatgggtaaagatgtacacct

SEQ ID NO: 19330 - DNA, 2036 bp, Oryza sativa
gcatgtcctggaggcatgtcatgttttgtcgcatggtttccatgtcggcttcagcctgtgtttcagagtcatggttgacttgtacagcagcaagcgcagtcgaggccgcagccggctacgacggggcggcttggggcaccagtagtttgcttgccaaaaggatctccgccctggtctggagtgcccttgccaccgcgactgcttcgccatgtcagccgtgttcggcacctggccagaggcggcaggagccgaaggtggcagtgatggcacaggcgcggaggcagacggcgctcctccatcttcggcgatgggcaccgaaggctctgctccctcctcggcagccatcttcccccagcttcgctttccttttgccttgtaaccttctccttcacgaccctcttcggtggcattcgctctcagtggtttcgctcggaggtccccacggtcggcgccagctgttgtcaaagcgacaactgcatacatcgaaagacatgattactcaacagtatttggaaaagaagtaaagtgtattaaattgagaatttttcttgggatccccctaatacatggccttatgagactatttatagcctcattacatgttcttactactagggttttggttatacaggggaatttacatggttgcccttatgaaagggacatttacatgggtatatagtgtaactgtagttcatgggcccctaatgggccattaggcgatcgtcggcccaatagcccctaggcttgatgggccaggatggcttctttggtccttgcgggaccgaacttgctatggcgaagtcgtctcccttcggcatatactcttcgccctacacccttcgcccaagaggcctctggcttggcgaggtacccgcgcgattccccgcctctcaccgtccttgttccatagtcttcaccatgggggggcttcgccttgactaaccttgacgtctcaggcttgaatccccattggtcgcatggtttcggcaggtttggtcgaagggcctcatgccataccgccaacaatacccgaaggtgcataatatcctaaaaactggttcttgcttttattggaaagaaaacttaccaagataatctggggtgtctcccggcagtgctttgtttatggtcacaagctcgaccatggagacatctcgctacaagattagtgccacaaatacatacgagatttgcaatatttatgataaataaaagcatccacaaccacacttctaatcattttagaaatgaggaccataaggtggttatggttctcgcacaagtaagtggtactaatcggacaaaactctgaggattctttatgtgagcatgattctggaggaaatttgaaagagaaaccttcatgctcaaaagtgtcgttctcatcctccaaagttgatgtctcaaggttgtccatggcctgcaggttctccttctcaagagatgcatcatgcaagaacaaggttgtttcttgacaaatatcgagaacaacattttgatggccagagggacaaggttcacgctcgataagaggttgtgaaggtggttctttggagtgcaattcaagggtctcaccagaatctttttaaatgaaatgaagatcatcctcttctagaatagacttaggagactcatgaagcagaaccgccattacttcctctatcggcgtattatcagggaggatgcccatcaaggttttctcataatcggtatgaggatcatccctgaatttaggagcgcaacccggagcttgaatttctttggaatccggcgatggctccacggaggactctttagtcagacccgaagatgttgaaggcttgggttcagtcttggcaaaagaaggttcctcccttcctgacacaaatgtttctagatggagttcaacatactacccgacaaatgaggtattttttgatatgcgatcgagaatttccttgccttcagcgggagttttgtgcatgaatgaccctacagcagttatgtcaaggtagagtgcagcctccatatctaaacccgtatgaaaatgttgc

SEQ ID NO: 19331 - DNA, 663 bp, Oryza sativa
gacgaatggcttggttaagtgtccttgttagcagagacacttcctcgtcttgtttctgcttatttatgactatgccttgcgactgcatctcgtcgtcccaccacttaactaagataggtggtcgtgagtcttcagctgatcggatctgaagaatttcttcttcatcaccagtcattgtgcctttacatgtataaagagaacaataaagcaattgaagaagattttctagatgcaaatatacacggaggattgttacctgttatgatcttcggcggtggacgagcaggcccctctaccttgtcaaaagtactggtttctgcaccagcatcaatgtcattgaagggagggctgctagcgtgcccctccgtttcagggatatcttcatcttgttgttcatcacctggctggtttccagtcggagctcctggttagcactagtttcggcgtccgccgactggtttctagtcggaggcgtatttccggcttctgcatcaccggttgtcgactgactacctatcgggcagttttctctaaaagtttcggcctcagcagcagtagcagaactagtttctttatcacctgtctcggagtttacagccgagtcagagtcctttccggatggatcgatgtctgatggcttcctgaagattgaaaagatgttat

SEQ ID NO: 19332 - DNA, 1277 bp, Oryza sativa
attcctgcagcccgcttgattgccacccccttttcgtattgccgaaatcttggttcgttatatgactttaaatataggcatttccacatatatacaaggcaacatcagtagaagagaaaagtagagatggagaatattatttattctatatggatatcccatatgcatataagtaccttttgttatcttctttggaaaaggtacgaattaccccccgaactatcatggccgaccgaattacccgaccccccgcaccacaaaaccggatattcttcacccccaactatgcaaaccggacgaattacccctctcgacccaatccacggtggttttggtttacgtggcgtacgcgtggcagtccattcagtattctatttataaaaaaaagttggacccacctgtcatactctctcttctctctcattcttcctctctctcttctttcagcgtggggtttagcaggccggcctctaggtcgatgcaggaggggtgccagtgtccggcgggatcgagctacagtaatgctttaagtttctttagtgataaatcatgctacagtaaaaagaaagatgttttgagtaagatggacagtcaaatatgatgtaaaagtttaacggtaaaataacgaaggtagtatatttttggacaaatgcagtagcttatagttaggcaagcttgtaagaatttagaagcagtggtgtctttctcttgggaaggaagcatcggtgatattgttatgtcttccgatgataataagctactggttcaagaaatctatttattttctgtcgattctccttcatgtctacatcaatctctacaaacaaataaaatcctagtacaagtggagatagattattctaaaacaaaatatgcattgcaagcatacctagttctactttattccgggtatattgacggtcgtaattggtttataacaaccgtcaacgcggccatgtatttcactctattgtaatcttgaaccgacatgtggggtatgagggattaggccgcccttatcttacttgttaagtaaaacgaagatagcgactaaaaccaaacatgaagttaatttaaacaaatagactaacttgctagaagaatattccttatttgttttttatgacgtcattgatatagcgcggtacaccttttgggttagtattttttaaaataaaattattccgatgacaactatatcatcaactatgtatatcaagcggcttctgaatataatttgaacctatattcaatgtaatgactactagaagtccctg

SEQ ID NO: 19333 - DNA, 671 bp, Oryza sativa
actatggacctacctatgtgcatcctacctcaattctccccatcaaaaaatccctgcaaatcatccattccagtgacttagaaaataaccggagagagaaaataatccctccaaatcaaccgttctacgttttgtgtcgaacaggtgaaaaaatgtgtaaggtagccagtgcaacggtcgaggcaaggcacccagccgtataaactacaacaaatcgccaccgtatggccttttggacgtcatcggctcatttcccatagccaggaatgggtattgcttcaccaacgttgccatagtgtacttctctagatggatcaaaccagagccccttgggtcaatcacttcgccagctgtgcagaaatttgtgtggaaaaacattatctgccaatttgatgtgctgaaggagttcatcactgacaatgcgaagtagtttaagtctgaaaagttcaaggagatgtgtgaggggctaaacttcaaaatcaaatttgcttcggtcatacacccacaagcgaacggggcggctgaaagagaaaatggcaaaattctggaagccttgaaaaagatgctgcaaggagcaccgaaagggttgtggcgagaggaaatgctttctgtccttgttggtatttcttaacgacattactagaaatatgattcccaacactggcgtagaa

SEQ ID NO: 19334 - DNA, 721 bp, Oryza sativa
attcctgcagcccacaccaaaagcacactttgttggattcatctttaaaccatactttctggttctctcaaaaactttcctcaaatcggctatatggtcctccacctgctttgatttaaaaaccacatcatcgatatagacctctaccaacaagccaatcagatcatggattatgtaattcatggccctctgatatgtagcttcagcactcttcaaaccaaaagtcatcacaacccactcaaataagccgattgcaccaggacatctgaaagcagtcttgtgaatgtcttcttctgccataaaaatttgattgtaaccagcattgccatccataaaacttataatcttatgtcctgaagcagcatcaaccaattgatcggcgatcggcattgggtactcatccttaggtgtagccttatttagatctcgaaaatcaatgcacaccctaaatttgccgttcttcttgataaccggaactatattagaaacccactcggcatatcggcacggccgaataaaaccagcatcatataatcgagtaatttcagccttgatagcatcatacatttgagccttacatactatatattcttatttctacataatattagtaaacaattatgaaatcaaatataacattttgaaattaacatatcatatttaacaaactagatgatgggacgaccacatgacatcaaagagtatacataaaaccaacaaa

SEQ ID NO: 19335 - DNA, 696 bp, Oryza sativa
tgaagatcattccaatcctcaatcttacgatcatgtacattccaaatgcgtactttttcatccagtgatccactaatgaagaagttatcatccacgggattgaactggatgcaagtcactgaaacaaatttgagtgcagcggagtaattaattgtcaggctgctccaaacatatacatggttactgaagaaaggtgttcatacatagaaaatgaccctgtagctagacttaccatagtctgtgtgtgaaaatgttttcagacaggtactagtagtaatgtcccatagtttaacagttttgtccattgaggatgaaagcaagtactgcatgataaaaaaccaaacaaccagttagcacctccatatagttgtattcagtttaaactggttttctttcaaacttcaaagacatcaatttacaatgggcttgttttacaaacttcagatgtgaagtccatgttcattgattagcaactaatggtttcattgttatatattccattcagtgagtaagtgaattaggttaaggaatgagtgaaattctttcaattacagattagaatagttaacaagtttgaatgcagctcgtaataaaaaaagtgtcataaaagccaatcaaaaagcaggggcaaaagctaaatatgcatattttgtatagtatttatgtgtcaaacctaagtgaccttagaacaacaga

SEQ ID NO: 19336 - DNA, 1183 bp, Oryza sativa
taggaactaaccaagagataattctcacaagataaatccaaattactcaagaagaatattatattgacttcagagtaataaataaaataaaagaaataggagaatattaccgacaactccggacttcttccgactccttctactctactctcttcctattctagtatacaatatagtacaatagagcctcttataattcatctcaagcttgggagtgtgtgttgaagtgagtgagctgatgtccttatataggggtaggtacgattggcgaaggggaaatgtccgaagtgcaatccaaccgtcattagggatgcatctgggacgtccacgccaaaccccacatccaacagtggaggtggtggttcggccgaacctgggctgggccctcctggcctggccatcagctcatgttccccccggtcctcctctattcattcttcggtattttgggccgatttactgatgttttgatgaagttcacaacccatccttgcaggggtaacatttctcctcactttagtctgattttcctcccatcatcgaggtttatcatttgcaaacaaatatataccaacacatatggaatatgtgagattatgtacctatcactatgttggatgttttattatctgaactttatgcagatgttggcggtatagaattgacatttaacagccgccaacagttttctaagaccttgtcattagcagctcgctttttgcctaaagcatcagtggttttagcttgcgcaaagacgagatctttcaaggagggttggttacagaaattactgttattgttacctccttgatagaataggcgtggctggttccaccactgacctcattgtggatgatactcgttgttgttgttgcccatgtacatcgcctcttcacgggtttctaggcaatcaatcccagagtggcctgtgctgccacagactgttggtatttcttacgatcacggatagaatccgcaagcgcacggatataccgatgtagcacttcccctacgaagtattccaagggtatcgaatccaagggaacgtgtgtgtttatctcctcgtcaggttcatccgaggacacaaagctaatatgggcagagggtagagaggatttcctaatgagaaacagtgtctagggaaagcttaactttaatcctaacacaatacttcaggcactgg

SEQ ID NO: 19337 - DNA, 4486 bp, Oryza sativa
tcttacgtatgaaaaaacttgtctaaatatctctaattttattttgaaacaagccttacttgtgtggacggagatactccctccgtttcgaaatgtttgacacttgatttttagcacatgtttaaccgttcgtcttatttaaaaacttttgtgagatatataaaattatatgcctacataaaaatatatttaacaatgaatcaaatgatataaaaataattaataattacttagacgaatggtcaaatatgtgataaaaagtcaacgacgtcaaacatttcgaaacagagggagtagtacaaagcgagctcatcagtgttcactccaaccgttttaggttgtgtttagtttagcacaaagtttaaattttgattgaaattagagatgatgtaactcgcgagctcatcagtgttcactccaaccgttttaggttgtgtttagttcagcacaaagtttaaattttaattaaaattatagatgatgtaactgaaaagttatgtgtgtatgacaggttgatgcgatggaaaaagactgaaatttaaatccaaactttagatctaaacacagcaattagcaaataagccaaaacgaaccaacccaaaaatgagatgtgcatagccaaacaccatttactatcatgggcaattataagcaacccaaaaaagagaccgaactggattgagtgaagcaaactctttcttattcatcattcatagtatgtaccatgacatgccacccgcgaccgagaatatacattgccgagaggcgagagcccaaagatggacataaaaatttaaaaagaagaggtgaaaattaagtaaaaacaccgcagaaaaatagattggcgcgcttcacgctagctgcaaatatcgctctaataatctgcatgcttcggacggagaagcacatcggatatagagaggaggaagaagaggaggaagagatgagcggcggcggcaaacggcgaggaggccggcggcgagggcaggcgcacggcgacgagacgacggcgtacggagcgccatcatcaggcggcagcgtcgtcccaggtggcggcccagttggtggcgctgccgacgcggggcatggagttgatcttggtgaaggtgtcgaccttgaaggtggcgccgcacatgacgccctcgctgtccacccgcggcatcgccttcagccggttcatcgggtgctcgaagctcttgagccccccctcgctgtggaacatgcaccccaccgggaacggcgcgtacgacttgccgcaccctcccttcacgatctccctctcgtcgcagatcaccaccgacccatccgccgcgatcccccaatacaacggcacctccccatccgtactctgcatcgcgcaaagcgaatgaacgtcaatatataagaaaaagaaaagcagaacaatcagaaactgaagcttaggaactactacggcggctaaacacaactcctaacagcgggaaggggacagggccacgctacactcacaggaagttcaatttgaagcacaaattcatcaattcgattcagaaaaccagtctagtagtggtttaaattaccagggcggcgaagacggcgccggacttgttgtcgaagacgacgaaggcgaaggagccggagagatccttgacgacctggtcggcggggtaggggccgcggtcgcggagggtgcggtaggcctcgatgacgagcagcgcctcgttggtggagcggctgcacagcccgtactgccggatcaggctgctcaggttgtccagcctccccatgaacacgcagtagatgtcatccagcccacagaacatcctgtgtacacacccatttaccattattatcgatcccctacgttttaatcaccttaattattcggattcattgcctcatcgattaaattgatttaatttacctctcgtagccagagaggccattgcgggcgtggccggcgacgcaggcgagggcggcgccgccgccgaaggaggtggagaaggcctcgatggggtggagggcgtggaagtccctgaggatctcgtcggggttcttgggcttcgccgcgctgctccgcgggctgttcagctccgccggcgcgtgcgccacctgcttctggaatatggccaacattttcttcttcctcttgctagctagctccgacgaatcaaactccggcgccgacgaagacgaaagaacacgtagtactttagcttagcttagcttgagctgctgctgctgttcgttgcgtgaagatgagagacgtgtcgggttggcgagtggaatggaatggaggtgaggatagagatgtgcacggctttatagacgggatttaggatggcacgaacgcgaacgaaaatatcctatccatccctcgctcgcgcgcgctgtttgatgagcgtgttattggagtcagtgctgatgtgagaagccaaagcaagcagcgaacgggataaagacggcgagacgacgaggataagatcatcacgtaataccagttgccgctgccgatgtgacaccagtagtagtaaccggccaccttaaccgtgacgtgcggtgccctcaccccctacggtaccctgcacccaaagcctacataagtaattgtttactacttccgttttaaaatataaaaaaaattaaatagatataacacatactactaatctacatagaaaatttgtttaaatttatagtattaaaatttatccatctatataaatcttttatattacaaggcgaaaggagtattacacacctcctcgtgttggttgttgatacggttttcttccgtttctatcgagtcgctgcacgagcactgttttcttgtgaaattcctaccctgcacaagtgaggatgctgtacatggtctacacaaaacgtgattaaaaagaaattcgcaagaaagaaagagcaaagtagaacaaaagacaaactagtaaactgatgtcgtagatctgtagaacttcatgtttttgccgccggggtagccgagtaggatgaccggaggtgagcgaaaaacggaggaaacagcagcgagggacgccttttccgtgggctgccgccgttagtttggcgggagcggtttattatattaccccgtaattattgctcgctgaaccacctgtcggacacgtcatcgcctactcgaactgcgtgctcacgggggccacctctctacggcctccgtggacgcggcgtgccacgtaggctcgcgcaccgccctcacagcctcacccaccgcaactgccacgtgcgcgccgcctccttcccgtgggctggggaggtaaacgccggtgagcgccgagccgtacactgacagggtggggcccacaccgagcgacgacaaaagtgtgggcccggattggggataaggctggcacggtatggtcgctcggtacacgtcacccgcgcgtcggaccggagcgataaggtccgcgcgagcaagcggttgagccggacgcggcaccaacgtgttgtcacgtgtccgactcggcagcgagtcaccttttttttttctctcttttctctctcttgtcagggcggcaacgaacgtgtttatactagtagtaatcccaagtttgtggtcgctgttacgcgtgttaattatggtgattaaaaactggtcaggtcgatcgagcggcgagcgatgagcagttgagcacatgcattggatcaggaggcgtgactagagtacaggtcgccaggtcggtagcgctgatcttggatggccagtagattggccagacgcttatccaggccagagttgttaataatctctatattgctacttagatgtagcttacggctgacagaatcctgctgatgagatctagtatcctctaccggatcatgacagtccaaactgtgtgtttacataagcagtatggaagatgtcaacagatgctgcatcgcaaggagccaaggaacaactcgcatgaaattgttgtactagtgtaagttactccctctgtgtttcatgttataaggcattttgactttagccaaaatcaaactgatttaagtcaataatttaatatattttcataataaatttgtcttggcttgaaaatattattattatttctataaatttaattaaatttaaagtattttgactttgatcaaattaaaaaaaaatcttatgacttgaaacagagggagtactgctaagggatcgagtgcatgcaggttgccagttgtaatagttaggaattaaaaacatatttattgttatccgatggtattgtagaaattctatatctatagccttttgcacgcttactactgccacacgctcatctcatgctcgacagctccaggaatactagctagtaagtcagaaacggtcgctttcgtcgtcatactttgtaattatgccattttaattttgctccaggagtacatttctttggcatgtttctatcctacccccgtggattcttgatacttgccaactttccgttctgctttactcgacggagacgtgcgtttcacaagctct

SEQ ID NO: 19338 - DNA, 2349 bp, Oryza sativa
acgtcgtgcacgcgcgccgcctgccttgcccggcgaggcgagcgagcgcgcgcgcgcgtgtttcccctattctctccaccacacatgcttcaagtggctagtagggcattctcccttttaaggaggtccccctctcctagaataagcaatgtggtactaaattccacatgcatgccatcccatgaggtgggcttttgtgattttccaaagaattaatcttcgaatgggccttagcccatctattaattccaacaatccccaaccaaatctcaaaatcccactgagatttgccttttccaatgtactgtttatataccagcggttcgatggagaccgattaagattgaatatccacctagaactccaagctacacttactcacaacttgaacaatggactacgccttgaattgcaagtcttgtgcaagcaagtttcactcagagtcttatctggtactagaccgtctgtagactacccctcgggtggagcgtataagtcatactcctaggtctttagtaagcttcctagaagattcacccaaaatctccatagactgcgaccaacagtcaagcttacaaaggtgagttctttcaagactgctctgcaggacaacatcttcactaattaaagccaacagaactcattaaggcatagccaacctgccttgcaactcacaagagtacatgcatcttcacttagagagggtatagattggtactctcctctagtttactaatggtttgttcttcccaggttctaattcacgggatctccgatcacatagactgggttaccaccatagtataactcatatgggtctcaaacccatctccttcgatgcattatctatcacatttcgtgataatccctttcgtgaatggatctgccaggtttctagctgtttggatgtaatccaacgttataactccggagtttctcaattttttgacagacttcaatcgtcttttcacatgtctagacgatttcatattatccttagaactattcactttgacaattaccgtttgattgtcacagttcataaggatagccggcactggtttttcaacaataggcagatccattaatagatcgcgtagccattctgcctcaacagtagaagtatccagtcccgtcagttctgcttccatggttgacctcgtcaaaatggtttgtttgcaagacctccacgaaacagcaccaccacctagtgtgaagacatatccactagtggctttgatctcatccacatcagagatccagttagaatcactatattcctccagtatcgcaggatacccagtatagtgaagccccaattccatagtacgttttagatagcgcattactcgctcgagcgcacgccagtgatcatctcttggattagaggtaaaccggctcaacttgctcacagcaaaggagatatcaggcctagttgtactagccaggtacatcagcgagccaatgatttgggagtattccagttgattcttagcaattcttttgttcttgagaagcaacaagctaggatcataaggtgttggagaaggcttactatcaatgtagccaaagcgattcaagatcttctccacataatgggactgcaagagtgtaatcccattctcacctctaattagcttaatgtttaagataacatcagctactcccaaatccttcatatcaaaattttgagacaagaatgatttaacctcatttatcacctcaaggtttgtcccaaatatcagtatgtcgtcaacatacaagcacagaataactccctcacccccatcatggcgatagtacacacatttatctgcctcattgactgcaaagcctgcagatgtcaatgttttgtcaaatttctcatgccattgcttaggagcttgtttcagaccatacaaagacttcaacaatttgcacactttgccttcttgaccttcaactacaaacccatcaggttgatccatatagatctcctcatccagctctccattaagaaaaactgtcttaacgtccatttgatgaacgaaaagaccatgtgagcctgttagggaaagtagcacacgaattgtggtcaatctagcaacaggtgagtaattgtcaaagaaatcttcgccttctttttgagtatagcccttagcaacaagccgagcattgtacttttcaatagtaccgtcaggcctaagcttcttcttgaacacccacttgcaccccacaggtttacacccatagggtcgctctgtcacctcccaagtcccgttagcgataatggaatccatttcactacggacagcctccttctagtagtctgcatcaggagatgcatatgcttctgaaattgacttagga

SEQ ID NO: 19339 - DNA, 653 bp, Oryza sativa
ttcattgggaaaaaggctctcaaagaaggtagcatcacgagactccataattgtaccaacatgcatgtcaggtacctcgcatttaactattaaaaatctataggcaatgctatgatgagcatatcccaaaagacacagtccacagtcttaggtccaagtttgcgcttcttcgttattggtacattgactttcgccaacaccccccatgtgcgcaaataagaaagtgatggttttctcccaatccatatctcatatggtgttttgtccttctttctgttaggaactctgtttaacacatgattcgaggtcaacaatgcctccccccaccatgccttaggtagtcccgcggtgtctaacatggcattcaccaagtcagtcagtatgcggttcttcatttcagcaatcccattagactcgggagaatagggaggcgtcctctcatgtatgatgccatgttcctcacagaataagtcaaactcgttcgagaaaaactctccaccatgatcagacctaagcctttttatctttctgtcaaattgattttcaacttccgccttataaattttaaaatagtctagagcctcgtctttcattttcaacaagtacacatagcaaaatctagtagcatcatcaatcaacgtcatgaaatatcg

SEQ ID NO: 19340 - DNA, 1558 bp, Oryza sativa
ccatctctacccagacgggagccactaacaagattcctgtcgatagaagggacatgctgcatgttcttcagctgcacgatctttcccgaagtaaacttcagaactaccgtgccaacaccatgaacagaagcatgtgacccattccccattaggacggtggaaccccgtgcgacctgataagaagaaaacaatgagatgtcagcacaaacatgtacattggccccaatatcaacccaccaattagtagactgattaactgaaaaaacagtaggtaaattaccatacccacttccatctccagtgttgccaatggtcacattagcagacttagaagtctgcgctgcaggtgccttcatccccttgcgctgtggacacttcctagccagatgaccaggttgcccacacacaaagcaagtcctctcatcctagttaggattgttgttgttcttcttcttcttcttcttctgcttcttgaaattggtggtttgttgagctttgtatttccccttactcttgttctgggccttgtgcacaacattggcacaggactgcccaccatcgcccttagacgcggcgtctttttcccgagctttctcctcaacatcaagagacgctatcaacccctcaacggagtattcctgtctcttgtgtttgagtgcagtaccgaaacttctccatgatggaggtagtttcgcaataatacacccggccacaaatttgtcgggtaagacacacttaaggagttcgagttccttagccatggtttgtatctcatgagcctgttcgactatagaacggttgccagccatcttgtagtcatgaaactgctccatgatatacagatcattgctaacatcagtagcaccgaatttagtattcagtgcatcccacaactccttagcgtcggtcatttgcatatacacctcgaccggacgatcgccgagaacgctaagaatgcatcccacaaagagagtagtggcttcctcgaattgcttctgctgatcagcagtaagaattccttcaggtttgccagtactcacctagaagcatttcatagacgtcagccacagagtgaccctgatctgccatctcttaaagtgcacaccggtgaatttatccggcctcagtgcttcggcaaaaccagccatagtaaaatcacagcgcctataataaggtttttggattgttgaaattataagcacataatgatttaatttattccataaataaatcatgacattgcagatgtaaactagattgaacgcatcattagatctacacatgtaaactaagcaataaaacatgaacaaatcaaatatgcgcaatatgtcgaatacgtaccgaggtggcggaaagtccggttgctcggcatgaactactcgcagttgcgagcgtcaacgaaggcgcaaagcacgcgagcgaagaggaaggcgagccgtcgcgaacgaacagggagcagtcgcgcgaagcgcttcccaaaaaccttattgccgccttctcccggtacaggacgtcgaaggcagaggttctggagacctgctctcccgatcgccggtgc

SEQ ID NO: 19341 - DNA, 874 bp, Oryza sativa
attcctgcagcccgttcggagtcggtggtgcatgcgtcacatgggtgcaaatttctacaagcaattcaagaacaagcatcttatggagctctttaagaggctctgtgcacagaaccaagagaagaaatttaatgagttgtgggacaagttggatgagttgacaacgaagcaaacagatgagcaatctcgcagaccacaagttgaaggtgacgagcctcccatacctcttggtgcattacatgatgacccaccaacaatgagaaggaggtcagggtcggccatcagaaatttctctcagtggattgagaatgagcctaaggagaagtgggctctattgttcgacaccgatggatctcggtatggcataatgacaaccaatttggcagaggtgtacaactgggtaatgcgaggagttcgggtacttccattggttgctattgttgaattcatccttcacggcacgcaagcctactttagggatcgatacaagaaaattggtccgtccatggccgataacaacatagtgtttggcaacgtagtgacaaagtacatggaagataaaatcaaaaaggcacggagacatagagttgttgctcaaggcacacaagtgcatcggtatgaaataatgtgtgttgataggagcaggcgtggtatctatcgcaagcaagccgtgcaggaatgtgtcttgaaggcggatggtggatgtacctgcagttgtatgaagccgaagcttcatcaccttccttgctcacacgttcttgctgctgccggtgattgtggcatatctcccaatgtgtacgtctcaaattatttcaggaaagaagcaatctttcatacatggagtgaggagatatatgggttcgggatctcagga

SEQ ID NO: 19342 - DNA, 3412 bp, Oryza sativa
caactttgctttgttttatacttatgtttgaagtttgctctatacaggttgcggcggcaggccttctaccactttgtaggcttgttgaggcggcggcggacgaccgtgacccagcgaagcggtgggatgcagaccggtcactccttgccgctcttgtagaccgctggagacctgagacgcacacgttccaccttccctgtggggagatggctccgacactgcaggacgtgtcgtacctgctcgggctaccgctggcgggagcaccagttggtcccgtcgacggtgtttttgggtggaaggaggatatcactgcgcgcttctagcaggtgatgcgccttccacacctaggaccgaccaccacccttcctccgtactctacagtcgggcctagcaaggcttggttgctccagttcactgtaagtaaataagttgttattatcatacgtgcttatttgcgaccggatcagtgttttgtactaacatttcattcttaactgtaggcggaccttctgcaccctgacgctgatgattactcggtccgacgctcccttgaggcgtacctgttgtggttgttcgggtgggtgatgttcactagcacccacgggcacgctgtggacttccggctggtccactacgcacggtccatcgcggatgctcagccacaggacgtgccgcagtggagctggggttctgccgtgctagcagccacgtaccgtgccctctgtgaggcgtgcacgaagactgacgcgggagcgatcatcgctggctgtcctatgttgcttcagctttgggcagccgagaggtttgccatagggcgaccagtggtggacagcgcaccctacggggttggtcgcagcgcgcagtggccagaggacggtcccacgatggggacttactggtgtcgacgtggggttagtgcaacttcgctgcgttataagtttatcagtcctcttctttttttttccttcacataacatgtctaattccgatcatgtttattgcagcgtcgttacgctcacgtccaggtgagacgtggttacccggacttcgtgttcgagtttgaccgtctccagccgagcgacgtcatctgggagccgtacacagaagaggccgtcgctgcgagagcaccgctaggactttcgtccttgtgcacacgcgaccaggcttactggctcaccatcctgccgatggtgttcgacattttcgttgagcctcactggccgcagcgtgtgatgagacagttcggacttaggcaggtgtttcccggcaacgtgcagccgaccgtcccccctgccgaccactcgtgagttcggattgttcatttctaaatttttatgataattacatcatcgagccatacaatttacctctcttcacaggttgactcgacggggacagctagcaggcgcactttgggctccacgtgtacagcagtacgttgacgactgggtgttagctacagaggaggtgatcaacgagctcttcccacacacggaggagaactaccgtgactaccttcactggtaccttcctcgcactcgtgcgcgtgtgaccttcactccagacgccccagagccgcacgttgccgctgtcacggacgcgtatcccacgcaccgtgaccgagactacttcgtggcggtacgtccaatttgtattacttccaacaattatgtcatttatcttgcataatataggacaactactgaattttttatttccatcttgcataggctgatgcggcacgggatatcagtgccgatatcaccgcagtccaggtgaggttgaacagaggtttgcacttgactgacgttgagcagaggtcgaccttcgaccggatgcaggagaagatgcgtgcggtcatgcgcgtcttctcctgtcgcagcgccgtggacgtcgtacctccagctggtccggtacacccacggcctcgcggtcctaccgtcggagcaggacctcgtttgtcttcgagcgcccctagcttcggagcagtgcgacctacagcaccggtttcgcacggtacagttcagcccagatattagttcatttttgtttcagcttttgcacgaatgtgtcaccatgttttaactgcacgtttcctcatcgcaggacctcgtatgccttcgagcgcgttcgcaggcacgaccggcgcttccgcgagctccgcaggggcgttcgccacctcttcaggcgcgttcgccagctcttcctctcacggagcgtcgatccctcgcccacacggtactttactttttattaatactgttaaatacctatacgaaactgatggtccttgtccagcaggatttgcagccgggatcttcggtactggggcctcttcgtctcacgccggtaggactggtcctactagccagttctacgacgacgacttgcacggtgcagaccaccaggacgtactaggctcctctcagcttggaggagctccagaggcgcacactcaggagcagccagaggtcacacctgtacaggcaggacgggttggccgtgccgtacccccggaccgactcacgtactcccaggggcacattagggcgcagggtaggagggacaggggtaagaggcctcgtcagtagtgttctacctcttcagtccttatgtgaccgtttcttttggcttacaaacttgtaaagcagtactacttttgctattactactgcagtactacttgtgtttgtctcgtctacgtagttcttttcattcgtatggtgcttgaacaacttatgctcacaacaacacactttcggcgcttcacggtagtgccatatccagtagcgcgcacagtccacaacagcacacatgaaaagcggcagctcgagttatcactatcaactttcggcgctgcctgttgacataaagtgaatcacgcccacgcgtgatcgtcttgtcacatctaatgaataatgtatctcattgagttcacatatattgcagtgaaaacgacgctatataattgacaatctgaaggcaacctcttcatatcttctttcccactaccacaccacacacgaaaatagaagcctattaattggtaatacgtaatctagaattgagattatgtacaacattcttcactacaattttacattttggcagcaaaccaaatatgatcaaatgcaattttaccttaccaaatatttggtagtgccaaaacttgcttatattttggcattaacaaaatatttgtacggtaacattccaaatatgccctaaaaaataataaaattgtattttaccaatcttggagattttaatcttgtatagttttcaatataaaaagatttgataactattgatatttatataaaaaaaatatagagcacagtacaaaatcgccctcccccagggcggcaagggggccgcctgcaaaatccatgccccctcgccgccatttgca

SEQ ID NO: 19343 - DNA, 7747 bp, Oryza sativa
aaggggcccgcctgcaaatttcgttgacggccgtcgcccgagagcgaacggccgtctgccacgtcattttcgccgccctctgggagggcgatttttaaaaatcgccctcccagagggcggtaggcgactatttccgtcaattttcaaaatggaaaattatttttgtaaaacttttaataaaaaaaattataaataaaaaaaattcgccttccatgtctctcgccctcttctagacttctacatgttggttggtttgttggcccagctcagtatagagcacggcccacttcccaggttggcccatattggtagatgaacagcccatacaaggcccagtaatatatttcccaggcttgtgtccggtcagatgtcactgtgttgctctgttttctttgttgttacatggcacatcatcccagtgcaatttaatcaaaatgaatcaaattcttcgtccacaatgaagatatataaattatttccatattttaaagctgagattcgagtattcgtcggtccatctgtaagttccaatcatggacaccgaatatcgcagggttaatcatcagttcatcatggaggggcccactcgtcaaccacaggaggaaaacttaacaaaatacaaagccgcgggaacggggtgaagtgaaacatgtcacgtcttcaaatgtcaacctcacggatagctgcttagcagtagcagcagcatcgcctccagctagctctgatcatttgattctctcgtcctaatccacattttgtgctgccgattaaccacaggaaagtgagctttgcttgcaccacaaaacctgcaaattgaactatattcgaagcttagctaggtgactgattcttgctgcgattcgatgtccatggcgtccataatcatcctggccgtcgtgttcgtcctcgacgtcctcgccttcgtcctcgccatcggcgccgagaaacgccggaacacggtgagagctctcgaacgcgttgatgcatacatgtgtcgtcgccatcgccgtcgccggagacgaagccgatcgatcatctgctgcgtgctgacgatcgaggaggtgtgtgttgattggatgatgcaggcggcgtacgtgaacgtcgaccagaacgcgcggccgtactgcgtctacggctccgacgcggcgacggggtacggcatcggggcgctggtgctgctggcggcagggcaggcgatgatcatggtggcgactcggtgcttctgctgcggccgcgcgctctcgccggggcggtggcgcgccttcgccggcttctgcttcatcacctgctggtaagtagctagcatcactttctccttccataatcccatccatggatgcatctgattcttccgcgctggtacaattgcttccgtgtgcaatactgcaaccaaagcccctgggattaagattctctttcgcataattaacctgcacagagatgaccaattattagtgcaacttggactgaatcatgataggcttcaaagccaattgcatttgcatatatgtacatttggataagaccatacgtaagtaggctgtatacagtggctgactagctgtgctgtagtgctgtatactgaagaccaatatgtatggcctatttggagccttttttgtcacaaaatatactagagttgtggagctgggtttagacagctccagaactccactccagactcaactcttggagctaaatttaggagttggagctgtaccaaataggcatttggtaaaactcctactcctaaatttagctttagaagttgggtctgaagtggagctttgaaactgtataaattcagctccacctctggtttattttgtgatagatcttcacccagctccgctccaattttaaatgaagttaaaattgtttggttgagcgacgaagctgaagctgcaccaaacatacctcgagatcgatgccactggaaagaggacgggtcggctctttggatgcagcccatcttctagatgcttcctgagataatgggccgagttttcagcccaatctaaagaatatagactctcttctggcccattaagtagaagaagctacaaagaaggcccaatcaattataacattatgctctgagcttttcttcggtacgaaacaaagtatagtagcaactagcaagcactaccaccggcatccttttttcgcggtaagaaaagctgaaacgaggtggatgtttggttgtccggtgcggtcagctgtccctgtgttgctcttactttctttaattacgctttatttttggtgatgaactttttaattatgttatccctggtttcaatcaacctcttgttagttggccgatgaacgcaaacactagtagttaattgcccgatgaaagcaaagcactactagttaattgcccttcttagcaataggagcgctcagctttgcatctgtggttacaccctttcttatgcgtgtagttggaactacctttgctttgctagcataagctcatcatttgcctttcgaccaccgttaaaatctgaattttaaaacttgatattagtgttgatctgaggtttttactatggtttatcttttaaaattggcttttaaactgcaaatagcatatataaaaaagttttaactatgaagccagacgatagggacttagacgttgtgacggtcgaacacacagtactggtttcgattttttttaaggaaaaaaaaacgtactcctacaatgctactgcctccgtcccaaattagtggttgctttaacatttttcttgtaacgtttgaccattcgtcttatttgaaaaatttatgtaaatataaaaaatgataagtcatacttaaagtactttagataataaagcaaatcataaacaaaataaataataatttcatattttttagaataagacaaatgataaaaattacaaacaaaaacttaaagcgacaagtattttggaacggaggaggcagtgcttaggagtaactggttaatgtccgatcgcaggtagaggtaaaacaaatattcctccccactaagctacctttactgaccttggtgaaacacaaattaattactcgcccacgtagatggaatgaaaaatatttcctgtacctgcttttcagccaaaattattcggacgtgcaattttacagcaattatcagctgcaggccatacgatcggaacgaattctattggccgtttcactttatcgccacttttttcaaatttggtatggtaataaactaaacgctacctcaccaacaccatataatcaaattctagtagtttcaaaaccattatcttataaaaacgctaccaaattttgaaaatgcatcaacgctactaaaatctaataaaatcaggctgaatttggtaataaagcgaacaaaccctaggtttcgataataaaaaaacataggtgcctagaaataactggtccagttaaaggaaaaacaaaatattcctcctgcgccaccaagcttcctttactgaccttggtgcaaaacaaattaattactaacccacattaaaggggaaaaatattttccacacctgctttaataaaagccaaaatgcgagtacatgagcatatgatagcacatccaaatcccactcccactggcctaccgtttccaatcatccacgccgaatactttggtggcgagccgggggggcccacgcgtcagcctcagctagaggccggaggcaggtgccagtggaacagaaccaccaaagtcgcgagaatggttagagtgaaacatgtcaccttcaccggctaccaaagcagcagtgtacgtggtgcatcgcctcatctccctcgacttgctgctaagctttcctctcgtctttgacgcccccatctttccctagctcgcttgtcctaatcctcctctctttctgcaacaagaggaaagtgagagctcctcttggctcgctcgctgcacgaatcagtagtccaagttggattaattaagggaggtacgtaaattagttcgaatccatccatggcgtccataatcctcgtggtggtcgtgttcgtcctcgacgccctcgccttcgtcctcgccatcggcgccgagaagcgccggagcacggtgagctatagctagcgaaatccatactatgggtcgtcgtcgtcgtcgtcgtctgacgagagggagctggttgggaacgatgcaggccacctttagcgaggacacgagcggcaggcagtactgcgtgtacagctccgacgcggcgacggggtacggcatcggggcgctgctgctgctgctcgccgggcaggccgtcgtcatggtggtcacccgctgcttctgctgcggccgcgcgctgtcccccggccggtggcgcgccttctccggattctgcttcatcgtctgctggtaatttaatcagcaattaagcatatcacgctagctagctagctccccttcttcgttgcctccgtagcttggattaactagcccgtttgcaattaagcccttagaatttaggtttttctgcagtcgcgtccctaggatgatcaaccaatttgttattagtacgagacttggtttcagtaaattactagtactaatctgcaatggattaatgaatgagcaattttatcatccaatatttggtacctcgaagtaccatatttaccatattttatacacgaaatttgggtacctatcaaatttaagtaattttatcgtccaacatttggtatctcgagttactacgaatgtttggtatctcgaaatattttctagtgttaaatttgatatttctaatataaatttggtacatgataacttgagataccaaatgttggaaatgttagatgttaaaatttcatcaaattttacactacaatgtatcttgagatatcgaaaaattgtggtatcttgagatatcaaatgttggatagtaaaattgcttttattgaattgatgagctgatgatggtgggtggatttatggacaggttcacgttcgtgatcgcggagctgtgcctgctggcggggtcggtgcggaacgcgtaccacaccaagtacagcacgctggtgattagcgggccaccgcgctgcgcgatgctgcgcaagggcgtgttcgccgccggcgccgccttcaccttcctcaccgcgctcttcgccgagctccactacctcttcttcgccaaggcccgccacgccgccgccgtgcccccgcccattgtcggcggcatcggcatgacccgcatgtagacagagtgacagacagcaccttggttctcaatccatttgccatttgcatcccccctgacttcgacgcccgcgttgatacctcgattgctctactctgtacatttcattctcattgctcagtatctgtagtatatggagtatatctgtaactgcgtggctcatgtctctgtattttggtattctagttgagtgcgttcatggtcattaattgatcggccacctgacctgaagtttctgtgtgagatcggccacattgacatgaagtttttctgtgtaatttggggatcgatgtgttgtttgtcttgtgagccttgtgaatcctttccctgttcttgtgtcagaattcagaaacggaacatacgcacgtaccttaactttttttccttactttctgttcataattcagagactgatctggatctgttcttcatcgtgttgtgttgatcctgcgacacaaagacctgtaaacgtaacatatactactctgccggcaacacgattcgacccgtacggaatcaagaactttcaggctcgccatgctttgcctcctcccggcgaaaccacagctttgtttatggcgaaaccgcgacgcgagcaggaggcagacgcaggatagccctctgcgtgcggttcgggagccaggagaccgagatgtggtcggtgcatgccttcggcctcgccgttcgtcaggcacaacaacaaaaagcttctcacatcctctctatgttcagtgtttcagagctcaagttcagttataaaaaacagggttggtttatgatgttatccttggctgtccctgccacggaaggccgcatctttgcctgtccctgcacaatccggcaagccattgtcgctttgccctttaagtaatccaatctactgctgctactcacccttcaggtaacacatgtgtagtagtagaagaagagggtggtacaattacacagaattcagtactttttctgccggcgacaacggcggcagttgcggccggccggccggcaagatggaggagaacagaatagtgtagtgtgcatactgtcatggatgcggccgtacgccgggatgtttcttttacctggcactaaattactagcagtaggctttttcttgtttgttttggtctcgatctgacgtgaccggaggatcgatctgtctgcatatctgccaatctgcatggtcgtggtcgagcagaaaagctactattatgataatcttcataggttggcggctacggagtaaatcgcacatgatgaacgacgacttcctctcgtctcgttctgcaatagccaataatcctccctgagattatgcgattatgccgcttgtctcctttgtggatcgaagaccttgtgctcagcaaatcccggcattgtatcgatatcgattggtctgaaactctgaataatcccggtcatggtcgtcgattgaatttgcagtagcagtatgttatgactgtatatgctcatatggaaggcacgtcgagacgatctgctagtgctagctataggcgatggattatcccatggacacagagcttaaattttttgtctcaaactcatagagcttaaaattctgagaatctgctggttaatagccagcttctgagaatctagagaagctgggttttccagcttctgagttctagttcattttctggattccacaactatatattcttagaatatggatgacaatatggactgtttgggggaagctggagattttatgagaagctacagcagctagtagctatcccaaacagaccctatatacatgaccccagccatgaacatgcttgagaagaaaaggccatgggactaactagtgaagggactggacctgcatcggagtactgcattgcacgcctacgtggtccatccgtccatggatggctcgcctagcttgctgcatatcgcgtctctgtcactgtggctggcacatgatgatttttcaccaccatggcatcgatcgatcgttcgttcgatcgaacagggcgtaggtaaacgtaggtccaggaacaagacaagcaacatgcttgctttcttgctgtgaccacgctctgattattagtctgaaaagccgaggactatactgaatcatgcatggagattgttgagtggtggtaggcctgaagaacaactgctcccgctggcccctgcctttctagaatctagaggagctaccacctctgaacaacaactgaaagatcttggatctgtactgctcctagggagcaatctaacccataccttagctgctatttgactactgtgctaataatcgaatcagtactggtgtaaaatccgcaatcagggcattctgcctccacttttctttacaggtaatcaggaatagttgatattccgaaacctgcaaatattccttccgttgctctttgcatcaaattttgttttctgcgtatacatacgggtagtatttataacaagaaattaggtaatcagtgtcgtgtgttttgctttgcttccacgctaacctaactggatgtatgtataatatgtatgccacctgt

SEQ ID NO: 19344 - DNA, 4146 bp, Oryza sativa
gccaacaccatgattgattgattcctctgaaatctgaatctctgctggtttctaggtaacgcgtgaagtgaactgctctccacgtaattccatccgtcgatctcgtcctacgtgcgggcacagcaccggagtgcagcatacagctaatataatgttcttaaaaaaaaaactaacaaaggaggtgtttagatatagggatataaagttttaaggtgtcttacatagggtgtcgtatgaggtgtttaagcactaataaaaaaactaattacatagtccatcattaaaccacgagatgaatttattaacctaattaatccgttattagcagatgtttactgtaacacaacattatcaaatcatggaggaattaggcttaaaagatttgtcttgcaaattagttgcaatctgtgcaattagttatttttttagtctatatttaatatttcatacatgtattcaaacgttcgatatgatagggtgaaaaattttagggtgggatgtaaacatggcctaaggctgtatttagacaggggtataaagttttggtgtgtcatatcgggtatacggacacatatttaaagtattaaatataatctaataacaaaacaaattacataatccgctagacgaatttattaaacctaattaatccgtcgttaataatgtgtactggagcactacattgtcaaatcatggcataattaggcttaaaatattcgtcttgcaatttacatacaatttgtgtaattaattatttattttttatttttaatactttatgcatgcgtccaaacattcgacataacatggtgtaaaattttgcgaggggatataaacaagccttaacataacacccctaccatgaacctttgcgccttcgatttctccgacatccgctgctagctgcacgcaatgcaattattttgcctaatccatactacagtatcataactctgattcactgtaactattatatatactctgatttttcttttaaagaaaaactctgatttcaatcttcacaggtacagcacctaagttttttttttcttttcaactccaccacggaaatatgctactctttccgatcaacgtttaggataagatttgattgaagttttcccaataagttcatttaatgtggggagtacaaaaccctcccatcaaaacccgtcgggtgtgtttagttcgcgaaaagaaaatttttaggtatcacatcaaatgtttgaccggatgtcggaaggggttttcggacacgaataaaaaaaactaatttcataactcgtttggaaaccgcaagaagaatcttttgagcctatttaatccgtcattagaacatgtgggttactctaacacttatggctaatcatggattaattaggcttaaaagatccgtctcgcgattttcttcctaactgtacaattagtttttttaatttatatttaatgctctatacatgtgtccaaagattcgatgtgatgtttttatctaaactggaccttcatctgaaaaatgaaattgctagtggtacaaaacgtgcggcactgtgagaggcctaagtgcacagtagaaacgatgtgattggttgttggagaggggaaaattactggcaaccacacaaagagcgatactactactccattgatactacacaagagttaacctaaccacgaacaaattcttagcatgaaacattattagcatcacaaaattaataatgtcataaaccaagacatcttgatcctaggcaggatatgtatcctatgttccatgcctcaaaatgacgcatgcacatttcgcattatctaatcgagcggtccggctaattttggcccgatacctccccgggggccccacctgtcattgtccccagcccccggcaaggatataccctccgatccccctgatactagggatcagcagcaattttgccacggcggcgcctccatcatcatcgagtcgagtcgagtcgtctgcaaagtccaaagtcgagggagatgagagaggagacttgttgatccaaatggcgccctcgttgttgtcttcccaactccaactgcacgccgacgacgtcgcaccccgcacgaactagacaaacacccacaccataatccaaaaccaaaacctcctcgccacatataaatccccatttgcgcgcggccgcctcgccggaggggagggtgtcgcaatgccggaggctgcggcggcggcggcgggccacatggatccggttggcgacgaggcggcggagaggagggagatggaggagaaggaggaggaggaggaggaggaggaggaggatgaggagttctacgagtcgctggatcggatcctgtcgtcgtcgtgctcgtccacgtccgcctccgacgacgacgaccagcagcaccggcggaggcggcggcaccacccgcagccgcagcagctgtcgtcgtccgcgacgttctccgcgtacgaggtctggatctccgagccgacatccgtcgaggagcgccgccgcgtgctgctgcgtcggctcggcctcgcccacgactccgagcccgtgccgcacccgtccccacgcgtatcatcctcctcccctcgttcgccgaccccttcccccccgtcctcgtcgccgcctcggccggctcccgtggtggccgccgcggaggagcccagatccagcggccacgggaagccgccgcttgcgaggaacccgagcggcggcgcggagcaatgccggatccggaacctggacgacggtacggagttcgaggtcggggaggttcacgatgaggtggtccgggaggtcggcactggccggcagctcaccttcgaggagttcgagctctgcattggccgctccccgatcgtccaagagctcatgcgccgggccaccacagccgcatcatcctccacctccgaccacgccgccccagcatccaagccacggaggaagcctggaggctggctgcgtggcatccggcacctggcgggaagcgttgcatacgggcgcagcagcaccgatgagagggacaaggagaaggagaaggagaagaaggagagggaagcgcggcgcctgagctccgccaccgatgacagccttgacggcaacggctcgcgcaatgcagggagggtcagggtgcggcagtatgggaaggcgtgcaaggagctcaccgggctgttcatgacacaagaattggctgcccattcgggctcaatctggtgtatcaacttcagcttggatggacgataccttgcaagcgctggcgaggaccgtgtcatccatgtgtgggaggtatcagagggagaaagaaagggagaattgctcggggaaggtacggtggcaagggagaacggtggtggctgcagcccgtttcttgcagctgttgggaatggatcgccggagctggcaacattgtcattgagctgtgctgacgggggttttgtggagaagaagaggaggccaaggatgcaaagcagccggaagtctgttggctctgatcatctagttgtgcctgaatgtgtgtttgggttcagagataaaccagtatgctctctattgggtcacgccgccgatgttcttgatctatcatggtccaaatctcaggtgcgaactttgtgatctttcgattgaatgttaaactgttaaatcataacttttggcactctggcatatgttctaaaaaatcacaataataaaccatcacactgccttgttcttcagggcaacaaggaaaaagttatgtttcgttttagtgttgtctagatagtaggacagaaaagaagtcgtttgttgttttgatgatgtttagtacggcagtaaggcccgcattgttaaaaaggctaaagatcaaatcaacgggctatttggaaaacaatgcattttgtcattttgccatagtaattgagcgtaggcttcagcatgcaacatttggctacatcttgctgatagaaaagtgaaattggttgagtggttgttgagcactacagttttgcactggtgaaagattcttgcactaggcgtgaatttgtttcaacttgctaggatggtctattctttgacttcattggcctgtctgtgaaatatgtatcattgccatgcctcgtaacctgggaaacagcactcttacttgatcctaatcttttcacacttcagctataaagat

SEQ ID NO: 19345 - DNA, 700 bp, Oryza sativa
ttcctgcagcccccacactatatattttttgaatgacaaatgggccccacacttttttttttatttctagtgccacttaagcgccacatcaacgccacatggaaagaagaccgagtcaatgctgctacgtaggcgccacgttagcaaaaccgccgagggagtcaaattgctccggttttaagagttttggggtcgaaatatccggtttttggtttatggtcgtggattagatttcgatcacagttgagggtcacgaagtgaacttatcccacataaaagagccgacggcccaattccactgcaaatttaaatgggccaggatccggattctatccaagcccaactcacacccacgctgctcggctcgacacacatcgccgcctcgccgcctccctccctcctccggtcgccgtcgccgccggcgagctctcctcctcctcctccggtacacagctcagctctagagaaacctcttcccctgttcccccctctcctctcgtcgaagcctcctccgctatctccccggtagggctcccgccgacgctctctcctcgtcgccggatattcccatcctatcccctcctcgctcttgctccctctacgtgtgtggcacggcggcgcaccggatcggcgctgggagctaaccccccaccccccggcgaagatgccgcaggtaatggtggtcgcgcggaacttcatg

SEQ ID NO: 19346 - DNA, 765 bp, Oryza sativa
attgaactgctatcgtattcctgcagcccagacttatttatgtttaactatatttatagaattttttaaatatatactgatctgcgataacaaatgagttgcattaatattgaacatattttgatgatattttgtttgaaatgttacaataattttctataaacttgattaaacttaaaatagaaaaacaaataacttataatatgaaatggagacggagggagcaccacaaaattaacagctagtagctagcaaaatacaactcggtcgacagcttcggactcggtaattcatacgtatatataatcaatgtatacgatcgagccagctatagagatcccaagcacgtacgtacgcacagatcttagacgtacgcgatgcctgctgcatccgatcttgggcgggacgtcgttgttgtacctccagccggcatcatggacgacgatgatgaaagcacctggtcaccatggccggatctccagccggagctggcaggcatggtgttctgccggctgctgtcccacggcgaccgcctccgcttccgagccgtgtgccgccggtggcgcctcgccgcgtggcagcagcaccctctgccgccggcgctcccctggcttaacttggacggccgcatcacctaccagagtctccccgacggcgaggtgcaccgcatccccgtccccgacgagctccaagctggaggcacggtcgtctgccgcggctcgttcgatggctggctcctctacgaccgcagcgagcaactggagt

SEQ ID NO: 19347 - DNA, 5874 bp, Oryza sativa
agttcttttttttctttttgaattacaagtaacagaccaattgggtctctgccgttcattcgttcttgatgtccattattgctgagttcgcaaagattctctgcacgtacctttgcaaatattctctgttcttgaaatgtaccgtatccctcctgtttgtacttcccacttcagtcaaacagacttcagtcaaacagagattggaatcatctgaagtactcccttcatcccaaaaaaagacaaaccctggtttccgtgtccaacgtttgaccgtccatcttatttgaaaaaaatatgaaaaaaattaaaaagacaagtcacgcataaaatattaatcatgttttatcatctaacaacaataaaaatacaaattataaaaaaaatttatataagacgaacaatcaaagttggacacggaaacccagagtttgtcttttttttgggacggagggattatctcgttttccactttcgacttctaatcatgtatcctcaattcagggaaggagaatgtgcaataaataaaaccggcagcataaagccgatggaaacaaatgcaaagtgcacagccaatctgattatgaattcagacgtgccacaactaattcagcaattgcattaaagatgaaaaaaaacccaacatttccgactgattactctcatttttgctgctccttcctagcaaataaattatctgaactagacctaactttcatcatcatcaccaccggaggaactccatgctcagcagcacatctcgagggcattgtaatatgagtgcccacaggtggctaaagcataaggtccactccatctaaaagaaaatactataaggatacataaccagcgaagccaactatgactattagttagtagcagcggttggggaagcagaatcactctcggtcagcgcttctcaattgtcaagccgtttgcaccctcagaaaccacctgacggatggcgacacacggtgtccattcaggaatcaggatgaccaagaatgcatcgatcaactgcgcgatgatcggtctgctgtcttgtgtcagtccaaattgctcaaccatttccacagccacagaaagacttgtatcttcagtcaaattgaatgggaattcaacactcttgaaacaacctgaaaggaagttgatgttcagtacaaaacgtgttgttgaattctggaaaagaaagatttcaaacaatatgattaccgctgggatcaggaaatcttagccataaatcaacatggctggctacatcaacatttcctgtcagcagaaactcgcccttacgaagcatgcaactgacaggctgctgcccatcttcagacatattcttgaccagagagactgagataagatcatcatcctggaggaaagagttttcaacagctctgttgcagacattctgttctctactggagctaaacagttctctatgaaagatcttacttctgcatctttaattttgtagaacgcagctggtttcttaccctatatcaaataggtcatacaaacaaaaagttaagttgttggctactacaatcactctggtatctgtagacatcaagaccttacctcatcaatctttttgaatatatgggccatgccttgacattcactgtatgggtattcgcatgtcaccatttcaagcatgcacatcccaaatgaatatatatcaaccaattcattgtaatgcccagttaacagctctggtgccataaattctaaggtgcctgcagttaatgattaatatatccttattacacatccaactgaaagagaaatcctttttaagatgaaaagaaaacagaattatatgagtcaagaaaattggtaacataagtttaaaagtggacatacatgctaaatagaatagttatgttctgagaaaactgtaacagttagaaaacacataagatggcagacatataacaatgttgatatgagatatctaccttttatactttttttctgttgctgcatgaatgttgccaaaccaaaatcaccaatcttcactttcccatgatttccatttatgaatatattgtcacattttaaatccctgtgtataattgctggcttctgactgtgcagatattctagccctgttaatatctgtattgcccatcgtttcatagccttcatattcactttcttgtgctttctgcggtacctggttacatggtgacataaaaaaggttacattgtaatttataaggtaaaagaaacgcagtatccctcttgaagttttagggtaaataattttaagcaacgctcatctagtcatctatactgaattaaagggcggtacaaacaaatgacaatgaaaaggaaaagttaccaaatattatccaagaattgtaaaggagccaactaaaactttaatttgcacaatggaaaactgtaaaaatgttcaggtagcactaattcagtaaaaaaaaggtatatttagaagatagatatccaaaccaatgaataggcaacagtttattaatatgctccagctgacagcatagttgtcgtaaggatgaggggcatactgtgtcaagctcccggatgtgaacaactctgtgattatgttaacagtcttcttctccccatcaacccatgaagcaaacattttctcaatgttcttatgcttgagtgtcttcaaaagttgaatctctgtgtttagttgcttcatcttcttagaggaccccatgacagagtcatcgatccgggattggctccatgctacctcgacaccctccagcttatcgaaggctttgtagctatttccaaatcacaattaaggaatatgatatgaacaatataattttgtcccaccagcatgagacattcaggttgtgaaacccgaattaaagaaacactggaacatcttgaatcagccaagaataaataaacttgaaatttgtcacactttatccataatagaagtacagatggttagcagaactaaatatttatggattaacatctttccatgaatatatatcaaggttaataaggtcaacaccgatcaataattttagccacagattacagaagcatgaaaagttcggttccatctctgaatgtgtctgtagattctacatggaatcgcgggtgtccatcataagttcagaacacatctaatactgataaataaataatcatcgggcatggttctactgtgatcaacaaatcgaattatattccacaactaattcaatcgtgataattcaatcaagaacaaaaagggctaaactagaaacagcacatgagattgatgaaaggatacaccgttttgacggcccctgaccccacgatctcatcatactgcacacgcagagggcaacaacaacaacaacaattagccaccacccgaatccacccatcttccgcagcagcaacaaaaccctagaaggctagatagaactcgaacagaaacgagcaggacagcaacccgtacccggatgaagcggcctgcggggtccgcctcgacgtacccctcctcgtcgccgtcctcgtccggcggctgctcctccgcctccgcctccaccagatccatcggacccgcagccgccgccgtcgccgccgccgccgctttccgccgagattgtcaactgcttcccagctgagaccgacccgcacggcggcgatttaatagcggcgggaggaggtaggcgggccgattcgtgggcccacgttgggtgggcccggcctcgccaagtcagcgcgggggacgacgggacatgtgggtggggtccacgtatcggtgagagacggttcagtgggagttggtccatgagatcgtttcggatagggatggatttcgtttttgaagaaaatggttttggttggtgatgacgaacgggagtgctgtagggatattcttttctgtggcatgtgggccaacctgctctcgattaatacttttaacactatgtactattaaaaaaatatctgtgcatcataacggctattttaatttttttattattatatggtttatttaagataaaatttacggttaaattcatctggatatgtattttgttagaaaatcatgagctacaattacgaatccgatcgtctcatgttagcatacgagttatttaaagttccaaaagcgaacaaacttaaaagccgactcaaatacgatttatatttctaaaaacgaactaacttaaaaaccagctcgtacacgtatgacgtaccaaattgccgaaaaaaacattcttaatttttataatagtagagatagagatatgtagtactactttactacaaaaccaaaataaaaaattctgaaagaaactattaccacactttatagtacacctcaactctaagattcaattggttaaaactgaacagagtaaaacttcagcaccataccatgtacggagtagatgatatactccatttttgtttacatgtctctacctttactattataaaaattgaagatatttttaccgatacttttggtacgtcatccttgtttgaatcggtttttaagttcaatcgcttttggaaatacaaatccgcgtttgagtcggtttttgattttgttcgtttttagaaatatagaaggagttgtataagaaatctctttaaaaatattgcatgctaacttgagacgatcggatccctaattgcggctcatgattttgtaaaaaatatccaagcgaattctcacggtaaatttcaccttagctaaaccatacaacaataataagattaaaataaccttcacccgttgcaacgcacgtgcatttttctagttaaatgaaacaactgagagagtatttaccaagataatcatgataaaaaaagacggggtatttaattggcagacacactttatcgtaactaaggttagacaagttgttgccatcatgaaaatatgggaataaatttttagtcataaagtatggaaaaaattgaaaagaaattaagtctatgacatgttagacatgctattaaaaaagtatggaaagccacacctataacagtgaacaaaatacacacctaacaaaagacaactaaaaagtgtggtacagcaaaatatgaccaatgaaccaaacacctatatgcacacgaagaaattgcaggactgtaattgatttaggcctttatgtaatcctacatgtcattttatcaataagtattttttgcacgcagctagcaatccaagtgctagggtcaatgttctctcttcattgatcaccttaattatttctctatcacctatgggggcactccactggttgatgggacactagctactttctacaatatccacttgagccaatgaattttgtgtgaattttattgaattgaaatcctatgaaaatattttctacgaagccctttggattgtaaaaatgtatcccaaaatttctatatgatttcttccattccttcattttttctttagattccaaacatttcgtcaaagctcatgttttacaattctttaagaagtccagggcaacatgtcttttatctctccccttttacctatggtaattaggttttaattcaaatttctatgatttcccttaattttggtacaaaaattcatcaaacaacccaaagagcagcccagaaaataaagcatgcatgcagtagtttagctgcaattgttgaaatagttagcctctgtactgccttcaactagcaaagaatagcccaattatttgaccattagtgaatgatcagggaggctgattgagaaattttgcaatctcatcttccttgaggcctctcatgtctatgtagaaacatctgtgtgatttgccaacatctatgtggtgctttctctccctcacgcctttgatagtgtaccctctgtatgtgtggttttataagcacaagatggaatta

SEQ ID NO: 19348 - DNA, 6064 bp, Oryza sativa
ccctgtaaaggcatctcttggataagccgtttgctactacggacagttcaagtaacagcttcagcgctggactgttcactctgtaactgttagagtatatggataggactctagcatccgtttgttatactagatacttgagatctaagtcttgcactcgtatatatactgatccccgaggctaaatacaataactcaatatttgcagtatatctctctccctatactattcaacatatcatcaaggcatcatctaatctccatatgtctaccagcatgctaaacaatggcatgaagagcctggagagacacgagaacacaacaagaattacagatgaacaatatggaaaataatacatcaaatgattcagttccagttcatcacatgccatgtcagtaagtgtgagttggctaatggtagaggcaaccatttatcttttacatcagaaggagttcattctactaatctgcatatgaagaccgcataaggggattgccatggtgttggatttttttgaagagtaacaaatgaagcaaacaaatgctcacctagaaggtctatttgttccccccaaaattttgacatcatgcatcctcaccctatgagttgaatacaacacttggaattgttattgttatatccttgttggtggaagtcatagttacaaaaggatagccgtgtaaactattacacaagacaaaattcacatatgtactccacaacaaatgttcccttagttccaaaatataaggcacccacaattttaggaaaatcaacatttgtaacttttgactaataattaagcatataattatatatttagtgccatgcatgcaatatcattagatcatatttgagagtagttttacatgatgttaatgttatagttgttgataatatattatgaaagaaatcaacaatcattttagaccatgaaaaaaacattaacaccttatagttcaggacggagggagtatatcaaatattttctgtatttttttgaagaaaaagcaggagctctgccattttatatatttaggtagaaaaggagtgcagccagggatggagctaggtaggagaggggggggtgcccaggaactgatcaagaaatatttttagctatagttcatctattttcaccatatgtgcaccccctaatccaaactcagacacccgtattagtctaaacttggtctaaagtagagttaagcaagcgagtggcacccctctccatttcgttctagctccgcccctatgtgcagtgttcagtacaaaggccttgcattacaataaaagacatggacaacttaattataagaggtgcttataacaagagaactagtatgtaaaatttcaagcatcaactctttggtttatatcttgaatcaccaatacagcaactagctcttcagtttgatgaacatcttggaaagctcttctagttctgtctagccaaatgttccaccaagttacaatgagtgccccattactcctcttcatttgctcctttggttttaatggcaaaagggagaaaggcccaggggcttccggctagcaccacaaggtgtgggttaaccaacccaggttcgagcctcaccagtcaccgctctcttaataaattttgatatgagagctcttcctctcatatccagcacttttgagaaagtcctaggggtcttccggctagctgacctagttttgagctttacccctttcttggtaaatttagatacgagacccttcctctcatatccaacgttttgtttttatggcaacaagattgtatatctagttaccgagtgcataatcttgatcaaactataaacaccatattagttgagcctctatggataatctttagtttttgccaagcaaaatagggatctttcctaatttccaactggacaactgacctggttcactagatcaaaaccaggtgttttgaatcgactttgaaggttggaatgattcatagatagagcaccttataaccatcgtgctttgtgtaagacatgataacttctactccagttgttgcaggaaatgaattgtttcatatgaaatttgtaagttttttttagtgaaagggaaggacctacactaaatatgcattgaaggggagagaaagaaaagtgatttattgtctttgggcgcagtctttggtttcttggaagcattaacaatatgtgcacaaaatcattacgagtgaatactttgttttaaaaccaaagcaaaccacaaaaagtaacttgtgctactttgttacaatagctcttagcctcttatggtagttcttttgacatgaacgaactttgaattgatccctaagatgaaactctgtaagggaacgaacaagggtagtaacttataaccaataagagcaacccggaggatgaaaagtacactccctgaaagaaaaggaatgtttagctacaattgcatcaagtgttttggctcccttttgccccctcttcagcacactgccaccagttctttcaccagatagtgagtgatcaggggtgtgacatcccagcccagagcttaataggattaatagaatactcatatcaacaagttgcaacttcttttccggaagccgatctctaaagaactccgaggttaagcgtgcttggcctggagcaatttagggatcggtgaccgattgggaaattcttcccgagcgcgcacgagtgagaacaaagtgtacagaaaagacttgtgttggtctgtgaggacagtctataacctatgaaagccgctagatgtaagtgggcctggcctggggagaggcgggtcgttacaaaatggtatcagagccgaccctcgcgccccagatgtaagtgggcccggcctggggagaggcgggtcgttacaaaatggtatcagagccgaccctcgcggtttcacgggcgcgtgcatggtatgcatggctggtgtggacccggagtggtcacacagcatggcacatgcgctggcactggacacatggacgtggccaagagatgtaagtgggcccggcctggggagaggcgggtcgttacaaaatggtatcagagctgaccctcgcggtttcacgggcgcgtgtgtcggggcgcgtatgtcacagttgcgcaggcatgatgtgcatggctggtgtggacctggagtagtcacacagcatggcacatgcgttggcactggacacatggacgtggccaagaggggacgtgtgtgcagaaaagacttgtgttggtctgtgagggcagtctataacctatgaaagccgtcgtgcagaaaagacttatgttggtatgtgagggcagtctataacctattaaagccgccagatgtaagtgggcccctcccatgcagaaaagacttgtgttggtctgtgagggcagtctataacctattaaagccgccagatgtaagtgggcccctcctggggagaggcgggtcgttacaagggggactaaattggttgtgttgcaaattcatcttccttcaagcctcccatgtctatgtaagaaactataatgctagaaacaccatgtgctttggtactttcctggtacaaacctttggtagcgtgccctctttatatgctattttgttagtatgacattgaaatcaggttcctgcatcagatctgccacagatagacctgcaaacttttgccttcacctcctgcatcacaacaacatgcccctgtcgtcgccgccgtatccatccaccgcatccatctcctgccgtctccgccgcagccatccgccgcatccatctcccgctgtcaccgtagatgcgggagcgatggggagtggcgtggagatggagggatgtgcagagaggagcgggagggacgtggggaaggggaaggaagctaccgagccaaatccttccaccggagccgtccccggcatcggatctaaccactcacaaccctccccgccgtatccaagcgcccgcatcctggtagacgaggaactccgtagggagatgcagaagcgagggggagcggcgtggagcagggagagatgtgcggggaggagagggacagaggtagggagggaatctagacgccgccacgtcgatggaatcaatccaggagggggcggcggggagaaacgcgagagaatgagagagagacgcgagagaaatctgggaggcgataaggttcgtgtggtgtaaacaagagaagtcgctgtccacctatggcccacatgatacgatagagagaaagtttctggttttgtggttttgtgtgcaggaatcggttttttatgggacaaagccctccctctagaaatcgtctctttgtgggacggagggagtagcttggtagtatgttccctctagaaatcgtctctttgtgggacggagggagtagcttggtagtatgtatgatgggaggtgatctgtcttatgcatcgcactgtaaaattgcaattttccagtatttactgtgtctgttaaagacagcaaacaaccaacagggagaaagttttttttctacaccacaggcgcctcgctgtcgacgggtacgtcgcctaccactgaaagaataattagccgtaaatgcgagcacccgtatcaaatctagaatttgaacccgggtgggttggttccaccacaaggaacctaaccagttgagctatgctcacttcgcatatagggagaaagttatgtgaataaaacatgaaaaatataaaacggtggtacgatcaagatgcatatattgaaacaccttgtcagaatttataatgtcctaagagatgcaatactcccattacaaagctggccttgaagtgattgccttctacatcagctctggttaggctgtactgttgggaactatttcctccattctaaaatgtgttgttggtactcattagcgcatgattaattaaatattagcttaaaagaacttaacatacgtaatggtgtaattttttaaaacaacgatcatatagaaaatatttttttaaaaaaattaccggttggcagttcgagaatcatgtgtgcgaaaaacgaaagtaagagttcgaaacctagactaccgaactcagtattagtattatgtttacataaatccaaaatattttgtttagacgatcatcaacatattatgcttaaacatttggtgcaaattattttggcgtactagctaattactgaatgcatattcctgatcaagctaatcaccatgtgcattgagcctctctctgtgactccatggataatatttatccttctctagaagaattgtgcctatataactagaaaactggcctggtttactggatcaaagctcagtattttgaacttattacgaactaatctgaaaaacgttgataaataatagagggagagcaaaactgaaaaacgctgcaatctcgtcttcctcgaggcctcccatgtctacataaggaactgctaacaccaagaacaccgtcaactttccaagcaactgtccaagcgtttggtatcagcacaagattggatcatatagctttagcaaacgtgtacctttgaggaattgaatatggttgccatttgaggaattgaatatagcttttagaaagtgcacacaccaattaaaatgttttattctaaaacgttgcgctcttctttcatatatagtagtattgattaggccaaatctcttggtacaagatcagcacaggtgaacattccattttgaaagccaaggataagagtcttgttacaagcaaacctgaagagcaatttggaagctaaaacttgttacaatattgcgcacatggtttggcttcctattgcctcctcttcgcacaaaatttctggttgttccaacaatggcagactttgtaagggctcaaagaattactgcaatctcgtcttcctcagggcttcctatgcctaagaaactgctaataccaagagcaccgtgtgctttcctacgtacacagccatctagtgctcttcccgtccaaggtttcggtaggactccctctttatatatgcgatgctatcagaataaacaaactactttttgtgtactgtgaagtaaaaatttatctagctagattttttgtaagtgattta

SEQ ID NO: 19349 - DNA, 1376 bp, Oryza sativa
ttcctgcagcccatcagctgaaggacagaacactaaggttaaatgaaccttcagaattttgacgcaaggaaaatatgagcgaggaatcatgaagtttttctagtttcttaccgctgtaccataaacttctgctgtatcaaataaggtcatcccattatctatgcttgtgtcaaatgctgctttacctcctgcagtctcctgtctgatgaaatcaaaggaagcacgttttcttatcatttctttgttctgtttttggaagacttttcttcccaaaacagcagcaacgattgtatcacaaatacaaagaccataacatacacctgaagtggaaaccttacaaaagaaaaactctcccagaaagagggggaagaggggcaggaaaaggacagagttgataattaactaaccaatgatagggacatgttaagttgctaattaactaatcaggaagagatttacaccgggccctcttgaaagggaaacaccaaaccaaaaccagtgacctgcctgatggttgtagtccggaacaagaacaatcggatgaccgttggtttgtagacgatatgtctcaacaaaagggactttttggttgtcgaaatcacatgacaaaatatttcacaccggagaggattgaagtgacatgcgtgcaagtgcaagtcacccggggaggcaatgcaacaagcaccttgtgcgcatgggaagcatgacctgatcacacactttctgcccctgctgctttgagctgcttagaaccagacctactacaggtaacacctaaacaactgagaatcacctggagctaaatttgactgcaacaattagcaacaagaactaatcttttccagcacaaacaaaacaagcttgaacaattcgatggattgattaatgaggcagtgcgtaccgtcccactcggagtcgttccagtaggtggtgtccccccacgaccaggcgccgatgccgagcttgctcaccgccacttccgacccacccagcctcaccttcccctcctcctcgctcaccttcgccgccgccgcgtccgacgccaccgcacgcgccgccgccaaccgccgccgaccagctccaagaacgggccgctggcaacagcagccgccgccggccaccacctgcagcgccatggccgccgccattgctctgctgctacgtgtgtggtgcgtgcgtgcgtgttgctgctggctcgaggagaagagaagcctggctccttcttgtactctaccaccaaggccgcgacgaggcgtcgcggtcgcgggagccaacgatttttttttcaaaaaaagaatacaaatttggcggtagagttggagatgccacgtgagtaacgtgcagatgctgctgctgctgcgagatatctgcatgga

SEQ ID NO: 19350 - DNA, 1143 bp, Oryza sativa
aacacaaatgtagtcgacagattcaccagagccggcggaacgtaggacttaccccttcgccggagatcgaaagctgatgcagccctgcgtcaggtgccaaattccgccggttgataagtaaaaacctcaggaaagagggtggcgatgcgccgagagtagttgtattgatcgagattgattgattacagggacccctggtacacaatttatacccttgggtctatggagtccttgtcagacaagaaacaaactttctaaaagataaaacagaaacataaagtccttatcggacactaaacatactttcttaaagataaaaggaaactaacaaactattcctaattaatagatacaattgccttcttcggactcaatccgcatgtggcaatcctcatgaagcaccttaaacgaacccgacaatggttccaacatccccttgtcggaatcggctacatcggcttccttgtccgattcgatatcagttaatacaccgtagccgatgctgttccgaagccgatttatactctgtttctcttaccaatttccttccaaatccgcttcggtcttaactccaaatccgatacatgatttaccaaatttggtcgttaacaccggtatagtgaattccatagctcatagtgccctttagatagcgcattactctttccagagcctgccaatgatcatctcccggatttgagacaaaccggctcagcttgcttacagcaaatgagatgtcaggcctcgttgcactagccaagtacatcaatgaaccaatgatttgtgagtatctcagttgatcccttgctattcttcggtttttccttaatagcacgctgggatcataaggagtaggagctggcttacagtcactgtagccaaagcgactcaaaaccttatctacatagtgggattgcacaagtgtaatcccaccctcatctcatctcagtagcttaatgttaagaataacatcagcctctcccaaatcctttatttcaaagctcttggacagaaagtccttgacctcctcaatcacattgagggtggtcccaaagattaatatgtcatcgacatataaacacaatatcactccttgtccctcaccatagcgatagtacacacatttgtcagcttcgttcacaa

SEQ ID NO: 19351 - DNA, 759 bp, Oryza sativa
  unsure (1)..(759): unsure at all n locations
agtgaactgctatcgtattcctgcagccctttatcttatagagagacgtgtcaatgtctaaaacgataaaatatttttttttatttacctgggcgaggagctcctcgggggagccgaactcggtgatggtcttcttggtggtggggttgattatgacggagacgttgctgttggcgtcgaagttgtcctcgtagcggaggacctgtccggggaactcgcgctccttgctggggttccacttggacgggatcagcagcttgaacccctcgccgctgtaggcgatgaactccgtgttcgtcttgggcttcccgaacacgttcgccgcctcgccgtaggccgcggcggcgggcgccaccttcacccccaccgccgccgtcgctccggccagcagcgcgagcgccgcgcggcgggagacgtcggcgtcgtcctgcttctgggcgcggcagacgaggaggtgggtccgtgtcgccggggacggggaggcgacgcgcgcggcgacgcgggccgtggactggtggaggaagcangaggtggacgccattgccggccggtgggctggtgcctcgccgctgattgcctgcctgagagtggagcggggtgtantgtggtggagggagagggtgatggggcgaggtggcgacgggataaccaagaggagagcgcattgggggcgccgcggtggctaggacttgtggtgtttggcccggcgagtggatggtgttcggaatcgcggataaggcttccccccgccccttggcg

SEQ ID NO: 19352 - DNA, 4804 bp, Oryza sativa
taattcttacaatctgaacacaaaatacccaaagaaatatacagtaaggccctaaaattccagaaaatgcgactattaaaagcacgaacacatcatctgctcatggaggacgtgatcaatcaaatgaatgtctagtacttgagctacataactggatgtataaccaatgtaattcagaataaaacattgctgtgtttacattcaataagaataaagtgatgcacacacaactatagaactgtaaatcagcaaccaagtgcaagatgtcaaaaggcagataaacctaaaattgtggtaaataacaaatatatatactagtaagcacgcatggccaaatctagagaggcaattttcaccttgtccatcaacttgttcaacttcttcttttgtttttttatctctgtattcatcttatcattctcgccatctaaaccatcttggacaaaacaatctgcacaaaatattgagataattggatatactagagcagcataaaactgaattaagttttgcatcatcaaacactaaccattgacagcattgccatcctcactgtcagaataatatagacattcagagtcctgcacaacgagcaattcaggggcaatataacagacaatagataatgtcactggttggaaacagcaaacttatccaaagcatgctatagaggttttgggagccttgatgacacactattggcaagaactgagccatggtgactacggctgctatagtgatgagctaatgatagccaaccatcatacttgatatataatgtactaacataccaaaaaactgttcatctcttgccaacagatactacagtctcctacttggattttgcacagaaataagcagatttgtgaagaaagtttatcaacaagaataaaaaggaataatgcctatgcccttgtcaataggatggaattaagaaaaaggcttgatatatgtggaccaagctcaagcttggacaaatacaaatttgttatatgcttgagcacaatacatggaaggcatcacaatactgtaaatatggacagttgtgaacattttttaaaaaaaaagcatgattctttatgatggaatgaatgctggttgtggatcaatgaataagatcctctgaaaaggataagcagacatacctctgaaagataaccatcactatcagacagatcactgtttaattcacattcatcttccgggaactctaggccattaaccaaagctgcagcatcaccgttgttcctagaggaaaagaatttcgaatttatttagtaaattaaataaaagaaacactaatgaactattgtgcagtattatcatgattaatgaagttgtaaagttatgaagttgaattgaggttagtctattgcatcatttgagttgcaagcaaagttctggtcagtctcaatatctagtacaattcagaccagatcaattccatccaaaaaaacaaaccgacactatcaaatgtgtgaacctagcaaagcattgcaccctccccttctagttttcaccctattgtatgttggaaagcatcctgataagcctaccaaaataaacaaaaccgtaaggagaggtgaaagatgattacatgacgttatcgattgctcgctgcggcatctcgtcatcgccatcgccatcgcgctcgttcccgcgaccgctcccacctgaggaaaagaagagcatatgagctaccaacagaagagcccccgtggactggagccgtacggaaccaaaccacccggagaagagggaggagcaggagacgacgggggagcacgaacctctgcgagggcggcgggcgaactgcgagcgctgcttgcggttacgcttggcggcggactggaggtgcttgcgcgcgaacttgcgcgccttcttcccgagcttcttcgccatcccctcccctcttgcctcgctagggttagggtttcaggtgttctcctctctctctctcttcttcttcttcttcttcttcttcctcctcgagaagacggtagcgccggcgctccggcggagttgtggggtgagggttttggggttgaggacaagagaaacgtgggcttaaatgggccttctatggagcgcattttgtgggctgaggctgaacagctcgagtacattttcggacactttgaagtttttttccatcccatttttcaccctaaactatataaaatccgttattttttatctgatcctatcatcctaagttttcacaacccaaatagtagtttttatgtagaaaatttttaacttttagttatatgccaaatgcaataaggtcatttcagatccctaaaacaaatgtctaactattgatagactaacgaaaatcgttagacaagcgagaaagatagaaacaaacccaatgatatatgagaaatcaagtaaatatcatgagcttagttttcaagaatcacctgaaaaatcaacgacacttacgctgcattcgccatgtggtgtttgggaacaaatcctacacgcacgcaaaataaagtgattcattagcgtataattaattaagaattagctacaaaattttaaaaagttagattaatatgattttcaaagcaactttcgtatataaaacttttgcaaaaaaaaacatcgtttagcagtttgaaaaatgtgcgcgtgttcggttctttccccttcttttacatgtttagcaaaaaaacacacgcttctattaaggctgtgtttttgttgaaaagaatgtgtttggttgggtttgacgcagtcggataggagatggtcgtctctaagagcatctccaacagtttctccatcccactcttcaagccaaattttagccattctagcccaaaaacgtgctccaatagcctctccaactggatgactaagccatccggctggccaaaacccccctacactagccaaatttggacaaccagaaatcattggccaaccgtaggccccacacagattcctcccccctcccccctctctccttcggctcggatggcgcatgcggccaagacctcgacgcaggcgtcgtgcactgccgcgagcaccggcttccatgcgtcgcctgcatctccaggatggtgcggcggagccccttggccgcgagcgctaggccgcgggcgcccggcgaggaagaggctgtggtggggttcttggggagccgagctcgatgcggcgcagaagtgcggaccggcagcagagagcacgatggcgagcatcttgaacccacgccggagtgccaccatcgtcgtcgaggtcgccagccgctgtcgccgtcgtctgcaccgtcgccatccactgtcgtcgtccctgaggttgccattatcgtcgtctggatccggctccgtccgacctccgttgcctccgtccccaccggattcgggcggcgcggcgttgattttggcggcctctgccgtctccgcctatgcctccttgggctgcggttgccgacttgccgtcgtcgttgccattcgccgacgccaccatcgccatccactgcggttgccgtcgtcatttccattcgccaccgttgaggaagaggaggggagagaaaatccaggagaggaatccacccgttgccgcagtaacgacacgatcaatgtgtattgaatcgcctgcccgttacagaggtaatctcgcgaattctgaaccgttgcaaaagaatctcgagacgtggacgcgacgcacgccacgccacgcccacggcctcggcccggctcggcgcgcgcgcgtgtgactttccgatccccacctcaaccggtcaacatggaacctccaataactccctatttaagttgaggttctccacttttaattcccagggtggtattattatctttaacatttattatgggcccttgagattttaatagaaaaatcgggcctagcccatttattctaacaatccccaccaaattttatggctcataagaaatgttctcgaagttgaacctgtttgatataccagtgttttggtggagactgttaagttgaacttccacctaagaaaagagctacatcagaccacaactgaacaatggactatgccttgaattgtcattcttgtctgatcaggtttcactcaaacccttgactggtactgggctgccgtttgcatcccctctgtttggagcatataagtcaaactccaggcccttttatgagtatctagagatcgcccaaatctcatatactgtgactagcagtcgaactcatataggtgtgttccttctgagatgttctgcaggtcaacatctctgcttagaaaagccacttgaatcgcattaaggcataagccatcccaccatgcagaatagaagagaagtacatcatgaaaatgagctcttttcaatggtctcttctctcagccacacaatagtttgtttcgccatccaaattcacgggatctccgatcacaatggataggtttccactattgtgcaaccttaggtgggtatcaagcccatttctcttgatgcactgtctatcacattacgtggtagccccttggtaagctgatctgccagatttttagccgtttggacatagtccaatgctattactccggagtttttctgctttctgacagatttcagtcttcttttgatatgcctagatgacttcatgttgtcctttgaactgttcactttaataatcactgtttgattatccagttcattaggatagctggcactggtttttcaactaccggcaaatccatcaggagttcacgaagccactcggcctcaactgtcgcagtatctggtgttgtaagctctgcttccattgttgacctcgttaagatggtctg

SEQ ID NO: 19353 - DNA, 656 bp, Oryza sativa
ttatgccgaaggaggaggtgccaagaacggcattggcacggatggcatcggcggcagcgtcaccttgggcacggccggcatcgacggcatcggcggcagcgtcaccttcggcacggccggcatgggcggcaacgcggcgttcggcacggcgggcatggctggcatcggcggcaagctcgccgccggcactgcaggcaccgcgggcatcggtggcaacgtggccgccggcacagcgggcaccgcgggcattggcggcacggtcaccgcggggacggtaggcacagccggcaccgcgggcattggcggaagtgccaccttcggcacggccggcatgggcggcaacgcggtgttcggcacgattggcaccgccggcatcggcggcagtgtcgccgccgggacggcaggaatggccggcatcggtggcaatgtgacagcgggcacggtaggcaccggcacggcggcaggaggtgttgcgtcggcgaggtggcgcgccgcttggcagctgcggctgctgccggcgagcaagacggccatggcgagcaccgtggcgaggagacccgaagtggaagccatggctgagagatcagtggctagctagctagaactgcaaaacgagagctgctcaattggtgatgcaaagatgtgcatctttcgca

SEQ ID NO: 19354 - DNA, 671 bp, Oryza sativa
cctgcaccccaaacagataggtaatacccagatcccatgtaattagcaagacatgcaattttatttgcaaacgataaaacatttgtaaattaggatcaaaattctgggaatgtgtgactgtaacgtcccgccttcccccaggccgggcccacttacatatgatagctttcataggtcgtaacatgagctagtcgatttattacccaaggttgacaaaggacagatatcaagtaaatatggcacaagcaaacagataggtaatacccagatcccatgtaattagcaagacatgcaattttatttgcaaacgataaaacatttgtaaattaggatcaaaattctgggaatgtgtgactgtaacgtcccgccttcccccaggccgggcccacttacatctgatagctttcataggtcatagactgccctcacagaccaacacatgtcttttctgcacactttgtcctcactcgtgtgcacccgggaagaataattcttcccggtcggtcacccatcccaaattgcaccaggccaagcacgcttaaccctggagttctttggagattggctttcggaaaagaagttgcaacttgttgatataagtattctattaatcctattaaaccctaggccgggatgttacaccctcacccccttaagagagatcgacgccc

SEQ ID NO: 19355 - DNA, 755 bp, Oryza sativa
cctgcagcccaattaatacacaagaggtataatataatactccactagctagctagtacagtagttgagcatgaaattttgtctaaattattatttctctctctctctatatatatatatagttaacatacctgacaaaccatatgtttacacgtcgtgttacattagagttattgcgcatatatacataagtttcccattatatatatagcactccagatatattcatatataccatgcctctttattgccaactatatatatcacataagtaagtaggagtaattaatagataaaggcatgcatcgaataattagtacgagtagctaactagctagtacacagcaaaacctctgcagtctgcacactcaccacagtgatcacctattacaggactaattgaaagtgctgcatatttgcatgtagatgagtactcttagaccatgcagaacttattaacgtagagatcgttatactcatcataatatagtctagatgatcagtagtaataatcatattatatccgtaattaaatcaggcagctggagccacatcgacgtcgtcgtcgtcgtcgtcgccgttgctgcgacggttgccgacgaggaggttgctctccagtagcaatgcccatgcaaggcgctcacactcgctcttcgctatcgccattgatgatctccaagcacagtgtattttggctatcgaggaagacgaagaagaaagtgtttctatatgtatatggtcgatcgagttgagtg

SEQ ID NO: 19356 - DNA, 591 bp, Oryza sativa
cccccatcatggtttacaacgttttcttaccatgtattccttgccatttgctgacatgttttatttgttatgctaatgatgttttggcatggaatttcccacgatatttcaaagacactactgcgggttgatctatcaaaaaataggactgataaaatcataattgttttgagcagattggttcactgcacacattcatgaggtatatatgtcataaaagttggctgggtgagtgatttctacctcagaagatcatgaattatttagccttaaagcttcctgattggtggtgggtttttggccttgatcaagcacttcatgttgacattgatatctggagttcaagtctttttcagagcgtcagaagaaggtaattacattgtgccatcttttaacgtgttagcaaattaattttgtggcctatgctatggtgtacatttctgaatttgatgattcagttcttctggagaaaatgtaatttgattccagtacaccagcaacattactctacacattgttgtcatgagcaaaaagttgtgcaaaattccatgtgaagtttgctgcgtggggatttttcttagtgactgatac

SEQ ID NO: 19357 - DNA, 733 bp, Oryza sativa
ccatgagatgcaggaacgggttcaccggaggcgcgacgtccatctcgccctccagcatcttcaccaccgcgcccatcggcggccgcgcctccggccgctgctgcacgcaccagaacgccacctggtacatcctcaccaccgcctccttgcaccgccgctcgtcgtcggcctcggccacggtcaccacggcctcgccgtcgctgccactacagatctcgtcgctcggatgattgatggcggcggcggcgtcgtcgaccatcatcaactcgccgcgctcgtacctggcccacgcctccatcggccaccactgctggctctccggcgcggcctcgtcgaagttcctcctccggccgacgatcttgaggaggagcatgccgaagctgtacacgtcgcacttctccgtcacgccggactgcatcaacgtctccggcgcggcgtagccgggggtgccgcgcatgccggacacggagacgtgcgtgtcgccgcggttcaccagccgggccagcccgaagtcggccaccttgggcgtcatgccgccgtcgagcaggacgttgccgggcttgatgtcgtagtgcacgatcttgtgctcgcactcctcgtggagcgtagcggaacccccgcgcgacgccgatggcgatggcgcgccgcgccgggacgccgacgtcgcggctcaggtcgaacaggtaggcgtctagcgcgccgttgcccatgtactcgtacaccagcgcgcgca

SEQ ID NO: 19358 - DNA, 4803 bp, Oryza sativa
gcttcagcaccagtaattgaaaacataaaagtattaccgtaaaataattttttggtaaattttatgtaaattaacccgggtattatggttcttactgcgtagaaccacagtatcgcgtgcctgggcttaaggcaataccctaaatttaccttcgaagtatactttattatccgcactgctcacgtggtggctatcacgccgtaattcaaaaaactacggataattcacttatacctaattaccctactttgtgtctttttctccaactatgtgtttacgtatattcgttaggatttaaatttgaggcctctaactctagtatcatatattcatacgcaatcagctagtccaacccaaaaaaacaacttaatttgacaaggagatatggacaaattccaagaggtcgatcgatcgcctgagtaaacacatgggttaaaacccaaatttgccggacaattaactagaatcaaaatcacttgaaaaccatacaaatttaagacattgactttataatcacatgtatatgctattccctccatcctaaaatataacggattttgaataaataagacacatcttatctatctagatttgtaattctaagatgtgtcttatccatcaaattccttatgttttaagacgaatgtagtattatctagctaaatatggaagcccgagtcgagtcgataagcacacaaatggatagaattcgccgaacaattaaacaaagatcacttgaaaaagcacacaaatctactaccaaaacacaacataaaacagaacagaacaaaccaaaatgaattaccactagtaataataataactgataagtctattcttcataaaaaacaaattcaattttttttgttctgctcccacgtgaagtcgcgtccccccaacacttgtccagccaccaccacttgttctttccttcccctcctcttcctcctcctcctccgatccccatgcctcctccgcctccgcctccctcccccgccggccaccgctagctgccgccggcgccacccccgaggttcgtctcccccggatccgtgctcctcctccccctccgaatctccccgccccatttcacccacctgattttctttacagcggttgcgcctagggttcttgattttgagcttcggagcgaggcgaggcggagatgtcgttccgcagcattgtccgcgacgtgcgcgacgggttcgggagcctgtccaggcgagggttcgaggtgaggctggtggggcaccggagggggaggtctcacagcgcggtgcacgagctgcgtgacggccacgcggccgccgccgccgccgacgtggtccagagcagctgctgggctaacctgccgccggagttgctccgggacgtgatcgagcggctggaggccagcgaggcggcgtggccgtccaggaagaacgtcgtcgcgtgcgccgccgtatgccggacatggagggacatgtgtagagagatcgtcaagaaccccgagttttgcgggaagatcacttttcctgtttccctcaagcaggtgatgatgatgctctcttgcttagtcttgtatttccgcgcttcgatttcagatttgtttaactaacatacatctttgatggttgtcgtatacacggcttaatatgctcatttatagtatgcgaaatgaaattctgatatagaaatatttgatatgttcattaatatgcttttcttgaccatgttttgtttttcagcctgggccccggaatggagccatccagtgcttcattaaaagggataaatctacccaaacttacaacctatatctatgtcttagctcaggtaagcctttatcctagtattgtgtttgtttttgtactcgctacatggcatgattatttgggggaaattggttctacgacactgaaagatcctgttgtgagtaatttgctatctaatgatctctatacactttaatatcatcgagttaggccgttcacttttataccattccatctgaatttaataggttgccattaaaacggactcatttgtcctctagcaacgacataagtgccacatgacacactcgcactaaaccctttcatttggctttgtcttccttgcgccgaaactacagcgccagcccccgtgatggccgccctttccattgcgctctcttctcctcttgatacagcgcgcttctcctctgaatcctttctatgcctcctttttttctctaaatcgaggcctcatcaacttagacattttcgctgctcaactgtcatggcttcaaggctgcatcacgaaaggatctgagaagcgagaactatcatgccatggtcgttgtgtgctgcaattcaggctgatttggattttcgtttggctttgtcttccatgcgccgaaactacagtgccagcctccgtgatggccgccctttccattgcgctctcttctcctcttgatacagcatgcttctcctctgaatcctttctatgccttccttttttctctaaattgaggcctcatcaacatagatattttcgctgctcaactgtcatggcttcaaggctgcatcacgaaaggatctgagaagtgagaactatcatgccatggtcgttgtgagctgcaattcaggctgatttggattttaatttggctggcaattggtgcttgtaaatttctgaaatcagaagagcccgcacatagcatccctgagttatttgggcctgcttgatgattgccgtttgccaacgagatgggaatcgtgttgattgaagctgtagctgatatgcatttcagcacatttcgttagtcatttcaaatttgtcaccggtgagcatgttggcctgcttgcaccaggcatggacagttgctgccttcttgaatggtgcagcgctagcatcgtggcagagcagtcgtgaccatagttattgagaccggaccggtcattaaaccggcgatgccctcggttcaatggtttgttggttcaaccggttgaaccactggtttgaagcggttcaatctaatgtaaatatatagtttattccttcaaaacacaaggtgtatcatagcccggtggttggttggttcagttccatgcatgaggtactgggatcgaatcccacctgtgcccctttttctcacatttttccctctccagctgccgaggtgaccgcgcgcaatgcagaccgggcggttgaaatccggttttcttggcggtttttctacaaaaccgggcggcccaaccggtttatactgggccgattgcacagccggtcttttagttggaccagaccggcggaggctccggttccggttttttccggtccaactgctggtccggtccggttccaataactagggtcgtgacagcctgataggagctcgtgctgatgcacatcctgcaacccgacgctgcagctgtgcaacgtcttgaggtgcttcctcatcagtttcaccaggtcctccatgccacccaccactgtggccctgacagcaacgtgaatggctgtgacttgcattccaaaaccttgcaaatccaaatcaacaagatacacactagagcttgagaatatgggtggcacagcaggcggcactgcagcggtgctggtgacaatctggttcaagaagctcaagacgtatgtctaatgggcataagtgtaagttttgagtgcaaaaaagggggaaaatccggtaaacactaatggaaggggatgcaatggttaaaaactgaacgacgtaatctttcgataatattaaagtgtaccaagatctttcaatggtaaatttctatgaatgggatctttggatgtcataggaccaattttcccttattatttagactgcatcacagctagcacttcctgtgaggggcttgtatgagtatctattgtttatataagcaagaatgcatgataccttgcataaacaacaaccagagattaatgtatagcttgcatatgtggcataatcatttacgctccatcaccgctagcattccctgtgagggacttgtatgtggtatctattctttatataagcaacaatatattatacatgacagtatttctccttgcataaatatcaaccaaaagttaatgtatgatttgcactgttagccagtatgtatgagttattgaggcatataagttatgtatgaccgtacagcttgtttggtattagtttaattattgcatactgatcttgcttaattattgcaattcccacgcgtgctaatcatttgtgcatatggatattcataccataccacctcctttgttaccccccccccccttttgcagctatttcgtcctgttgtgagctaatttcttactgcatatatccctcccaccagcatacttttttagtttctgttatatttgctgacttcacatgttgtaacacatctcatgtagctgtgctcgttgaaagtggcaagttccttttatcggcgaaaagatactcccgtgcaacctgtacagaatatacaatatttatgagtgctgacaatacatctaggtcaagcaacatgtacattggaaaattgaggtaataacccaaaataatggcaactttgtttagagaaggtacatcgtctaagtgttttaatggtataatctgatatatttactgtgttggacttttaggtcaaatcttctcggaacaaagtttgtaatatatgatacccaacctccatgcaacacagccaatgtttcacagtcagggaaaacaagccgtaggttctactccaggaaggtgtcgccaaagaacccttccagcacctacagcatagctcaagtttcatatgaactgaatgtcttggggac

SEQ ID NO: 19359 - DNA, 2157 bp, Oryza sativa
cagtagcagatattctgacatctcagtaggtggccccatggtcggaggccaggcattgggtgacagtgatgagtccaaggagaggccattgattctccgtaacaaggccccaagatggcacgagcagttgcagtgctggtgcctcaacttcaagggcagggtaaccgtcgcgtctgtgaagaacttccagcttgttgctgcaacacagcctgctgctggagccccgacgccatcgcaacctgccccgccgcctccacctgatcatgacaaggtcatactacaatttggtaaggttgcgaaggatatgttcacaatggactatcgttaccccctttcggccttccaggcctttgcaatctgcttgagtagtttcgacaccaagctggcctgcgaatgaaatcatcggtgcgaaagcatggttatcgattattgtaacaaattgggccccctccaaatttagctgggggctctatcctgttgtttgctatttatgccctattaacttgtagtcattagaaaaccaatgttttttttctagacatgttccctgatttgtagatgctgttgtgttgtatctgtatccctacattctccttttcttttgttttttttaacaggttgctctgtagaagcatatttgctctgcctgtaactgtaataattagctgactgaattgttatgttcatgcttggcttgtgcctagagtttcaaatcttgagttgtatcaaaatttcgtaatggctgcctgttgtgggagatgtgcaatgtatttttgatgaactttgttgagtggcaataaagcaacaatcagttccatgtgcttccaagccatttctccatccgttgtattctatcatggaatatccgtttgtcatttgatgaatgtttaatcggtactagttttagccgaaactctcttgaactaaagatgagcaatggaagaaaaacaaacctaaattattcctaaaattaagctgtgaaattcaaaattgtcctaaagacatactccctccatcccataatataagggattttgactttttgcttgcactgtttgaccactcgatttattcaaaaaatttgtgcaaatataaaaaacgaaaagttgtgctcaaagtactttagataataaagtaagtcacaaataaaataaataataattctaatttttttaataagataaatcgtcaaacagtacaagtaaaaagtcaaaatctcttatattatgagacggagggagtagtaagcagctaacggctgctaaaagttaaaaagaagtttgacagtgagtttttgtaagttatttttaaaagcacatgcacaactcatcagggtttaaatcctagtatccataaataagtggtctttcaatagaatttttgtgagattatggttgtgttgttttgaacttatgctagggaacatattcgtcaggtggtaagtgtgctgttgcgtgtgtaatgatgtgtatgggtgtgcggaaatatttgtaagtttttttttatatatatgtaaagcttttgaggggaaaaaaagaactgaggccgatctgcttgttccatttccgcagtgttcaaaaccagttggccgctgcctgcctgcggatgctctgagaaagtgagaagtccattcggactgctgcgtgagaacaacgcgcgtacgggcggcgccgacttcgacgtcgacgcggactccctcctccacgctcgccggcggccggaagctcctccgggtgaaggtacggttggttcccgagcgagccccaaccctaaaacctttgacacgccgcccgcttcccttcctccagtccaccgatccaatttgagttttcttttttttttcttcttcctttttcctttgcgcttgttcgttggattggtgcttggttagaactcgttactccggccgcaacgtccagcggctattgtaatctggagagtgcttcaatactctgtggatgcgatgcgatgcgatggtgtttcgagttgtttttcgtttaagccagcaggtgtggtgtgcgggatttatgagaaagatatattcgatgattagcactaatttgatctgatttcgaccactgtgaaagttatcagatagaaatgagtagtatgtggtatgtaccaagcaatttatggtttggatgtatcatcattcag

SEQ ID NO: 19360 - DNA, 926 bp, Oryza sativa
tcttgaattcaattattttccttctgcaggttgcttatgtgttaggtcagctgcaaaataaagctgcttcggatgcgctttccaccgtctgaagaatgttgatgagcatccaatggtcaggcatgaagctgctgaggcccttggttcaattgcaggtaactaatactgcaagatttgttaagtctcatattgagcgtccatatttcatagttttctgagggtactcccactgtcatctacagatcaagaaagcattgcacttctggaggaattcgcgaaggatcctgagcctatagtctcccaaagctgtgaagtcgcgctcagcatgctcgaatacgagagatccggaaaatccttcgaggtatattccctagatcaacagaaataacctttgtgcctttgtggtatcgtctaaccggcttgtgtttgttccatgcagtttttgtttctgcagactcctggggtgcagcaggagtcctgagtaagatagatatatctactccaggcttctatatcgatctactgccaagctgaccgacaaattttgtcatcaattttgtcaagacgcttcactcctatcaatagttataccataagagtgtttgttgcttatgtttttcaccactattgtttctcctggtctcctgctgcttatgtcttggaccatgagagtcaaaacagctagtaagaatttacctgagaattttcggtttcatggtaactagaaataccatgtaaaactttacacagatagtcaatgatgtatcgacatagcaacattaaatattgaaggacttcatgagcaaacagaaagagaacaataggcggacacgttctagagcaaaggttgctgattacctgttaagagtggattgttcctatcgagaatgattgtatactcgttttacatgattgtgactgttttg

SEQ ID NO: 19361 - DNA, 643 bp, Oryza sativa
tcaaataacaaagatggaattggaaagaacatctgactgcaactagaaagctcattcagcatctgcacaagcctcagtctcaatggtaagtaacgtgtgcctgggaataagtgagccactcctcttattatttgaacaactgaagaaagtaatggatgcatattgtagtccttgtagttacaacaaagaaacctaacccataggtttacacagttaatatattgccagttatctaccttcctgaggtcttcctgcaacaacagtcgagattgcatgtaaatatccatgtggtgccaacaaagcaaaaaagaaagcaaggcgtttaatgtacaagagcagatatcctatccttttcttttaaagatgtgaaaagggcatgtatatcagcaagaagttttttcttgtatgactgtacagaaagaacttttctattcatagcaacctagcaagaaaatgtaattggcatgtcataaattctaaattgtaaaaaagatgtggtgataactgattgactgcactttgtgaattcaacgttcacagtgcaagaaggaactaatcaacaacataacatatatgcctcaggatttcctttgactttactcacttcagtcttcagacagggaaaaaaatatacaaaccagaa

SEQ ID NO: 19362 - DNA, 894 bp, Oryza sativa
tatattccattatactataataattaactaatcatccttttgatattatgcttcaataacttgcagttgctttcaaactttatgatctcaaacaacaaggtttcattgagaagcaagaggtatcttccttctgcttgttcataagccactctttcttgttttgctatttactatactccatgagaagcaagtgttgcatttttttagacacatgctttcagtaccccatatattagcataatttcccacctaataatttagcacaacaattcaacttgtcaagtcatgttccaggataagccgtttactgtactggcttgagtatttaagaattgtgagagtttttatgtctattacggcaaactaaactgcatccctctggaaggttaattgtttatttgtttgagaaggcatacttgatttagcatcaactcatgtagcagctgttggtcaagaaaagttattctagtccttgattatcaggtgaagcaaatggtggtcgccacacttgctgaatcaggaatgaacctttcagatgagattatagaaggcattattgacaaggtatgcatgagaacctgcattgcagtacagtgcgtatatctgttgtatttatactcagttgcttatggagaaaaaaaacatttgctttgttactagacatttgaggaagcagatacaaagcatgatgggaaaattgacaaggaggagtggcgcaaccttgtgttgaggcatccatctttattaaagaatatgacactcccatatctcaggtcactgttgctaacctgtttgtgcattctgtttctttttggtatcttaggtcactgttgctaacctgtttgtgcattctgtttctttttgttcctaataaataacttgtcaacttttctt

SEQ ID NO: 19363 - DNA, 734 bp, Oryza sativa
ggactcatttgtcctctagcaaggacataagtgccacatgacacactcgcactaaacccctttcatttggctttgtcttccttgcgccgaaactacagcgccagcccccgtgatggccgccctttccattgcgctctcttctcctcttgatacagcgcgcttctcctctgaatcctttctatgcctcctttttttctctaaatcgaggcctcatcaacttagacatttttgctgctcaactgtcatggcttcaaggctgcatcacgaaaggatctgagaagtgagaactatcatgccatggtcgttgtgtgctgcaattcaggctgatttggattttcgtttggctttgtcttccatgcgccgaaactacagtgccagcccccgtgatggccgccctttccattgcgctctcttctcctcttgatacagcatgcttctcctctgaatcctttctatgccttccttttttctctaaattgaggtctcatcaacatagatattttcgctgctcaactgtcatggcttcaaggctgcatcacgaaaggatctgagaagcgagaactatcatgccatggtcgttgtgtgctgcaattcaggctgatttggattttcgtttggctttgtcttccatgcgccgaaactacagtgccagcctccgtgatggccgccctttccattgcgctctcttctcctcttgatacagcatgcttctcctctgaatcctttctatgctt

SEQ ID NO: 19364 - DNA, 995 bp, Oryza sativa
aagaatatcgagaaaaatcgtcaacaataaccaacacataccactttcctccaacagattgcactctagctggaccaacagtgtccgtgtgtaatagatgtcccggtgcatccgtcatcacagaaacaataggagcatgtgaagaagcaaccatcttagcatgacgacacggtgtacaaaccaaatcaagatctttcttaagtttaggcaaaccacgaacaagatccaaactacttaacctagtaagataatcaaaaccaacatgtccaagtctacgatgccaaaacatcacatctttatcaaacttatcaaccaaacatgttatcacaggtgaaacaggattatcaaaatcagctttaaacactcttccatagcgagaaatattcaacacagaatcaccacaagaatcaaaaactttacttccagttttcttaaagtgaacctcaaaatcttcatcaacaatttgtgaaaccgaaagcaaattatactttaagtcctcaaccaaagctacattcttcaattcaaatttctcatttaccttaacaaaacctgtagcgagaacagcactagtagatgcatcaccaaagataatcgattcagtcttggatgccttttttgagggaggagaaccaatttttatcaccggtcatgtgccgcgaacaaccggaatccacgatccacatgttctcctttcacgccaccaaagcctacacacaagcagaagtcgaagcctcagtactggggttagatgataacaaaaatttaggaatccagtactaagacacacgaccagaagatccaataggcatatatccacgtgcaaaaacagtttgataattttccgaaaaatttctccgagggggtaccattgttctgaccgggggccggtccgaccgccgctgtaccgccggtctgaccagtgcccggtctgaccgccgctcagtagccggtccgaccggtcgccggtccgaccgcgagacccactgcggtctgac

SEQ ID NO: 19365 - DNA, 2277 bp, Oryza sativa
ctgcaccccagctttgcttttacacacttgggacaagaaagcacttcattggttttcacaacatcttccatgtacccaacacgacctaaagcatcttttaatttcaacttattcaaagtacatgttgagcaatccaaaacatcatgaggttgttttaactttttagcacaaatcatgttaaacatcaaactagcatgaaaagcaatttgatatttttgcaataactttttagttaaacacaactcatccaaagtgcgtgtgtgcaaagcaaaactaagagctagagaagatctatttttcaaatcatgtgcagcattaacatctctaattttagaaatttcattcattaaaacctcacaatttgtgcaatcatcatcattaggaataagatattttaatctagcaatttcagaattaagagattcaatgataaactcctgttttctatacaacttctcacacttcatattttttgcactcaaaatattaatggcttcctcaagagcacttacctcattgtcttcacactctgaatctaattcaccacgcgccatgaagcaaacaccggagatgttatttcccttatcttcatctccactctcaccatctacatcgcttagtggctcaaacgcggtgtagacttgatcaaaagccttcttgagattctccttgatcttcctccctttgaatgtacccttcggcttgttgtcattggtcttctcatcaccattatcttcccccctcgctctcccaagcttaggacatcgtgaacgaaagtgatccgtagaaccacattcaaagcaatgatttggtccacctcttttcctttacctaacattagtcacagctcgagaaagtctgttagataacaaaaccaagtcctcctccacgaactgttcgagttgatcatcggacatggcattaaacaaagcaaatgcggaagacttcgatgaagaagaatcaacatccaaagaagttgaggaagaaaccaaaacactcgagttagaatcaactttacgagaaagaatattcatctcatgtgttttcaattttgtgtaaagcgaatccaaagtcaaagtagacatatcaacggactcctgaatagatgtaactttcatcttccaaatagacatatcaagaccattcaaaaagtggtgagaaatctcatattgtgtataattaacatcataagaagaatcaacagatctaagatcactcaaaattttgttaaacctagaaagatagtcatccaaagcttctccaggtttcatctcaaatttaatgtactcctttttgaaaagatctcgacgaagctcttttatgttatttgttccttgatgaaaatactcaaagcaatccaaatctcatgggaagtttgaatatgagcaacacgatcataatccgaacaagaaatcccactcaaaagaatattgcgagctttacaattttgttcaaactcagtttttaaagcagcggtattaatttgttcatgaatcacataaggatgagaaacttttctccaaatatcataatcctcagccataatgtaatattgcatcctactacaccaatgagaaaaatcagttccatcgaaaacatgaggcttagttgaaaacctaacagccatggcaaaaactctagatcagttaaaatccaaagaagaaaaaaggctctgataccacttgtaggatcgaatcacaacaactaagccaaccagaggggggtgaatggttggtatacccaaaaaacaaaaaaaaattacggaaataaaagttaccctcaaattctacggatcgcattctgaccgaaggtgttgcgccggtctgatcgctggttgccgacggtctgaccgatattgtatctccggtctgaccgccgagatcagctcctgtcgcttgtcactgacgccggtctgaccgcccttacaccgccgtggtgccaccggtctgacctccgatgagccgtcggttagaccgctgaaacctcgtgaaacacaaatcgaataactcttaaagtggatgacgactttattgattctctctgtgtttacaaagtgcacaaacaacactccttataaaaatctctaggaaactcgaaaccctaatagaactatcaactaaaatctctcaaaagcgataccgggaagcctcacgctccctctctatttatacccaaggtaggcaacctaaagcccctaaccatactcatactagaagtcctaattcccctaagaaaccctctagtaaacgaaacaaactttacataaccaatcacacc

SEQ ID NO: 19366 - DNA, 722 bp, Oryza sativa
tgctttgtgggtgagtgttgaacaggattcttagcagggttaatagcactaatattatcacaaaagagagatactttcccaaaagtaagaccataatctttcaaagtagataaaagccaaagaatctgtgaacaacaactagcagcaacaacatattcagattcagcagttgattgagcaacactagattgtttcctagaagaccatgcaatcaatgatataccaagaaaatgacatgttccattagtacttttcctatcaattctacaaccgccaaaatcagcatcggaatatccacttaagcatatagaagatgaagtagaataccaaatttcaaactcaagtgtatgattcaaatacctcattattcgcttgaccgcttgacgatgtgaagcacgaggagaagcttgaaagcgcgcacacaaacacacagcaaattgtatgtcaggcctagaagcagttagatacaacaaagatctaatcatacttctatactccttttgatcaacagcttcaccatcttcatcaggatccaacacagttgtagaaccaattggtgttgaaattggcttgcaattctccatcttgaaccgtctcaaaagatccttcatgtacttcgtttgatgcacaaaagtaccttgaggtgtttgttatttgcaatcccaagaagtacgataactcacccatcatggtcatctcaaattccctgcgcatagtctcag

SEQ ID NO: 19367 - DNA, 1382 bp, Oryza sativa
aatatatttgtaatataaacgagctccactgaaaatcaattaaatacataagttacgttagaaatcaaggaaaaacggttaacagataataaagttcatactcaactaaatttaactgataataaataagccaccatacataagtagtttgcatggtctttaaaataaggaggctaggcttggattgataataaatgacacagccacagatttctctcccatccaaggaacacttcgaaaaactgatagtgtctagttgcaattactaggatcccaatggcagaccaattattttgtgataatgtcttatgcaattgtcgcatagtattgcagaaaacaatgaaaattggtattcaattgcccatgttgcagtaagtacatatacaaaataaaatgaagcatgatgtcttacaatcaattttgtcatcaattggagcattgggatgaaacacagaaagagcccgtgcaaattcttcgaatccaagaatcccattgtgcttcgtgtcaaacaaatcaaatacctaaattgattaaattgaaaacagcgcacttttgagttgacttcagatgatggcataaaggaatgtgcatctgcatgtttaaaaagtaactaataatttataatagggccaattgcatatttgccactgatttgaatcggtattgtgaatttgccattataaaaaacgtaattgcatgcttgccataaaaaacgattggaacccatgatacttgccattagattcacggctgggaataacaccgttaaaagatgggttctcacaaaaaataggacaaggatgcccctccctgctgctgccgtctccgggcgcccgccattgttgctgctcttgctgcagccctaccaccttgctggcttgctgctgctatcgtagggagttgttgcagctgctgctctcgctgcaggcctgtagtgagctgctgctgccgcgtgctcgtgctgcagccgcgagcgttgctgcttccgttgcaacgtgctgctgctgctatcgcggcggctgccgtcgacttcctcgcacctccggcaagattacccaaaaaaggtgagattttccctacccccgttgcccgtcgtcgcaaggactccaaccaccgccgacatgcacgccggtcgccgtccgctgtccgcctggccacatgtcctcctgtcgtccgccgacacgccgcccgtcagcgcgccctcccatcgattgtccatccccacgccgccctcaagccctctacctgtgcgtggccggcagccctcccgccattcgcccacatgcctgcaagtgagagggcggcgagccagcgaggatcttttccggttaggggcaagatggtcttgtcatgctccttatcttttaagttagttttatgaa

SEQ ID NO: 19368 - DNA, 7974 bp, Oryza sativa
ccccctctccatgcttgcgggtgcatgattcacacacatatattcacactcacatgcacaaatagacatatgcaatcacatgagcagagttttcaaatatcaacttctcggtgctttaaattattccatgtaacattgactactccacattcatacaatgtgtactacatcatacgtgcttcattaatcatgatgtgtaaaactaggaaaaacgataaagtgattcagtagtgcagaaaggctagaacagaccaaataccatgaacaacatcataaaaacttcattaaacagaactcaattagctagccatacccgatcagcaaacatgctgtcttttctgttggtcttaaacagtgccagttggaattcttcctgtcaagacagccaatgccatcagctgagttaactagttcagatgccacggaattctaattttgatccatggccatccaattcacagcaaaggaaactagcagaaatactactaaccttattgatcaagccatcatcaaccacagcactgctaatcttcttgaacagctcatacagcgcctctatttcatttacgttaactgcataaccaagcagaataaactcattgacgaataaacggaaacagaacaagaataccatctattaagaatatatactgaaactgattccgtacacatcgaatcatcaaaaagaaggggagttggaaagaggaatcttacaaactgtttccctcgccaaccgttcaggatcctgcaggccgttgggacgattggagctgtcaaggctgcagcacttgaacagcaacgcggcgagccgtcggagcccttccgaggaatccaccatttgcaattgcaaactacaaccagcagctccccaatcaacaagcctcacacctgcaacgcccaacaacaacaacaacaaggagatcacccaatataccgtaggaatccaccgcccacaccaagtcagcaaccaccatcgcccccaattcggcaattccccgccggaatcacgaagacgtgaaccgaaatccacatatcccatcatcgatcacgccgctgccccaggaaccgaaactcccggatcccacccgctgcaccccccaacccaaacacgaaacgaatcctctctcccacggctacgcggtggtggccgccccatccacgaacagaattcccagcgacgacgacggcgacgacgaggccggcgggggagaaagagagggctacggggaacggggggattcggggagatcggcgggggagaggagtcacctcattgggagatccgcccgtcctcctcgcgcggcggcggcggcagcggcgacggcggcggtggcggtggagtgggggaggagaggatcagaggagaggctcgtcgtgggatgtttctagaaggcgatgaggagaggatgtcgttgtgttcccccggattctggggagagggcctttggtgtgagttgggctgggccgctgcccgctggagggctttgaagtggacccatggcccataacttatcgtgggggcccgatattctgtcttatctcgatgaccagagagtttgggcctgttcggctatctgtctgcggtggctgcggctgcggctgggccgtgtgtgtgcagcagcacggttggtgccgggccctttgtagtgagagtagagttttttctacatctcaaaagataatggattttggttggagatatattgtagtactacgaatttttgactagacatataaacatacgtctcgttcaaccaaaatatcttatagttgaaacagagggagtaagacgatgggtagagtgattgaaaagtgccactcccgctgtttatattatacaatgttttggttacaggtatgtagtttgatactaaatttgttatatttcgagatgaaagacgtgctccctccgtcttaaaaaaatctaacctaggaggggatttgatcccttctagtacaacgaatctagatagaagtttgtccagattcattgtactatggggggtcacatcccctcgtaggttgggtttttttgggagcagtatagctagcgactctatgataagcactagaaaactgtaaaatgaacttgccaaatttacatatagtttcatcgtagataaacaaccttaattctatcttactataaagttaatgttcactaactcctaaagctcaatatgcaagtgtttcacatcagcatccactagcaattattatctagagtattttaaatcacatgcaagtgtcatatcatcacccactagcaattgttatctagagtattttaaatatctttcaaatatgacatatcacttgcaattttattgtatttttagaactcaatatgcaaacaatgtcaaatcattatctccatgacattttcatattttttaaacatatacatctatcattttctataatgtataacatacatttattaatatatctcgcagcaaagcacgaggtatcaattaatgaattgcacaagatgataacagatcttaattgaaaaccaatgaccctattggctactcatcagttagtgcctgtagtcaaaattaaaattttaaatataatttaaattcgtcattttattgttttctatttttcagccttaggcctcagcttttaaagcgctaacattataagtataaaaagtcattcctaaagttatgtatgtggttgctttgtttatttctatatcaaatgtggtgcttgcagatgcatacatgcgtcactaatgttgtttgaatattgcggccagatataaaaacaaaaggatttaaatgataatggtggaataaaatgaacggtgttgggacaatggtaaaagcgacatgaagcatttcctgatgacaagggcagtaatagagcttcgtggggcaaaaaaaaaatcgtttctcgtgttttcctcttttttaaattcattcaaacttgacaagcacttgtaacgtcttggagagttgtagcatgcaattacatagaattttttttttggcaaaagtcatccataagaaattaattgtttatcgcaaagaagaaaagttatggaaaggatgatcctcaggtgctgcgtaagaatcattggccgtttttcttctgatgatgtgaaatgaggagaaaaaaggtgcaggagaattttcaaggaagagccaggattgtgattgatggtatcaccggctcttttttgtttggtgtcaatcggaatcgggtaggcaacggaaatgctaatactcgttattcattctgtagattttgaatgatgctccctccgtttttcacttgtattttaaacattcatatcttcattgatctttttaatcacatgggcattattaaaaatgtaactacattttgattaatgtttcctatatatgataaatctactaatatcagtttttttatttgaaatattataatcccatgttaagaatttgagatttgaccgtaaatgttctagcaaatagctagtaatccgttaaaaaacagaggtgataacgaatggttcaacttccaaaataatatgaaaattttcaatgctatcaagagacatacaacacgaaacaatgtaatctactccctccgtttcacaatataagtcattctaacatttcccacatttatgttgatgttaatgaatctagacatatatatctatctagattcattaatatcaatatgaatgtgggaaatgttataatgacttacattgtgaaacggagggagtacatcataaggtttaatatgttcgtatcaatcaactctaagtcatagtatcggttatttttaaaacccgtttggctattagtcttggaaatattctcccaacaactaaacgtattcctcgactccttcccattttatgccaatcacattatccttgtagcctataattccaaaccgaacaagcccagatatattgcacacataaagcattatgggcatgtttggattagtgccaatttgtgccataccaatatttttggtagcttcaaagagtactttgatagcatttgaattgtgaccaattttgtctatctagtaataaatctaccctattaaatttggtagtgccaaaacttactaccaatattttaataggccgcaaactaaatcagccctatactatgaggcaaacaacccaaagtgattataaatttgcacccatctattggcacatctaggctgtgtttagttccacgctaaaattgaatttaaagaaattggaacgatgtaatggaaaagttgaaaatttatatatatagaaaaaattcgatgtgatgaaaaagttaaaaatttaaagaaaaaagttgaaatctaaacagggccgtaactgtctcctgtctgtcgtatatacgtatgaggtggtagtatctccgtatctccgtacccgcactggcagggtgtcgctgaggtggccgcgcggctagtgggctccaactgcaaagaccccgggcccacatgtcatccaccgagaaggaaaacccaccggcaaacagttatccgggcccaccgccgctgtagcacactgctcgttgattcgaccaacgcggcatttcttccttccccctacgaaattaccatcctaccctctcccactccctcctcctgaaccaagcccacgcgcctcgccgtccgatccacctcgagatccgcgccctcctgcgctcagctcctacaccgagtccacagagaaaccaggtccgcccccgcgcggactctccgtacacccctccccaccgcgctggcccccactccgaccgtccgttcccgcctcgtgattcgtgccggcgaccacccgcctccgtggacccggtccacggggagattacaccttcacccccctcacctcacctcacctcacaccacgcgtctccccccaccaactagctctctctctctctctctctctcgcgccgccgctacgctcgccgcgccgccgctacgctcgccgcgccgccgctacgctcgccgcgccgccgcgggtggggagatttgaccggcgttgactccgggatggacgggcggttcccgctgccgccggcgagcggaggggggcgggggcaccaccggcgggcgcactcggagacgttcctgcggctgcccgacgcggacctcctcctcgacccggagggggacttctccttctccgacctcgacttcccctccctctccgacgactccccggccatctccgacccgaccccgccgccgccgccgccgatggctgcgacccccgcgccggcgccgcggccaccgggtggggcgcacatgaggagcctctccctcgacaccgccttcttcgagggtttctcgttgcagggtgggggaggaggaggaggaggaggagggagtgggggaagtggtgggcataagaggagcgggtcgatggatggggtcaactcgccgttcgagggtgagtcggcgctctccggtgggctaccggactacgcgaagaaggccatgcccgcggagaggatcgccgagctcgcgctcatcgaccccaagcgcgcaaagaggtgaggaaatcgcttgctgcttcctctactccattttgagttcagcaatttctagatccgcagggatgtgccttttgccccaatcttgtacagtgatactgcgatttcccatttcgaagaatatagttggagtcagtagtgggattgctgctgttcttggtgtttcctttcttgatctgggctatctgtgccttgcttgatttgtgatgtaattggggagatgtattggggcttgttgatttaggttaagcttgtgatggcgcttgtgtgcagaattctggcgaacaggcagtcggctgcaaggtccaaggaaaggaagatcaagtacactagcgagctggagaggaaggtgcagacactgcagaccgaggccaccacgctgtctgcacagctcacgcttctccaggtatggaactttgtttattccgagcgccagataagcctcctatattgtcttatctaatcagcttagtttgttagtcaattgttttgtttgacatgtattagttgtgcaaagttagagtaggttacacgaaactttaatgttttgactcaatgattgtcatgcatgtgaagaactgctgtaagcaaagctactgcttgaacctttttatgtttttagaagcataatagtatgttgctgtatcttgtccctttccttctagctaaagcggcttattgattgtttcaagcatgtgtgctaagttgtggatcttacttggggtgtcaaaacgagctatttgtgttactatgataatgtgttgaagaaagtgtgcaggaataacacgtaataatagcatgtagctttgcattgcataacattctatgaatttcattttttttatacaattctgttgtgggccagctttatttaaaaccaaataacagtttataagttagtacacaataaataatttgtctgcattgaatgcggcagttcgtttccttttgggttagcaacttagtgtcctacagtaaacttccagtatctgagctcagagctgcagaaagtttaggaagtggaatttttaaagcatgatagtcactagaatggaaatgtacaaataagaactttgttagtagaccatttattctacacatattttaggacacttcataagctaaagcataacttagttcttttttatttcaaactgatgttccttatggcaccttatgcatctagcacctgaatttattagattgatagttgcctagatatatgtggctttgtaaaaactagtgatagcactagtattccatggatgtcaaatggacagtgagatgtatggtaaatcatttttttgttagtaatatcaagatattctgaattttgttatggcactttgcatggtgcacaatgtaggacaagctgtagtgtatgaacacaatggagaacataataatagatttgacaagagcacaacattttttttcctttatcattaccttgttgcctgtgtaattgttgtagatgcgacaataagagtaggaattgaagcacctaatggtttaagaggtataagtatgtttgtagcgtgaacgatcgatcactcaccaaaaattgggctagtgatgaaccattttagagtgcagtttgattgatggaatcagacgggtcatgttaggatggagaaataagtgaccacagattgtaacatatgatgtctcactttcaagaaaacatgctagtgcttatcatataattagaacaaagcagtcatccagaaatcccatgaataaatgatattctaaaatgcgcctacttttatcatgatccttctgaagtcagcttattttttgtgacgataacagacatttttgctttatcttttttgagcaatgaaataatgtcagtggcttgtatgttctttggaatcttatattccttcaaccctttatgcagttctgtttgttcattgtataatttatttgatgagattcagagaactagagtgccatctaattatttatttccctatgaatacatagttttttttacttaatgttgtcaacttttacgtacagaggatatggatgctaacttaatattgctcattttagtacataatttgttgcacgtagcatttgcgtaaatttagtccgtagattgtcaagctttgaatcatcctatcgcacaacaccattttttgcatgctgctgatagtatctggtaggcaaattactcgccaatcctgtaagccaacagtttcttttgttctgtttgtgtatgtgatgtgtgccatctggtagtctcgaatctgattttttgcaattcacttgaaacccacagggatacatctggtttaactgccgagaatagagagctcaagctacggttgcagtccatggaagagcaagctaaactacgtgatggtatgcccttatcttttgttacttcatcatgtagcctttagtatgttgtgcaatactactacatggttgcctatga

SEQ ID NO: 19369 - DNA, 1512 bp, Oryza sativa
tgaacaaatatgtaggtgaattatcacttgtattagtttgaatacatcacttcatggagctagagcccatctctcaagtgtgatgagatgcatatatatatctttaaggatatataagtggaacccttgtttgacatttcaagcaaaagggaagtagatcagtagcatcgccacttgtgatgccactatttgtgcatttgtgcaatactctcttttagataatggattaactaaaacccacactctacatcctacatgtacatgaccaaaactgtgcaatactcctttcaacaaaaactaacagttgtgcaactgtaacttccaggaaacatccaaattaagagaagcgctaatacagaggtaatgtcaatccaaacaactttatggtgttgcgcaatgcctaacattcatcatctcctctccaacttgcttcaaaccaacgaccactccactctacgagctccaaactccacccatatcttttgccacatactacttcctcagaataagttaattaatctgagattaatttattttggatagacgtctgtccagatttataaaattaggatgtgtcacattctgtgctatcaccgtaatggtatttgattagagcaagtttaatagtatagccaactactaactccaaagcatctacagctaatgtaatagctaattcatacaatagttccttactatactattaatacccggtcctacctgtcatacacacattacgtcttggagtttgtgctgcagctggctacagatctgtagcccactgcttttctctctcttcctttatctatttaaaatatgtttatagctggattatagcctgctattatacctgctcttaacaatgtaatgatccaattggaatgatcacctctgcagactgacgagaccctgatctcaatgagttatcactttcagctgaatctgtagtgcttgtccacctaagcgcagccgccggcgacgcgaccaaatgctggaacgggttcaccggcggcgcgtcgatgtccacctccccttccagcatcctcaccacggcgctcatcggcggcctcgcctccggctgctgctgcacgcaccagaacgccaccttgcacatcctctccaccgtctccctctcctgcttgtccatggcgtcgcagccctcgatggcctcggcgaggtgtccggcctcgtgcttgctccacgccagcatcgggaaccactggtgctggctccccggctcgccgccgtcgtcgaggttccgccgccggcggacgatctcgaacaggtgcacgccgaagctgtacacgtcgcacttctcggtcacgcccgcctgcatccacatctccggcgcggcgtaacccggggtgccgcgcatgccggacaccgagacgtgcgtgtcgccgccgctcgccagccgcgccagcccgaagtcggccaccttgggcgtcaggccgcctgcgaccaagacgttgccgggcctgatgttctaatgcaccatcttgtgctggcact

SEQ ID NO: 19370 - DNA, 1112 bp, Oryza sativa
tgagtaggtgtcgaaaaaatcatcgccttctttttgggtataacccttagccacaagccttgccttgtacttttcaattgtaccatcaagcctaagctttttcttgaaaacccatttgcatcctacaagtttgcacccatatggacgctcaacgacttcctaagtaccatagacataattgagtccatctcactgcgtattgcttccttccagtagtcagcgtcaggagataagtatgcctcttctatggtttttggagtgtcatccatgagttatataatgtagtcatctccaaaggattttgcaaccctttgtctcttactcttacgagtatctacaatgttatcctcctcaagatttccctcaggcgtttgatcattgtgttctatcggtgcaaagtgctcatggggtatgacagtttcttgactagaagtgctaggtgtattttcatgggaaattcattctcaaagaatgtggcatctctggactcaataattgtaccaactcgcatgtcgggtactccagagtttactattaagaatctataacccacgttgtgaatagcataaccaaggaacacacaatcaacagtattcggtccaagtttacgctttttggctataggtacatttaccttggccaaacagccccatgttcgtaggtatgagagatttaatttcttcctttctcattcctcgaatggtgttacttccttatgcttcattggaattttatttaggacatgacaagcagtcaaaactgtctcaccccaccattccttggaaagtcccgtagtgtctaacatggcattcaccatctcagttagagtacggttctttctttcggctaccccatttgattggggtgaatagggaggcatcctttcatgaataattccaaactcttcgcaaaaggatgtaaactcattagaaaaatactctccatccctatcagacctcaaccgtttgattttccttttaagttgcttttctacctcagctttataggtcttaaagtaatgcaatgcttcatcctttgttttcaatagtgtcggtgacatgggatcgggagtatcatgactagaggtttgaggcagacacaatcgcccacgt

SEQ ID NO: 19371 - DNA, 10884 bp, Oryza sativa
cagcaggcggccacaattccacgacgcgtctgctcccggcgaaagtggaggtagttgtgggccgtcccatcagaaggtgactcggacggcaaccatgcaaatctccgtccatttatgaaaaggtagggtaagtccccaaggagaaggggggatggtgcatgtggtatccccttaagatatagaaggaggaccttgcccactgagagaaggagagagctttttcttggactggacctttccagattaggaaccgagaacaagggagaggctggctgatactttgtagctctttcatacacagatctcccaaaacacaggagtagggtattacgcttctcagcggcccgaacctgtatacatcgccggtgtcttctgtgcttccggtctcgcgaaccttccacatacagattgagagcttagaatctcacccagggtccccggccgaaccggcaaaggggggccagcgcggtctcccggtgaggagccccacgctccgtcaaatagatacacataacaaaatctagtgcaatcatctattagtgtcatgaaatatttctttccccctttagtcaacacgccattcatttcgcacagatcggaatgaacaagttctagaggtgcaaattcctcgcctcagatgccttgtgaggcttgcgaggttgtttcgattgaacacaagtatggcacttggaacctttgaccaaagtgaattttggatttaaactcatgttagccaagcgcgtcatacaaccgaaattcacatgacaaagtcgtgaatgccacacattggactcatcattctcgttaatatggttcacaacattattattattacacatgtcatccaaagaaaagcggaacaagcctccgctgtcataaccttttccaataaaagttccatatttagatacgacacatttattggattcaaacacaagtttaaaaccttctctacacagtagagagccactaactagattcttctttattgaagggacatgctgcacgttcttcagctgcacagtctttcccgaagtaaacttcagatcgaccatactaacaccatgaacagccgcaagcgacccgtttcccatcaacaaggaggaacctctcccgacctgataagaagaaaacaggaaaatatcagcacatacatgaatattagcacccgtatcaacccaccaatcaggtgaatgaaaaacagagagaactgtaggtaaaattttaccgtaccccgatgttcctccgccctcgctaatgaccatgttggcagacttcctgtctttgtgctcaggacaatccttggcccaatgcccaggcttgccacacacaaagcagtctccctttgcctttcccttgcctttcttcttaaaattggttgtagccttgggtttgacatcatgcttgactttcttgttgttgtgggatgcgtgagggttcttcttctgtaccatattggcactagaacctccctaaacctttttgccccagatgtcctttgccctcgccttctcctcaacacccaaagagccaatgagatcaataacactgaactcttgtctcttgtgctttagagaagtggcaaagtccgaccaagaaggtggcaatttggcaataatgccacccgccacaaacttgtccggcaactcacagttgttgttctcaagttccttagccagcatctgaatctcatgagcttgttccactacagaacggtcatcgaccatcttatagtcatagaactgctccatgacatacagctcgctgccggtgtcgaaaactccgaacttggcctcaagtgcatcccacatgtccttccctgaaggcatgtgcatatacacatccactatattgtcagcgagtacactgatcaatgctccacggaacaggcaatccgaagcctcgaacttaacctcttcctcaggagagagaggtggttcacttcgtttaccccgtgaaacatagaaacattgcatcgctgtcaaccacaatagtgcacgtgctttccacctcttataatttgaaccatcaaaagcatgcggtttcagtgttgcagcaaagtcaactaccgaaaatgacctatcaggtttttggattgttggaaatatggtcatatatcagcatattttaatccaaaatattaaggcaataaacatgacatgaacaatgtgaggtgatctagtgataaaattaaacataaccagaagcatgcttaagataaaataagcatcaacatcatttagagaacgcaataacattgcgactaatagatgtaacaaaaacaaaaatgcagtaggatggtataccctgtaaaggtccctccgctggattgtgaggcagaactgcctccgttggtgttgtcgatcggtgcgtctccagttcctggcgcacctccgttgacgccgccaccagtagacatcgccgcgacgcagaccgaacagaaccaccgacgatgatgaagagagagcagtcgtgcggaagcactctccaaaaacctgatcacccgcctacccggtgcagatctcaggcgaaggtgtggtttcggaggccctgctcgttccgatcactcgtgcgcgtaagcgatcagaaccggggaagcagaagcagcataggcgcaagcgtggaggaagaaccagcgatgggagaatgcgtgaagatctgattgggggtctctgtttgcgcgtggaggaagaaccagcgatgcgtgaagatctgattggggtctctatttgcacgtggaggaagaaccagcgatgcgtgaagatctgattgggggtctctgtttgcgcgtggaggaagaaccagcgatgggagaaagcgtgaagatctgatcgggggtctctgtttcctaatagcgcaggagaggaatccacccgttgcagcagtaacgacgcgatcaatgtgtattgaatcacctgcctgttacagaggcaatctcgcgaattctgaaccgttgcaaaagaatctcgagagatgtcggacgcgacgcacaccacggccacggctcggctcagggcgtgcgcgtgtgcgcgtgtggctttccgatccccacctcaaccggtcaacagggagcctccaataactccctatttaagttgagattcttaacttttaattcccatggtggtattattatcttcaacatttattatgggcccttgagattttaatagaaaaatcgggcctagcccatttattctaacagaagtttcctagcgaaagctcagctcttcgaggcctgttcttgagcattgtaacctcctagaggcattatcgtggcttccgttcttcgctggtgaatctttaggtgaaaaccatgtcccgtttccctgggacgggcaatggcagtgtcctcgcgcattgtgaacttcttggaggcatcatttgatgctccattcctttaatctttctccagacgatcatcttcttgtagtgccacttctaaccttcacaagatggccacgttgtttgtatgaggtagaacgtatccattttatctctctcactctctccctctccaaccaaaaggtatggcgtgccagcgattcaacagccatgatttggggagagactatgataccatgtgagagaaggcggggattgaagatgcattgagttaaccctagagggtaatataatgtacatgagggaaagggaaaatacttgaatgcctataacacacatgtatagcactcatactctaacagagaagaagatggcgatgactaactaaagcgcaaaaattatataatgtcctattgtgtgttaaaatgctttaaatttaggttattgttttggctgcctaattttgtccgagatgtgcccatcaaatccaacgaataaatgagtcatcggttgcatttactcttagctcaatcgtttaccctttagcttatcagtcatagctaaaattcgaatttcatatagtttattttttcatcgggttttaagtagctaatataagactgcatatataattttttttagtcacaagttacttactcactctctttttttaatatatgatacatcatacatttaactttttaacacatgttcgactattttcatcttattgaatttttttttgcgaatgtataaaatgtaaattatgcttaaaatgcttttagtgataaaaccactcatgacaaaattaatggtaattacattaattttttgaataagataaatgatgaaacatttatcgaaaatcaactgtgttatttatttatttatttaaaagaaataaggtagtataatcaactagctatcgagactgttttgttgatggccttacgaaaagactcaagtgtaacccagaaccagagccggcgccgccgtcccgggcaccggctgcgatgcacgagctgcacgtacggcatgcgtacgtgcatgccacacgcggcggcattcctggtttctctccccctccctttcctcttgcccgtccattgcccaccaccaccaccctgctctccccccagacgcgcgccaaatcccaaaatgccccactacatgcgccacgccgcgcgcttcccgccaccgccatggccggcttcctgcaccgccacgtgctccccccgttccgccgcccgcctccgcctccgccgccgccgccgcccccgcgcggcggcggccgtggacgccgcggcggatcctcgacccgggcgacgacgtggtgctccggtggaaccgcctcttcctggtgacctgcatggtcgggctgttcgtggatcccatgtacttctacctcctccacaccggcctcaagtcgtgcgtcaccatggacatgcagatcggcgtcggcgtcaccgccgtgcgcaccgtcgccgacctcttctacctcgcccacatgatcctcaagttccgcaccgccttcgtcgccccgagctcccgcgtcttcggccgcggcgagctcgtccgcgaccccgaccagatcgccatccgctacctcaagaacgacttcatcatcgacctcgccgccatgctccccatcccccaggttacctgcatccgtatgcacatgcatttcacaaccccaaacgaatttctctttttcagattgtaatatgtacgggaggtgcattttcacaattctttttttttcaaaatgtgataagataaataaatatgtggcatatcacttcacaaaacgttcatggttaaatttgacttgcacaagtagaaaaaaaacaaaagaaaattgaagtgcgtacttatgcgtacttgcacaagcacaatccaaaatgagtttatttttttcagattgtaatatgcacattatctaaaataaatagcaatatgcaacttctctgaatcctgatcaatgattctcttacataattcagcttatgcaagcagaatatgtgtaaacaaaactgttattttataaacaaagcagatagtaaatctcctgcttggaaatgagatcaaatttatcctgaatcatgttcacttgttggcctgtcagatagatttggatgggaatttatatgtgtaacatacatgcaggtgattatctggtttgtcataccagccgtgaacaactcatctgcaaaccacaccaacaacacgctctcgatgatcgtgctgatccagtacatccccagagtgttcctcatcgtctccttgaactccaagatcgtcaagtccagtggagtcgtcacaagaactgcctgggctggcgctgcttacaatctcctactctacacactggcaagccatgtaatgcatgataccatcatcttcagaacaattttcagaaactagaagttcataaaagttcctttgccacttcccccgtttcaaattacttggctttgtgctaagtcacttacttttaattctataaattagatagtatagtttaataacataagttctatgtttttaaactagattcaccattataaatgctttcaaaacatgcaatccacatgttgttaaaccatacgaattttgagaaattgatggtcaaagtcagagctgtttgacttaggacaaacatagaacgacaagttcaatacggagggagtagtagagattaaagattctaacccgaatataatgaattcatagtatgcatcatattgtgatgcaggttcttggggcgctgtggtatcttctgtcgatagagaggcagtacacatgctggatggacgtgtgcactagggagaacggcacgaacccggcgatacccaagtgctacatgagctacctggactgcaagacgctggaggatcccatccggatggactggcactcgcgcagcgagatcgaccaccagtgtctcctccctgaggccacctacgtctacggcttgttcgccgatgcgctcaacctggatgtcgccaaggtgaacttctgggacaagtatctctactgcctctggtgggggttcaggaacctcaggtatctctgaattcttgcattcttctcacctgatcgcagattgttgttgatacagataatgatgcataattttgtacattgatgtgttttttttcctgcgaattgtttgttagttcgtatggacagaacttggagaacagcacatacaggggagaaaccattttctgcatcctgatatgcatcatgggactcgtcttcttctcacatcttattggaaacatgcaggtatatagcttatgactgtattttgcctgaaggttttgttactgaatgcattcttgtctgaaaattttgttactaaatgcattcttgtctgaagattttgttactaaatgttactgaaaaacgcaattttacaaactcttgtttctgcttttgttactgaatgcacttgagaatatacatagttaaaaacaaattggttattgtttctgattgcaaagatgaaacatgaatgaatgaacattcatttgatttggattggtgaatgtagacgtacttgcaatcgatgacggtgaggctggaggaatggcgggtgaagcggcgggacatcgaggagtggatgcgccaccggcagctgccgctggagctgcaggagagggtgaggaggttcttccagtacaagtggctggcgacgaggggcgtcgacgaggagtccatcctccagtcgctgccgctcgatctccggcgagagatccagcgccacctctgcctcgccctcgtccgccgcgtccccttcttctcccagatggacgagcagctgctcgacgccatctgcgagcgcctcgtctcctcgctgagcaccaaggacgcctacatcgtccgcgagggcgacccggtcagcgagatgctgttcgtcatccgcggcgagctcgagagctccaccaccgacggcggccggaccaacttctttagctccatcaccctccgccccggcgacttctgcggcgaggagctcctcacctgggcgctcatgcccaaccccagcctcaacttcccgcagtcgacgaggacggtgaggtcggtcaccgaggtggaggcgttcgcgctccgcgccgaggacctcaagtacgtcgccaaccagttcaagcggctgcacagcaagcggctgcagcacgcgttccggtactactcccaccaatggcggagctggggcgcgtgcttcgtgcagggcgcgtggcgccgctacaagaagcgcaagctcgccagggagctcagcaagcaggaggagctctactacatgcagggccagggcggcgacgacggcgacgggcacgacgacagcgacagcgcgccgctgctcggtgccggcgtcggcgccggcggagaccacagggacggcgccgccgccggcgcggcgcacctcggcgcgacgttcctggcgtccaagttcgccaagaacaccaagaagagcgccgcggcgcaccacggcaaggcgaggatggaggacgtgtccagcatcaagttccccaagctggccaagcccgacgagcccgacttctccctcagctccgacgacgtgctgtgacacgccggccagcctctcgatctcttcttcttcttcctcctcctcctctccggcgatcgatcgatccatcgatcgacgagagagatgtactcaatttttttttcttacacggtcatggaatgggattagctagtagcgtgtaactagatatactagcaagatgcagaaatggaatcgcatgggatgcatttctgcgtcatctttgtactactgtatactagtgccgatcgatgtaacgtggtagaagttgaccaatatacattcagttcaggatgttcttgccaagttgccatcgatctctctctctctctctctctctctctctctctctctctctctctctctctctctgcgctttgtcaaaaccatatgtctctgcttgatgtttgtaactttgtattagtacaaagcaagtgtggtgtgtgtgggtgtatcgtgtatgcttcactaggacagttcgccttaacagccaaattcagttcaattcgaaattaattttcgtcatcatttcctgttcaagaagaatcggaattttgttaccgcgaaacgtgttgtcaatctttcacatttttatcacgaggatatgaaaaaaaaatagcctgaaagatatgatgacatttcttgtactaacgaggtataaacgaatgaccatataaggttttgagttcaaaatctctataaaaacaaatttcagattagattgtttgagaggctaagttctcaatttaaaagcctgcatatatccagttgaatacagaggttgggtaaaaattactcttctctaaaaatagctaaaaagttaaaagattgactcggctcagctcaatctgtcgtgactatgggttcacaaaccgatctgaactgagctcagtacaagacgatcagagtcatgggctttgacttttttgttcgcccctacctgagcatctgtggtaaaacaaaccatgtagaaagagttactcctaagtgcgacagaagttgagtcctcaacattgttttgatctttgaggctctgttaacagtgcgcatgaaaaacagagtggtcaattagctatgattaattaagtattaggtatttttttttcaaaaatggagtaatatgattgtttaagcaacttttgtataaaactttttaaaaaaaacgcaccgtttagcaatttgggaagcgtgcgcatgaaaaacggagaggaagggagttgagaactagcacttacgaacagagccttaggggaagttagggcctatttagttcacgaaaagaaaatttgtgggtgtcatattagatatttgaccggatatcggaaggggttttcggacacgaatgaagaaactaatttcataactctcctggaaaccgtgagatgaatcttttgagcctaattaatccatcattagcacatgtgggttactgtagcactttatggctaatcatggactaattagacttaaaatattcatctcgcgattttccccctaactgtgcaattagtttctttaatctatatttaatgctccatacatctgtccaaagattcgatatgatgtttttagaaaaaacttttgggaactaaaccaaaccttagtaacgagcactcatctattacatagtagtaccacataaaaggttatatacatgcatttctttttgcaaaatttatagtagcatataggttataaatctacaaagttacatgacactccaaaaataaagcagaactaaaactaatctccatatttcccaacaaaaaaaacgcaaacttagttattggtagtgactgccaaaacatgcttgatgttttaaaacatgcaatcaaacaaaactctgttaatccaatctaatccaatttattgcttgtgttctgcgtactgcgaaactgcgtgatccgcggaataagcaagccgatgggccgccacgtggcacgcaaaaaataaggcccatcaggcttcaccctagcctgtgccctccggcccacgcagaaaattcttatgagaaaaaaaatgaagagggtttttgttaaaaccctgcgcccaactgcacagcccacccgccgccgccaccgcctgcgccgccggcgagagaccccggcccccgccgatccaaaccccacccaccacccgcagcggccatgtcccagctcgtgctcctccgccgcatccccgtccgccgccactgcggccccagcagcagccgcctcctcagctcggccgccgccggggcaggcggcgtggggcggcggggaccctaccagcagcagcagcaggaggaggaggagagcaaggcggtgaaggtgtccgtgtggtgggacttcgagaactgcaacctccccaacggcgtcaaccccggccgcgtcgccccgcgcgtcaccgccgcgctccgcgccgccggcatccgcggcccgctctccatcaccgccttcggggacgtcgtccagctcgcccggccgtcccaggaggacctcgtcgccaccggcgtctccatctcccacgtccccaacagttgcgtccgctctcctttccccacttcgatccccccctgcggttctgatttttgacacgtatcctctttgagttgttcttcgtctctagagatgtaatcatgaattaggaaatggtattgtcgcctttgctacgagtgatgcgccctagtgcgtatttctctggattatgcgttgctggaggagtgattgatatgagtttccatattattagagggttaatgagcaattgatcattcctttttgtgtagaaatggatcatgggtagctcatagggatgaatgatgcggagtacaagagctatgctctccttctgtttagccttacaaaggctacacatttttttttgtcatgggctcagatttgtcggctaatttttctagtgaagcacaaaataaaataaatctatttggttaatgtttacctgattttggtgtcaattagcttcaa

SEQ ID NO: 19372 - DNA, 2642 bp, Oryza sativa
tttttttcgtgcattcattttctatgatgaattttggtttcttcttgttctgctaataatgctattgccgtgatgtaggtggaaagaatagttctgatcggtcatttatggctgatcttgtctattggatcgcacagaatcccccaccagcccattttttccttatatctggggataaagactttgcaaacattttgcatcgcctgcgaatgagcaactataacatactgcttgcttctcctggtactgctaccaccagtgtactctgtagtgcagcaacaatcatgtggccctgggaagctctagtgaaaggggaggatttctcacctaaacgttttaaccacccacctgatggtttagctggttcttggtatggtcactataaaggagccctggatgatccctttgtagacacagaacccgaggaactcgttgtagtaccatctgatctcaagcatggttcaatccccaaatatgtggttaatgcgatccagcaggtactaaaatcatatcctaatggagtgaatctgtcagacctccgactagagcttaaaaagaaaaatatttatctgggaaatgatttttttggccacaagaagttctcttgccttctccaatcgctgccaaattttgtggaatttattagtcctccagttggtgcaaaccagccatgtgtagttgcagccaacagaaaattgatgggtcctgacaaacaaaattttgagagttcaactgaaagtaatgtcggggacaataacttgaatcgagcaatacacaatgacaagccacctccactccctgtgtcgacttctttttctgaaaagaatgctaagaccgaaaattcttctcaaaatattgccaagaagctgcagactgcaagcgagaatccacctacatttgctgtcttatcttcccgatcagatgtgttacctgaggatcaaaaggagcacccagctgccaacttgaatgcacagatagaatcaccagaggaccacaaggaagttgatcctacgactgcctctggaattccctcttcctcaggggtggaagacaatgttaacaaggaagggctattcaaaaggatctggctattgtggaaaggccctgagagtgccaagtctgaagtttcccatcttgaaagtacttccactgtagtggttggtgatgcccaatctcctcagcaagagcataatgctaatgagcatcggagacttttgaagagagtctataaaaaatcttgtcgaaatggcagcacagacggatctgacagtgtgacaacaggcagtgcatcaacttcatctcatgatgaccgctctaaaaagttaaagcatgtggatgatatgagatcattagaaagggatacatcaaattcagaaccatgtgatagatctgtatctgtttccgtggacaaagctgagaaaggagatggtatttccaaaatggataagggtttatttagctgggtaacagggtggttgaaatttggaaaatcagatgcagataatgttacagccaatagaaatgtgattgatgaagcaagcacagactcactaaaaggacctgaatccttgaaggtttcagcttgtggaagtggagaagaggaggttcatgaaatattcacaaaatctttcttctgggatgttttgcagcaacagctatcaaagccccttggttctgagcttgtttcaaaagcaaagacaaggtaagatttttatgcctttatacattaattaatgccttctggttagttctagaccttactttgcataccaaaattttttgacctgataaaagatttccaataatgtaacatggtgttcttgtatttctttccataccagaagaaatatgtaggtctactgagtatcagcctgtcaattagtgagaagaaaataactcgcaaagctgagttttctactctgatgtcagcaagacaattctgagtgtgtttgtgacagatcaaaaactttggtttatgtgtgtagcttgatatagtgtgttatgagcaagttgaaataactgttattgcccagatggttcatttagtttgtagctggaatgcctgtaagtctatagaagtattagtttttccttttacttcaacttcctatgagcatgtctgtttgggtacactagaagacgagtactaattgccgggcgaaaaaaataattctaacccggattcttatgagatgatttgataaatcatttttggcttgtcccttcgagagaatcttactgacatgattacattttcgtgatcagggaggagttagtgcatcaattgcacaaattagattgttggcctctgaaaggcctagctgagaaagatctccatcagctggtgaatattttagtttcagagaagaaatgggttgaagaaaccccttccaggtattttccgtttcgtcttacccttcctcacaagagaacatgcattccatcgaactccaggaagtttgatggtctcagttctctgttttccaatgggaagccattgccgggcaatacactggtgatcaaagcacaaacagtcctctccctagggaggaaactttgtcggactgtcacaagctgttaaaggaccttcttctggaatatgaatatggttttaacatcagcattttcaagcttcgttttgc

SEQ ID NO: 19373 - DNA, 652 bp, Oryza sativa
cctgcagcccgttttgtaatgactttaatattaaatatacagttttgtggtctttaaccttaaatctatagttttgggataaatttagtgctaattctatactatttagcctgaaattttctctaaatcttttccagttgtagtagcacaatagtaaaaagagcttcaatttcaagttgaataaaagaaattcacgaatttcagtttgaaagcacgataatttgggacgatgcagttgaaagtggaagctccgaaaggtgagaactgagaataagcgatggttaagaccataagcgacctgcgaatgacaaccattccccaagatatcacaatggtcgttcattgggggttggcttaaaattttgcgacacctaatttcttgtacatgaaaatttgtgttttagtagggattacagccagtcccttcaaatagacaataatatgatttcaatatcctaatcgatctgcctaaggaaacagtgaaatgctaatcgaataattgtctggcaaatcataagtcatgtgcaaaagtagatcacaaaatcctttcgtcaggaagaacagtctcaacctccacagtaatgcatcaacaaatagtaacattcacgctccaaactttgctaagccagaggctcattgcccaaagcatcaa

SEQ ID NO: 19374 - DNA, 829 bp, Oryza sativa
atacatgctttcttgttcgttgagaagaatctccctgaaaaatattgaccacactagtactagcaagaaaatacatatgaaatacaacaaacaaagtgtacgactgcctcaaagacataccttagttggtgtaccgaaagtccttgctttgcaggtaatgctggatcaactgagagaaatggtgaaatggttgtgctttcagaaacaccagcattcttttgttgttctatccgcctaagagccagctcacatgtttcctgaacctccacggcaggatcagcagctaaactctcctcaagcaggggaatgctcttctccaggccaatagcaccaagggcttccgcagcctaatcaattgatatatatatatatatatatatatatatatatatatatatatatatatatatatatatatatatatatatatatatatatatatcacttctcacacggagagcgccgcactaaaaggagaagatggcctcacactcttatgtatcaccaccccacggcggacaattggatgaagtgaaagatctttgcgcactgcctctcacgcagggatagcctcaccctcgcgcatgcgcgcaagcgcacacgcaccctcgcgggcgcgcaagttagaagaaccccgcgcggctgagcaatgcatcacacagacaaatatattagctctctaacgctcctttattctagcacgctccatcaatgaataagtgtcactaaaccacacgctctatcattgatgtgagtgggtgagagagtgaggtaagaccttgggggagggcgccgcgggggccatcaccatggggggggcggagggaga

SEQ ID NO: 19375 - DNA, 10286 bp, Oryza sativa
tttctataaatttgatcactaagaaaaaaaaatcaaaacgagttttaatatgaaatgggggaagtatacaagaacagacataaaaaatgaaaagtgcatagactaatgtttgtacaccaaagacataagataggaagcacaggcatcaggtaacattcagacattgtggattcgcgaagaacctcaagtttctcacttcttcaattatctccactagagctttgcacaacacatgtaaatgaattcaatcaagggaaataagactgtaagagtacctaaccagtttgactaaaacaaatccactttacacaaaacaaagcagattatgaacgcatataaacagaaaatgagttcaggttaagtcatatcaacagaaaatgagttcaggttaagtcagttggtgtttcattgctgcagttctgctttgaaccttcaagtctcccacttatttcaacaaaacacaatctcagaagatcactgtatttagttagtaatgagttgatgcataagctaccaaattatctaagcacaaatttgactacattcaaataaacaaagcaaatggtacccaccttctatgtccaaaaaggaaaaagaaggatgtgttcaggtcacaaaatctaagcacaaccattgcacatgtccacactgaaattcttagctggaagaatatgtaacatcttgaattatccaaaagagcaacagaacttaacaattgaagtgcatatcaattcaggactgaccaagcagaagcttaacagtttaagcgtacatcaacagaaacttaacaactggaattggctccttgcaagtgactttttataacaattcaggactaatctcaagatactacatattaatctttctgtcagaaactgatccttttccctatacttcagtgactaaatattgcatacaaattaaattcaggacaatctgcatatatcgcttcggtacaacgtaaagaagcttgaattgaaatgcaaatttatcgaaaacgcatggacaaactaagtgaacagtaggtcacttgtagaattcaaccactgaattgggacaatgtcatctcatcacatgataatactatcaaaaaccaacagaacattggcattgtcagaaaacagagcattgactcagaaataagaaatcaacatactactgacaggttagtttttcagcaagctctcagcaagcagagagcttctgttcttgaacatattcacttgctcattgttcaccatcctggttaccttgtacagcttcaagctgcgactcgaagtattcccaggcagcttgcccagaactgatgacctcttgagcacagacccaagaattttgacgaccatgttcttcatcctcatcatcttcattatcggactcttcatcatcatcactgtcagactgttcatctaagtcattgctcggcaacttgtcactttccacaggacctgaaaaattttggttccaattcagttgtccattgactccattcaacacatacaagccatttgaatcacagtgtaatatcataaaggaaaccagtgtcaaattaatcctaggtatattgtaaggctacatatcaatcctagcctcctaggtgttgcaagggcacatatgcatcaaccatcaatgttgagtaaaatttgcatctggttcagagttcagacaacataccattttcctcaaacatgtttgatggtaagagccaggagtgaagaaattgtgatgggtaacagaagtcagtgcgcatctccaagctcttggacatcaaaactctcttggaacgtatgtcaaaagagaacagcacatcttgttctataaagtatagtacagcacagtctgtcgggtcaatcatagcaatggcaggaactttgcccggcgtcagcccggaggtcttgtagatcttgtcgccccatatgtccgcaagaggtgccttgtactcaagctgccactcggggctctcactctcagaatagagtaaactccataagcaagcctctccttcatctaactgaacgtagcatatcttgtcttggctgatcttgacgcaacgccgcttctcaagattgtgacgcgatctgatgtcggggaccagcataaggcagccttccggaagagccacataagtcagcttgggcttctcaatgaacggatcgcagaaaagaagtcccaagggcaggtcgacgaaccaaatcttgttcatatggcttagcacaccgccttgactgccccaaactgggtgttgcaagcagttggtaaggggcttgacaacccactgggaacctgaggtgtaagtccagcagcgcagctccatgaactgcgggctcgaattggtgcaaacgaggcaagcaaccatagtgtagtctggtcgaatcggatcttggacgacgccgatgcttatgactgggggaatgaggcttggctccatgggggggattggcggaatcatggtggcgactcgtgtgtgcgcgtcgcagaagtagcgcacgccgttgaaggcggaggcgacgaccattccagacccgtgtacggcgacgacgaggggagtggttggtcttgggcgtgacaggttcacggagaagggcttggcgcgaggtacgacgaagttgaagaagccgatggccttgtcgacgtagaggacgctggtgccgggtggcttctccgacttgaacgccaaatcttctccgggtgggagatccttgacgcgggttacggcttgcagtatgacccacgagcagcgccgtgcaggagcctcgtcgtcctcgtcccgagcccgatcccgatcccgctgcgcgtcctcctcctcctccttggtagtcagatgatgagctcccggcggtggtggtgacgcagcgcctccccccttgaccatcggagtcggggtgcctccctgattggcatcccgcggctgtggtgcgtctcccccctgcccgtcggagcccgcggcggaggagtgcctccctgcttggtcgtcggaggcggtgccggtggtgaagaagcagctcctcctggccccttgcccgtcggagcccgcggcggaggagtgcctccctgcttggtcgtcggaggcggtgccggtggtgaagaagcagctcctcccggcccctttcccgtcggagctccgccgccatcctccgtgctcgccggagcacgcggcggcgagcccccttcggccatggcgcgcgaatggtggtgggtggtggcgatcgagggattgggaggaggaggaggggctcggagtcggaggcttgcgggggtctaggtggggagggtttatatctcgtctcgacctcggtctcggtggagtaacgcgcaagttgatggccggcgttataacggcggcgatgctacggtcaccgctacacagcacagacggaaacgggtagaggaagagaagcctagaaacttctagaaacttcgaggttgctgccaggtcggagtaaggcctggcggcccatgcaggcccagttcagacgccatagcccagaacttgcgcgtcggccacacgcaaccactgacaaacggagcccacccgggcggcagccggatatgcgcaaggcgtaaaggccctctgcttcagattttggaataagttcactttgggtccctctatttgtcgcccagtctggttttagtcccttgatcgcaaaaccggatacaacaggtcccccaacttacgaaaccgtttaaataagatctctcggcaatatttgaccctggttttggctgaggtggcacctacgtaacaaatttgactcggttttcatctgacgtggcattgacgtgtcgcttacgtggcaattcggtctgaaaaataataaaacctatgggacccacatgtcagtttcacatacacaataataaaaaaaggtggggcccacgtggaccccacctgtcgtccacactagacactaccccttctctctctatcctctctctccctcctctctctccagctggagcgcgcgggacggagcggcggcggccggagtggggcggggagggagtggcggcggccggagtggggcgggcaaggagcggcggcggacggagtggggcgaggagggagcggcggcggccggtgtggggcgggagggagcggcggccgccggagtggggtggccgccgcatcgcccggtatgtcgggcggtcgttctccgtcgactaccgccgctccccggaggctaacgcgatggcggcggcggcgacgagggggcaccgcggcagggaggctgccatgttgcatggcggtagcgccgtgcgctctcctcctcggcggccttggggccgggagctcccgcggggccctcgttgacggtgaccacggtctgggagatggcggcggtggcggcggtggatggctcctcagttgactcggcggaagggtatccatcctccgggtcttcgctcacgccgggtgcaaacgccggcgacggggcggttgagtctttgtctccttgtgcaggcaggacgcctccctcttctctctctcccgccgacgcagccggagccagaggcgacgtgcagcggccgagcgatgagggtcagcgcgcggcggccggccgaggaggggcgcggcggacgggcgaggacaggacggacgcgagttctggacagagcgtcgtcgtcgtcgtcttcggaaacaccgcagtggtcgtcgtcgtgctctacccgccgcccctctgttcctcccgccgctcgctgccgctccacccaccgcctgccgcctctcagctccatcgccgcccctctgtgccgcccgccgccgctggagagagaggggggatagagagaggaggaaggagggaggatagagagaggggtagtgaggatcacaggtagggtccacgtgggcccaccgtttttccattattgtgtatgtgaaactgacatgtgggtcccataggttttattatttttcggatcaaattgccatgtaagcgccacgtcaatgccacgtcagatgaagaccgagtcaaatttgccacgtaggcgccacctcagccaaaaccggggtcaaatactaccgagggaccttatttaaacggtttcgtaagttgggggacctattgtatccggttttgtgatgacgctctctctcgtggctcgatcttctggtgaggggataactctcgctttgatcgagtatgacgtttgcgacggagctaccaaccagaacaagtccaggacgccgtgcaaacgctacaccacaaacgatgtcgtaccaaccgtgatgcgcggttgatgatccttgcaatgcaaacgagagaacactgcaagaacaagataagatgcaatctaaagttcccttacttcctcatacgtggctctacagcctggcccagcccccgctcctcgcaccgcgcaaggcgcggacacaattggggggcctcggggtggcgcgtcaggcccctcggggtgctatgtcagcctctcggggtgccacgtcaggcccctcaggcccttgccctgcctggacccaaggcccttgcccagctgccatgtggcgaggggggaccaggctaggcggtcattaatgggcggtgccccaaccgtccctcgaagcatttagtgcggtcagggcggacgtgtggagccacgccactggcccgcctcaaatcgggcgtaaccggtctgtgaccggcctgtcaccggtcacatccgattgacgcgcggccatgccccacgtctcctttgtccccggtggagtggaggtagctatgtattgtcacatcaggggcatcatctggactcctctccacgagaggagggcagccaccggtctgcgctcatttaagagcgaatgacagggctgcccccccacccccccccccccgtgtcaggtggaggacggcgccgggccccaccaaagggccaaccgtggcttggcttccgggcgaaggcattcgctcgtttaagagtgaatggcagggctgtcccccgtgtcaggtggaggatggcgctgggccccaccaaagggccaaccgcggtttaacctccgggcaaaggcacgggccgcggattggccacgggagggtgcccccctcccttctccatggaagagtaggtagaggcggtgcatgtggtatccccttagactataaaaggaggaccgtgcccactaaacaaggggggatggttttcttgaatgaagccaaggcaagctctagcctcaagttggtgatgtccttggtgcagttctagagtcgatcaaagtagaataggagagacaagctctctggagctagaggaactcttgtacttccgatctatattcccacacacaggagtagggtattacgcttcgtagcggcccgaatctatataatccttgtgcttgtgtaagctttagtggctttaaccgcggataatcgacctcccagagtgcacctcctcctccggccgaactcacaaaaggggatctcacgatctcccgctagagaggattactcctcgacagcgtcaaatattcatgatcggagggagtattatttagggcaatccctttctaatgacatatgtcttgtacaaatacacgagtaatttgatttaaaaatataaatttgaatttaactggtttaccaaatggtttgttaactcaagttgactcgaagcctcgaaatttcatcaaaaccaagcgattttcattgtttatttttaaccctactgccaagagctagccaccagcctgtgctcaagccattttgaaggaaatgcttaccatctcccctaatttaatattgcaaaagaagctatatttgcttctttattaagattatgtctgtagttgtaacaagctaggcccatataaataaaattgggatatatagaatgagaaggtggattgagaataaagcattgattcgtatggtggttatgcacatgacgtgagaagaagcggaaggacgtgcggtatgcgctgtgagaggggatggaagatggatgactccacttgtacaataagagatgttgatattaaatcctttgtagtattcctcatgacgacaaagtaacccacgaaagcaatccacagaacaataataaggtacaagatgaccatcaacataattcatagaacaatattaaaaaaacatacttaaaacttcactacaaaactttttttggtggaacaagatatccccaactaaaaggacactacactactgagtgtgaaaaatcaaaaagcaagaggagaagagcaccattgctcctcttttttttttaactacttgggacaccaaagagacactgagatcaaaggcctggacttccagcagagagcgagcctccctttctcctgatgcacaaccccaaaccctccaccgaagagcccagccaacatcttcccctgagcaacgctgaagccgctcacctcacgagccctgagcccttccatcatctgggccccacctgccagtgacccatacctccccacagcgtcctccaccctgggccccaccacctcctcccccacgcgcctcaggctcagccacgcctcgtcgtcgtagctcacgaggcagctcgccgttgactccatcaccgccgtgaagtgggccaccgcgtcggagaagaactccgggaacggcggcggcgcggcgagggacggtgatggtgggttcttgctgattcgggatagctcgtcctcgatcaggatcaccagctttggttgaaggattgtgatcgtgccgaggaggagaagcttcagcctgctgcgcaatggcgtgttcgtcgtcgtcgtcgtgtcgtcgcatgtgaggatcaccggtggtgatgagctgccgttgcagatcatggcgagctcgtgatggagttcgtcgtcatcgtcgccgtcgtggacgtggagggaggtgtagcggaaggggaggtgcagcgactcggcgaactccgacagccaccgccgcgcatcggccgtgcggggcgtgccggcgccggaggtgatgacgtccgtgaggtggaacagcggtggcggccggcggcggcgaggtctgacatgagcgacgaccactggacgccctcgccgacgttgaagtcgacgacgtggacgtcgaggtcatccgccgtggcttcgaggatggcctggttggcggtgaagtgggcgaacttgacgaaaggcgtcagctcttgcagcatccggtacgccggcgacgaccagttggccgccggcggcggcggcgacgacgccggcgtggccgcaccggagatccggagcttgaggcctcgggcgaagtagtaggccaggtgatcaaccgggcttgttgcttcacagcttcttctgccggcgatgtcggcgaggaggtcgtcaagcctcgacatgatcgccgaggcgtggacagcgtctccggcgtccacggccatggcgccggcgaggagaaggtcacctgcgctctcctcctgggttgccaccacgttgccgttctcgtgccctgccactgctaatctctcatcaaattcaaagctagctgctaatggatcagcattggggacagagaaatcatcttgcagttgcagcaaatcattagcagattcttggattgccatcatttccaagaactcatgatcttgatgaatctgatcgtgagagtgatcaccatcaaattcattagcagattcttggatcaccatcgtttccaagaactcatgatcttgatgaatctgatcatgagagtgattaccatcaaattcattagcagattcttggatgaccatcatgtccaagaactgatgatcttgatgaatctgatcatgagagtgatcagcatcaaattcatacatattggcattctcatgaggattttcttctgcttgaggagaccataggaggaggctactgctactgatctcttcaaattgtgtggagaagggaatgagaagggagcaagggtatgacatggtctccattgatttgttttgtgatttgagctgttaactcaacatgaattgcatatgctctggtttatgtggttttacacagtttatgtagacaaggatgaagcgggtgttaggaccatttctgaagataggagtgaaataaatttatatgtgtggacctaggatcttcatggctaatgtaagctgatttgtctgatcttgaagccccaaatgggacattcatatgacaaaggttctttttttgttgcctttttgtgtagttccctctaccaactttgtaagatatgtgagcaagcaatcgtgccaatttttctgattgattagaatgaagtagcagaggaagtgagcgtgtgcatgccaggcaatattcctgaatgcttgttgctagatgtcagcatgtggtttagttttgaatcatatgagaaaaacgattctatgcatgattctacaacctgtggacaacagaaatcactgacaagattcaatccaaggaagaagaaatttatgctatgatcttaattttaagagtgaaacaaacagctccattactctgtcatctggataagtagatgatgtctttcagtcagaaccagcagaaatgtttcagactgaaactttacatatggcctgcatgacaagtacagttattattcttactcctcttgtgttaatctgtgctcatttttttaaacagtgtccagtaagcccatgacacagacatgttcattctttatgcatatgcagtagtgtattaccaatcatgcagcaccgttactgcaaaaactgatattaaactcgagcagttttgttatatagctggtagagcattgattctaaaatgttgatatttaaaagagatgcatgggatgcaaccaatagagtgtagtaactcacttcttgtctgaatggggtagatgtgatgcagcagaaagggaaattaccaaaactaaatgcgactcactgagatattcttggttccaagatgataactcttgttcttctatctgaacttttgatttttttctccctggtagtttgacacagtattagattcagtaaactgataaatcttcagaatttgatcattcagcaacgtttcagccttctacagactgattcacatacacacacacacacaaaagaagcaacgcgattaggtgatttgatcagcttcaagcaatggactatgaaaatgaaacacaaaaaagaatatatattttttgttttctgccagacgtttggaagtgactggtattagaagacatataagcattcatgacccgcacgagaacaaacggtggaattaggggaacctcacgattgtcagataagatttctttagtgtcagactgtcagtactcaatagactcgtggattgtttatcacgagcattcatc

SEQ ID NO: 19376 - DNA, 756 bp, Oryza sativa
tcctgcagcccagcccacccccctccgccgccatcagcagcgcggcgcgtcgagcgtatctccgggctcggtgcggcggcggcggcgactccagcacagtcaacttctcctcgtccatgtcatactctagtggggaggaaaagcttccttcccacaaggacgcaggccttggtatcaatctgatccttctccttgtgcagaatctcatcgctccagccatcggtgtaggaagagtacatcctgagagagctgtaggagtccatcgtgcgagtgcatgcggcgacgaccagaaatggtcccccgtggcagtgaagatgatcgttatggcactccaaaaggccacacatcacggccgccgtccagtactgcgtctcgacggggaagggaaatccatcgatccactgctcctcttcttcttcttcttccaccattggatcccagactacgaatcgctcctcctcgtcggagcaaaccctcacgtagaagaggaccaggccgtgtcggctgtcaaccgctgatgcgaggtcgtatatgtcgggactcgccctgaatgttgtcgtcatgtggacgaatcttgcgatctccattggctttccgggttcatcctcgttgatgaagtagccaagcataggaggtggatcatggaacttgcggaggaggcggatgaagcaggggtcgccgaggatcgcatgccattgcttgcaaaccagctggagtcgggcgaacagggctgggtcctccggtggggggcgaagg

SEQ ID NO: 19377 - DNA, 753 bp, Oryza sativa
ttcctgcagcccaaaaaaaaaagaacaaacatgttaaaaatagtaattctagagacaaaagcagttgtaaaatcaatttttttataatataactgagtgcagatacactgtaactatttgtaagtgttctatagtatatataagcgttttgtaaatgagtgtaattgtaagttgggtctacataaatataaatctttgtgcagatcttacagacaaaaaataaagaggctgctatataatggaatcccgttttcgaacggaatgatcccgagtaggtaacaggtgtgatacctatcaagtatcagacgattctacacaacatgatgatcccgagtaggtatcaggtgtgatacctataaggtatcagacgattctacacacatttcaggtgacacttgcaagtatcatgtgatatttatcaggtatcatgcgatttctaccacgtatcgcgtgatactcgcgaggtatcatgtgaaacctgtcaggtatcagacgatttcaaccacgtatcgtatgatactcacgaggtatcatgcgatacctgtcatgtattagacgatttctaacacgtatcgcgtgatactcgcgaggtatcatatgatacttgtcaggtataagacaatttctaccatgtatcgcgtgatacttacgaagtatcggatgatacctaccaggtatcaggtgattcctactatatatagctgggcatcccgttgggggaggagcaccccgacacgtgcggtcggccccctg

SEQ ID NO: 19378 - DNA, 764 bp, Oryza sativa
actgaacgctatcttattcctgcagcccgttttccctatgcctccagaccaataattggcaagacagtcaggtattcttcacaacaagtaccctgagtgatactatctataattctcttcattacagcgtctctgccatacagggtgggctctatacttgttggtgcggtgatgggacgactcttagcagtgcttgattctatgctaagatgagaacccatgagctctagattaagaatggctgtaacttttgcacacacaggctgcagctgctctacaataatcttcatttttttggatagacctaccctgtcaaacttcaactttggcgttgatttccctttcacatggtctctctcatcgtgcacacagccataatcatgatcgcaatcatcaactagagaagtcgagaaacaaaggcgtttaccgatagcatggatggtgttgtgtggcgaaccgcagcatgcagcggtaatggaatcaccaggcccgttgttagtagcacaagaagagcatgatgaagagaatcccaacagcttgccagccgctttggccgtgtggtgagcgttgaggaagaggtcgctgacgcagcccttggcgtgctcagcagcggcctcggaggtgtcatcgagctcgtcctggatgcggaagtagtcgagctcgtcgagcacgtcgtcggcattgtacgctaagtcccgcagcttctgcaggagctcgttgaggtcggtgttgtggatctccctaccgcgaacgttggtgagctg

SEQ ID NO: 19379 - DNA, 760 bp, Oryza sativa
agtgactgcatctattcctgcagcccacagttaccttgggacaaaatcaattgcaaatagtactacactgttagttcaaggttagtaagtttacaaacctcagttagacagccttaattactacttagcccttagtacaggttaaaactatgacccctttgaacctgaaagctagctcatcagctacatgaaactctacaacacaatgagtggaatcaatcccaacaattcccccaaaatcaacatattaggtggagtccggactccagactctcctactgagatcctaaatcaagaactggtcaatcaatcccgatcgattgcaggtttgcaggtggaataacacaaaaataatcaagagttaataagcaaatcgatgagtatgcgcattgggcgaacgtaccgtcccactggaactcgttccagtaggtggtgtcgccccaggaccaggcgccgatgccgagcttggtcaccgccacgtccgacccacccagcctcaccttgccgtcctcctccaccgccgccgccgccgccgccgccgacgccgacgccccggacgcgcgtggcgggcgtaccgccgccgccgctcgtcggctggggaggaggggcgccaggcagccaccggcgacctgcagggtcccggccatcattgcaggcaagctacctcctcactgttgctcgggcctcgcgcggcgggggttgctgggcttccactgccagtggccgggaggcgcgagctttttttgggccacaacgagag

SEQ ID NO: 19380 - DNA, 768 bp, Oryza sativa
ttttgactgcttctattcctgcgccctgcatgaagaaaagattcttggcccgcggatgcgattatcattctgcatatcgtctggaacacggggtgcattcatagctggagaagggatctgaggcatctggtttggcagagaattgttcatgtaatatgttgttctttgcatctgattcaggccttgagcttgaccccaggcatgcatgccgtgttcaatcccatgcccatcggtggcatgagctggtgggtaccggggaacatcatcggcacaatcccggtagtcatccacatgatctgaacatgaagcaacagtctcacaatcaggcaccgtgatttgattcatccagaaggattgaaattctattgctactgtggagaaatggggaaagtttgatttcaaacctgaacttgcatttgcagggacttcaagtactcaattgcttcatctagtatggatgctttgtcagtctgagaaacagctagaatcatcaaattgccacaaaattcaaccatggcaatagccaagaacactatactattatacaggataacaaaaattcccacaacttttcgcagaaattattttaccttgttgcaatgaggtaccagttcttgcaatgctctcaacttctcattgatcctatcccttcttctctgcagcaagaacagcaaaaaaaatcaagaacattcaccttgttgcaaatgatgcaacaccatctattcatcaatggttggttggggttcttgaggtcttacacgctctgac

SEQ ID NO: 19381 - DNA, 760 bp, Oryza sativa
atgaactgctatcttattcctgcagccctgccttggcagatcagccgttcagaaccacctgaagaaaatgcaggagaaaaaaagaatggagcaactttgcttactactatgtcatcgaaattggtgcactgcaaatttccgagaattcaaagtgttagtggttgttttagcttcagcatttgggatcttgttgatctccagtagcccttgagcttgttgaaagatgaaattatcattttttccctcttacaatttactcctatgtctgaataatttgcattctaagtttttggcaatgggtagacttcagaaaaggaaatattgagcagcaagaacacctgagttggggtcttctcataacttcctccaatctctttaatcctgttaataagtggttggagctgtttggaataagaaacatcttcaatgagcagagttgcagcagtgcaataggagagggttcgtgaacaaggatgcaacaagctcataataatattagtaaaaaatacaaccttggtcaggaactcaggagtgtatattcgtccacggggcccagttgggggattatttggagtgtattttcctgtcagaacacctgaacagaggagacatattaagctaggaatttattttcgataatcactcatttgagaaatggaatgatgatcgatgaagtaaacatttcagttctaagataagacattttcatttaaactactagattgaacaattttcttgcaaaaaaaagatcttgatatag

SEQ ID NO: 19382 - DNA, 764 bp, Oryza sativa
  unsure (1)..(764): unsure at all n locations
ggtgaactgctatcttattcctgcagcccagcaagccacagaagatgccttggaaatcatggaaccaaaggaagggatggcatttgccagtgtgaatgatgcttttgtgttctatgagagatatgctcagaagaagggattttctataacaaggagaatctcaagcactttccaatccttcaccttcgcttgcagaagacaagacaacgctcaatgctcctcaaacaatgcatggaagcatcatcagaatgaatgtccagctaagataattgtggatcttgatggtcctgacgacaaattcttcttatcttcagttacgcttgagcacaatcacgatctcagtccaagtgaaacaagtcgaatggaagttttcatatgtaacaaaaaactgattcgtgtgctaaaagaagaagggtgtcaaatgggagagcagacaatcatgccaacaagaagtccagtactccttgcttgcaagctgaaaatcgcccatttggtcaaaaggatcccatgaacaatttgcaattggaaagaaaactgaagctcagtgatgcatataggctntatcattacttcttctgcatgcagttcaagaatcctagctttttctatgctttggactttggcaaggactcctgcctgagaaatgttttctgggcagatgcaaaaagtagggcttcatgtaaatatttctcggatgtcgtgacagttgacactacatacttaatgaacaaggagagcatccctcttggccttttgttggtgaa

SEQ ID NO: 19383 - DNA, 761 bp, Oryza sativa
  unsure (1)..(761): unsure at all n locations
aattagctgctatcttattcctgcggcccgacttcgtcaacgcctggccgagatcgcgcgcgctaagctcgagaacgcggtggcgacgtcgcgcgcgcctctcctggagcgttggtcgcccgacggcggcgcggcggcgccggtggtgctcccttacgacgacctggcggggctcatcgcgaggacaacgacgacgaccctccgctgctgcgcgagcggatgctgcacttctcggcggagtcactggcggcgctcaaggagcgcgcgcggtgggagctcctcgccgccggggacgcagccggcgcggccgccgtgacgaggttccaggcgctgagctcgctgctatggcggtgcgtcacccgcgcgcggcggctggcgccgggccgggaggtggtgttccgcgcgtcggtcaacagccgcggccgcctccgcccgccgctgccaccggagtacttcgggaacagcatcctccccgcgtcgacggaggcggtgccggcgtcngagctcctggcgcgcgggcacgggtgggcggccgccgccgtggggcccgcggtggccgcgcacaccgacgagcgcattcgctcgcgctcggcggcggcgccgtctgagtcggcgttcaggctggtcgactcgagcggcgtggtcgtgagcaactcgccgcggttcgccatgtacgggtgccaactctggtgggggaaggcgcgatccgcccaggatccgctagggggacaagatctacggggacgtgtccttgttctcct

SEQ ID NO: 19384 - DNA, 782 bp, Oryza sativa
  unsure (1)..(782): unsure at all n locations
ggtgagctgctatcgagttcctgcggccctgcctgatacatgataggcacgctggcattctgcgagcgatagaagagttgcagtttgggagtatggaacgaggataccccggtgtttgggaagatgtacagagtaggtggtgcatgcgtcatatgggagctaatttcttcaagcaattcaagaacaaggagctcatgaacatgtcaagaggctgtgcaatcagaaccaggagaaaaaattcaatgagctttggaagagattagatgagttgacagccaaatgtagtgatcagcgtgcagcggctccatcgaccgccgttgctgaccctcctcaagctcttggacctctcccaacggatagtccaacattggttagaagaactgtattggagattcggaaattttctcagtggattctgcatgaaccaaaagagaaatgggccaaggcgtatgacacaggtggtgctagatatggaataatgacaacaaatttggcataagtttacaactaggtgatgcgcggtgtccgtggactgccactagttggcatagtggagttcattntacatgggacatgcaggtattttagggatcggttccaggcagttcttccctctatgccgaacaaagcattttgtttggagctttcatgcagaaaaagctagaggagttgcgtaaaaaggccatgaaacatcgagctctagtgaaggtacccaacaacacaggtttgagatactatgtcaagataaggcaagcangggtatctaccgcaagagagtgaat

SEQ ID NO: 19385 - DNA, 2886 bp, Oryza sativa
gatacaatgatacatgctgcctcgttaaaaactttgtcatgtaaaaactcataggggaaaatgagaaaaccatgacaaagaaaagagtacagctcaaaggtcagaactacttctaaaaaaattctactggggttggtctggatccaggtagagttgctcgaactgggcggccaattcttggttgtccgcagtgtattgggcatgttgtcgagcaagctcccagtctttaacgcttagtagcatttcgacgtggtcgctgcgcagagtcgtcctccggtcttcgatgattcggccgcatagactgaaggccgattcggaggacaccgtcgacacgggcaccgtcaacacatcccgtgctagttttgaaagcacaggatatgttatcttgtggtcattccaccacccgaggacgttgaaatcttgtgcttcgtggtggatggcgtcgctgtccaaataaccggacaactcttcggccacaacatgcgaagaggcgtctccacttgtagccgacgaactgccaccaccttggattgaacttgaagacgatccaccccaaatcctaccccactgtatcttcttcttacctgtagtggggataggagggggtctctgctggcgaacttcctgaaactttacttcatatcttccaaaaacctcatataatttacgtctaacctcagtataaaaagaactataatctacacctatagtatctccaacaagtgataaaatagcagacaatccccttaatttacacctaggatctaaaacaaaagcaagagcatacaacataggtatatttttccaatatttcaaatatttttgttacatgtgaaagacaggttcagttagaacgtcatcattttcgtattctttaaataaagtagcaatttcaagaaggttgtgcaaaattatattagcagttggataataaacttgtgacaaagttagagtacaatcataaaaagtttctagaaattggtaaaatttttggacaattgcccaaacatgctcgttcagtactgaagacccgtcactgtttcttgggccaccacgtgactgaacaaaatcagaaagtaaactactataaggtaaaacaacttttaacattaaatacgttgcattccaccgatgctctgcatcggtggcaaacttacgagctttcacaccggccgcattgcaaaacctcttccatgcagcaatccgcgggttagaagcagttaaccacgcgattgcttgacgaacagcatcgatgtggtcacctaccctcttcatgccagtcttaacaatcaaattaattatatgacatgcacaacgctgatggagtagaaaagattgagcatacacacaaaataaaggttgcaatatttcaatagccctagaattagcagatgcattatctagggtgacagcaaatattttatcagcaagattaaattcattaattacttccctaattctttcagctatgttttctcctgtatgtgagacatctattaacctaagccctaaaactctcttttgtaattgccaatcatcatcaacaaaatgaacaactacgctaagataatcctctctagctctactactccatatatctgaagtaacactaacagagaaagtacatgtactaaacagttccttaagtgcagttgcttccttgtgataaacattctctaaatctctagttgatgtttgcctactcacagctttaaacctagggttatgagattgctgaatgtaatgttcaaaagcaggggactccccaaagttcaggggtaaatcttgcctggcgattaaccggacaagagattcccgagcaaccatgggatcgtactcccaactgcgtaccgtaccgtctgggtttaccataagttgctgctgccggagttgtattccttgcttcttggcacacgactccgcatggcgcttgaggtgacctgtaccaccagaagaacgagcagataaaatttgcctacatattctacaacgggctttcgatacctcccttccgtcggggcatgtttcctttatctcgtcgaagctttgccacacaccggaggttctcgatctcttcgagccggtgtgtgtcgaaacacttccgctcgcggttccggaaaatccttccgaagctgtctccgcctgaaccggtacctcctcaacgacagccgtatgaaccggtacctcctccacagatggtggagttggagccgatccggaggcaccgtcaaaccccgacatgtagttggggtcgaaatcacccaaggtgaacgacggcgactggtatggaaagttcggatccattctgaaaatttaaaccgacataaacaaattttcgaatatttattgaattcacaaacacaatacaaataatacacaaatttgaatattacttacatctttccaaccgcgagctcttcaaacctctgcgatcaaactgttgaactacgaaactaattttgatttttgacaaaatttgagcaaattttgtcaaaataaaaaaaaatgcacacttgagaacaaagagagcacttaaaacacttgagagcacaagatgaggagtgtgggatgaggagaaatggctggggttcatgccctatttatagggcgaaatttgagattttttggaattttttcgaaatttttatgaattttttagcctcccaacggttattttcaaatttgaacggtcaaatagccgttagtgccacgtggcgccttcccattcgaccgctgcccgccctgtcagtgcgccgctcgggccgccggcgtgtcgtgccgcgggccgtgccgtgctggcccgctacagtagccgtgccgtgccgtgccggcccgcgggctctgccagcggcccacgcacgggacggatactcgggccgtgccggc

SEQ ID NO: 19386 - DNA, 4300 bp, Oryza sativa
cggctactcggcccgtcccggcacggcccgttactgtagcaggccgtgccgggccgtgcctgctacaggttcggccgtgccccgggcggcccgtttggcccggcccatttggccacctctacacaactctactaactactacaaatgaacacagccatagtttgccaaaaagaatcacatcatagctaaataaatgttttatgtaatatatatcgagagaaaaaggaaatagggagaactccaattgccccgagagtggtgatctcacttaataggaatagccctatgtcaatatggtataagtgaactcaggataattttaaaccaaaacaaatacttatagaacctacgtggataaaataaaactgaaacgactaaattgaacttttggtgaaacttaaggaattagatctattcaccctaaaaaatcagctaaagaaatattttacgaaataatatatcaaacaataataataataataataataataataataataataatgaagaaaaaataaatatagggaggagaagtccaatccccaagagagcggcgaagaaagaagaaagagaaacacgggtgcacgcgctttcgcacccttcctttttaaaacgccactcccggccaacccggcctctccccatcctctccgtctcctctcctcccttccaccacgacgcgaccgacgcggcggagaaacccgcgaagccgcagtccagccagcgaggggccgccagccgaagctgaagcgagagctagggtttgctccaccccttgaacccgcccgcgcccccgccgccacgaggccgatcgaggtgcgtgccaccgtaatctccgcgcgtgtttgtcgtggggttgggttgggttgggtggggtggggtttggtgtggatcagggaatgcgggatctggtggggtttcgtgcctcgctcgctcggggatttcatttggtggggtggtggtgatcccatcctcccccactggattttgatggatgcgacccccttccgctgaaatcggagggattttggttgccatgcgctgctccttctgtccgtacggttcggtgaatcgggagttgtagattggtggtgatgatgacccagtagttggttctgatgctcaatactcgctgcgatttcgctcccctttatccaagggaagggaagggagaggggcttcctttgcgttcaaatttagcaaagtaggaattgtgtgagattggtggtagcgctcacttttttcagctctagatcgttagttctgcataccatgaagattcttgtatcaggagaagattattatatttattctgtggagaacgatatcagagatgatttgtgggggtgatttttggctgatttctgctctgcagggttctgcttctgaggctgtcaagcctggcggctaattgggatggaccttgtgggatcgctgctggtgaacatgactcacttggttgacacctcggggctccagttcttcggctggctcatcaccgccggctccttcggcctcgccgcgctcatctacgccctcctcaggctgcagagggcggcgtcgctgtactggatcaaggcggctgccagggagaagaaggcggcgtggaagtcgttgcggtgccccagctccggccacacctggaccgaggactacttccgcggcggccagccttcgacgtgctgcgtgtgcctgtcgtccctgaccacagctcagggtgtgggctctcggggtgccgatgccgttgtggtccaccgctgctcggtgtgtggggtggcggcccattctggctgctctcgtggcgccgagaaggactgcaagtgtgtttcacagcatggtgcttccaccttgcttcatcactggtcggagaggtgggtggagctggatgacaacccagagatgtcctctttctgttactactgcgatgagccatgtggtgtgccatttctcggcgtctctccaatatggcgctgcctgtggtgccagcggcagatccatgttgattgtcatgcaaagctgttaaaggagacggggaatacttgtgatctaggccttctcaggaggctcattgttcctcctctgtctgtgaaagaagttgcccaaggaccagcaattactggaatgctcaactcgatcaaggaaggtcttgtcacttcatcagttaggggcaggattaagaggcgaggcaacaagaaacgcatgaacaaccatcctggtggtaagacaagtccagtccccacaaacagctctatccttgattctgtgcttgaagggtttgctagactgcagaacttgaatggaaagtatgcgctggcaaaccataagtctagtggggattctgtcaagcaaacacatggatatgacagccctaatggagggaagaaaaagtatgaaatcattgatttgccacaagattcaaggccactgcttgttttcattaacggcaagagtggaggacgaaatggaccttctcttagaagaaggcttaacatgttgctaaatcctatccaggtaattttccttaattctttacttacgaaaatggtagcagctcattcttatcaactgctgagtcaattaaactgcttgctagtttctctagctttatatgcatgatacatctgctgaaaattgtagccagcagttttccttggttcattctacgatacttgctaattaataggcattttatacctatgtaggttctagattgatctatttgtcttttgatgttgccctcagagtgaagttgtactatttttgtcatttgcacactttattccgccaaccaaaatagtcactgagatctgacatcatcaaatgtttagttaatctactgttaactttagtattagccgtggttgattgtgacatatttgatactctattcttaacctggaaaatctcattcttgtttcagatatttgagcttagtgcttctcagggacctgaagttggattgcaatttttccacaatgtaaaacacttcagaatccttgtttgtggtggggatgggactgttgcatgggttcttgatgctattgaaaagcagaactatgaatctcctcctcctgtttccattcttccattaggaacaggaaatgacctatctcgtgttatgcgctggggtgggggtctgtcttctgttgaaggacaagggggaatatgtgcacttctaaatgatgttgaccacgcagcagttaccgtgcttgatcgctggaatgttgccatcaaagagaagaatggagcagaagatcaatgtaccaagcaagttaaatttatgactaattatataggtacgatgcatctctcaacttccatcatcttactcgatattatgatatatatctcacttcaaccagaagttgctgaatatgttattttatcatgtttggcctgtaggtgttggatgtgatgccaaggttgcatatgacttccacactacgagagaggaaaaaccagataaattttgcagccaggtagggattgatttctacatatatttttctgcaaaatgatgtttctccatttggaacaagcaaaatccctgtagaaattgaaccttttatggaaacccctgaaatattgacctcccttagcatttgatcttatgctacctcctcttctatcacttttactagtcaaaataataataataattcaattttctactgagcagtttgtcaacaagctgatatatgctagagaaggcgctaaggatatcatggataggtcatgttctgatttaccatggcatgttagtcttgaagttgatggaaagaacgtcgaaattccagaggtaacatgctacgcatcttttatgtacctccacagtccacactctgatttatcatcggatgagcttcttatatatatgctatttctcatcaggacgcagaaggtgtgattgttctgaacattcctagctacatgggcggtgttgatctttggcaaaacgacaatgaacatgatgatgattttggtttgcaatccatgcatgacaaaatgcttgaggttgtctgtatatctgggacgtggcatctaggaaaactgcaggtaagcttgatgtgtatgcttgcatgttgttagactattctccatctttccattttctaggagtcttctgttcctgctgcacttggtagttttagcttttacccttttagtaatgataatgtgaaggcagcaactcagtcttctttctttgtttgataggtgggactctctagagcacacaggctagcccaagggaaagttataaggttgcatctccacagttcattccctgttcaggttgatg

SEQ ID NO: 19387 - DNA, 6104 bp, Oryza sativa
tacgaagagttttgtagcgcgtagaaacactgttactgcatgtagggttcaatgagcattgtaagctgtatctagggtgtatcggtggcctatacaaaaggtatgaatgtaagtttaatccctcgttttttgacagaagaaaattgtggattttgttcctgatgagtgactaaagattcttttggtgcctgtcgtgacagaaatcagttgtgatgatcctgctgattttatttcttcattgatgtttgtttctaaatcttgtattcgtctcaaaagatttacgttattctcaacctggctctggtgatggaaattgttgatttacctgaagccatgattctcttttacctcctttgccattttccctaccaagacaatgctccaagtttttttagcgatccccgttgccgtagtttaccatctgcttgaaggtaaattaccctttgccgtcagtttcaggacgcggcagattaaaaactctagcttagtccaacgtagacaagtgcacgagggcagtatactggcaccaaattactttcaatgctataaatataaaatcggtgttttttttattgctacagaaccaattttgccaattgcaaaactgaaacagagacgaatcaggttcatttgcttgaacctgccacgtcggagcagacgaattgaaggaagttgctcgaggctggcagaagcgaaaccactcaaactagaggattacatatctccttaaaataaaggctactttatagtatatcacagttaatcaacctccgttcccaaaaattagttattccaaaatgattatcatattagtattttcgttatttgtgtatgaaaataaatggacatatatgtacacatatgtgcgcacaacctttttacaagtcttggtctgtttggtgctaggaagtaatggggatgggaatgtgcatgcatcgaattagttaacggagtaaatatattacgggatagctattagcttttttttatcttagtacactcttataatgcgatgataaattggaaacaaagggaataataactttatagagtaggaaaacatgctttgaaaaatttcttagtagtgagtatcctactccctccgtcccaaaacatatctaattgacttttcatggagagtaattctaatgtttgatctttctactaattgtgattgcaatgtatgatattgctaatatttatatacatatatacggtttatttggtagatctgtaactacacctctcctaaagatggagctcaaccaaagtgtttaaccttcacctagaaagggcgtggagcagattaaagtgcttttacaaaatgaaatagtgaggtgaatctccacaactctacttcaaacctagcttttggagttaaatttaaaagtttgaactctattacataataacatagatatagtacgctagtaacagagcttatacacggagtagaaacatgtggcacctaatttgggtatattgatttttgctgtagctagtaggtgctccctctgtttcattttataagtcgctttgaccttttttcctaatcgaacttctttacgtttgatcaaatttgtagaaaatactaccaacacccgcaataccaaactagtttcattaaatataatattgaacatattttgatgatatgtttgtgttgtgttgaagatgttcctgcacttttccagaaacttgagcaaaagttaaaaaaaagagcaacttttaatatgaaatgaatgtagtacaacacttcaggatgtccttttgttttacacgtcagtttcacatgttgtccaaaaggtttacaaatgaagctatatccaaaccaatatattaccttcgtttttctaatatttggcgtttgatcgttcataaattaagtacaaatatgctaaaatataagcatacttaaaatttcttaaatgctaaaccatgtcacaataaaatacataataattatttagtaagataaataatcaaacatcatactaaaagttaatggagtggtctattgaaaaataggattgttatatacttcctccgtttcacaatataagtcattttagtatttcccacattcatattgatattaatgaatttagatagatatatatgtctagattcattaacatcaacataaatgtgggaaatactagaataacttacattgtgaaacggagggagtattatatatcactctataaacgtacgtacagctccaacgaactactccctccgtcccacaatatctcgattcctggagggagggctttgtcccaaaaaaatcgattcctgcacagaaaaccgcgtgacctctctatccgtatcatgtgtggggataggtgggtggtgagtggcgacttctccagaatactcctctctcctcccagaaccttatctcctcccagccgcatactactcgtacgcttctctctccccctctcgtgtttttctccctcccgttcctccccatcgcccttcacccctctggatcgaaggcatcgacgcggcggcgtctagatgaccgaccctagcaagcttccaactccctccctacctccctcccgctcctccccgcacgtccctccttgctctacgctgctccgccaggctcccacatctccctgccaagttccccgtccaactagttgcttccactcagatgcggcgggggaggtttacgagcagttagatcggatgccggagatggctgcggtggaagtgtttggctcgatagcgccgttcatggaagcggcggaaaattttagggttttgattcaagagacacgagccaaggcggaggaggcgtgtcggcttgcggttgtgatccaaaaggcggtggcggcggcggcgctgggtggaggcagttgggatgcggcggcggcggaggaggtttgcaagaaggcggcggcggcggtgggtggaggcagttgggatgcggcggcggcggcggaggtttgcaagaagggggcggcggtgggtggaggctgttgggatgtagcggcggcgtcggaggtttgcaaggcggctgatgtaatgctcaaggaggtggcggcgcccgcgaatctgataaaggaggggacagtggaggacgaggctgaccagcctcttattctaattccggcatcaacaactagggtttttggcggcggtatgcgtcgattgactcaaaggtacatctcccactcgatctccctggctccaatgcctctcagcctattccatcctaaaatatactaagcagatctcatattcctctgtgcgtaagatagttacgcagtgtcctgcatctccaagtcattagcacaaaactaaactaacaaaagaaatctactccgtagctagcaacacaagacttacccaattaatcagctaattaaaagcccaaagtgatttctaggtgattgaaatgtgatccttcaaattacagagcctacaaaatcgtgaagcacttaactaaactcatggatgaatgattaccattcggcggtgtgtgttaatagactggttgctgctttatggcacaaaagaaaaggatatacagtgtgttttttatgttttgagacagacagtgttttttttcgttaagtactcgattgggtccaatggcatattttcttcttgggcgaaagctgcatgcatattctttttgtcttcaacctgcatgcatattcttcctctcaaccacagtagccagctcattctaattgacagcaagtgacagcaatagatgaggacttatgtcacgtatcgatattgtttgtttgtgctttgcctaaataagttgaatatagatagatgcagcatatctgattgattcctaacccacttaccaagttgtcaacctgattgatttctttaaacagtaatgattaatcaaggttttcttatttgagaacaatgattattttgtttcaacaattacatcgatataaatataaatatatggcagaaatgtgatatttttgaaaagaaatttcaatttcatcttctcgcatatcttcagtaattatattgttaaaaaaagtggttattttgttgtgacttgtttacaaatgctattgttttatccttttcaggacaatgttggttgacgatagcgaccacacggcactgtttgagaagaaggcaagcgtcaagcaaatcggcatcgaggagatgaggggaaaagctaaggatgtgagcagcgaggagggaaacagcgaggaggtgaagtcaagcgactatgatgaagacatggtcattaggggatatgcgcaaaatccatatgatgatagtggcctagaagacctcctgcaagaccaagatgcattggaaaaatcggtaaagaaatttctggagtgttttaagaatgcaaaatttagatgaatgcttcaattatgtgatgtttgtgtgctggtttggtggttatgaatagtggcctaacaaagcaactcaataagtacccttttggtattgtatgaaattatgtgtaaatatggtattagataagattaggtggttatgaatagaagccttgacagtctgtcaaagtaggcacacttttggtattgtatgaaagcatgtgtaattacggtagtagatgatattaggtggttatgatggtaatgtatcgaaatatttcaaattatgatggtttatggtggtgactgaaattaaggagacgtttgcaccatgatttactctaatgctgatattacaatgtcttatgtacaatctgaaattaagccaaaagctgaaaccatcataaaacttcctatattacatagtccaaaagttcaaaccatcataaaactttatattacatattccaaaagctgaaaccaccataaaacttcctatattacatgatttgttgcatttacttgcgtaatactgatcttactttaccatatatacaacctgacatttaaccaaaagctgaaaccatgatagagcttctcatgttgcatgatttactgcacttggttggataatgctgttctgaccttgtcatatagctgacgaccacaactaagggtattagggagaatgtctagacgctctagcctctctttacccatatgaggaatcctgtatccatttccaccatcaacttccataacctctaacaagcaagattgtagagttaggaaaaccctattcagcttgttgtcatcataagcctgaaattcctgctcagcattatctattagctcatccatattcctagatatccttctatatgttaatgattgcagagatgcaaagaacccaagatctagtgcattcatatatggggaattaggaggctgatacataaggcgaatgtcaaaccctgtttgagatactgcataggcaaattgaggatcatccaccggcacatgagaaggagcattatcttgctgaatccatataggttgtgtcgctcttctcgaggccaacttgatatatagctggtaggactttagcaattagaaatgatctgacaatatctcgatcaaccttgattgtcttggtgacaagagtccctcttggcctgttttggcttgccctttgtgctggttcctaaatagtaaattatgtaagttagattaacaattaagttttgcatcacaagcctatcttgccgtcagtaattaaaaatgcatatatgaagatgttatgatacctttttggtgaaaggccacaagcctatcttgccgtcaaaagtgcaaataccttcttcattgtatctaggcctagccactgctgccaagaacatcactttatcaatagaattcttgttttgcacaggcctgtatatcctcccaatggaccatgtaaaaatttcttgttttcttagtggtattgaaccatttttcatcgatgtgcacaatattgcgcatatcaacaaacttgggttcatttggcaaagtatgccaatctaacatggaaagacaccatcgcagccttgatcgtttgttctcttcttcaacaatggctttaatgtgttcgagtgacgtcttagtatccgttctttcaacatcctatgcagcgtgctctttggtacacctgcggctgatgtaaatgaccgtaaagtgccccttagttgcaagggaacattagcaatatctgat

SEQ ID NO: 19388 - DNA, 4215 bp, Oryza sativa
ttttatcgtcatggatgaacatgcttgcaaaattatggctgatacaacatgcatatactttttatacatgaccatgcattatataatttgatgtgtactgaacaatcgtagtaggcaaaactggaaatgtgatctccatattaagtgctcatgttgataataaagttcttgcacaacttgttaggctcaccatgtggtttactttataatatgatttaaccatacatatcatttagaaggcagagaaacattggcacaatttactgtatgtgctttctttgagattgctatggctgtgagccaattaacatggaaaatctatgtaaatacaacatattagcatatttataatccttaatctcatcattcgttgtgatttactatgtgctgaaatatccaatttataatccttaactattgatgcaactaatgcagccaatggcattgctgaattattctaggtagttggcatgatgtaataatagtacctgcttgcatttgtaggtgttcctcgaaggcatcggagttgatatcaaaaggaaaggcattatggatgtgacctccataaagttgcagaacttgatccattgcatcgccattgtctacaataacaattaccacggtcagtagttagtaccatgtcaaatagcaatattttttgcaagcacaatcctttttacccatgattcaatactgaagtggtatgtgttcaatttgcaaagtatcatctattccagatagacctatgaaatgtccacttagtgatcatctctgtttctctatatataactgaatgatttagttcatccattctatgcgtgcaaatagatatagtaagtaatacaaaggctgccatgttgtagaaaacatgattatgtagactgtaacagagtgccctgttcgctgctggtgatacttgatgtttgacatgccatggcatatttgccttactagatgtgtgtgactaaaagaataatgtttatactttttttccaatatatccaaaatacttttattactaactaatctattaagttacataactaatggaaccaatgattaacatatgttcctttatgctgtacaacatcaacacaggagattatgagatcaaataaccacaatcaaggtaccaactgtatacccatatgaaatttagtttttttgtgtagcaattttattattctaccctcaaccatgtttttcagtagagggagtctagtgcacagattttaaacaccggtcttgctttctgatttgtcctgtttagtatgtagcatatcaggattgattctagacattagataagcattataacaggagataagtattgcattagttcagctagctaaatgtataacctgtgatattatggaaggggaattaacttcattagggccaactcattgatagaatcaagtcctaacaatttcctcatacttatcaaagattgattttgttccaaaaacatagcgattgcatcaaggcacatgttactgatcatcttttcagagaactagcaaagattctgagttatttatgctagtcagtgctacaaatgttactcatttcatattaatgcttgcaaagttacctggattcatttctccttgatggccaggtgcatcaatattgagatcaaaaggaagcacttgagggccaggtgcatcaatattgagatcaaaaggaagcacatggttgtcacctccctggacatcacctccaagttgatcctcctcctgaccaagatagatttcaacttcagcaatttcatcattgaggtcaggcaaagcctattcatctgcctcatctattggcttgtttagatcaagagccatggaggtgattttgaagactcatgcagtgattcagtgggagggaaacctgctattgaggttcatttcaaacttatatagggttgttgtagtggtgtgtgctgaaatttgtaatgcttgccgccaatgaagcaatgctgagtttcaaaatatttggcgcactggttgctgtgtattatttgtatattgagcacttaatggcagcatcagaaatatgcttatccaacttggtggctgagtagtactactattttatttgtctccaatgattgcatgtactttcactgagggtattttagtcttttgccacctgtcctaaaattcccttgggattctagggtttgagatattatgggacggagggagtatatcaaactatagcactagcacatgtccatcgacgccggcacagcgtcctccggcgatctcgacctcgacaccaccatagacgacgcctccttcccaacaccaaatcgctcgaccacgagcccggagacgacgaccacgtccaccaccaaacagagcagcagccacgccgacgacccggccttccagctggtgaccacgccgcccggcgaggctcccggcggcgcggccgcggcgcacagcgcgtagaacacgagggagccggtgaagagcaccaggaggacggcggcggcgacgctccggagcagcgtcgcggcagcagtactagtactaatactaccacggtggtggcgccgcctgcaggtggtccgctcctcggtggccggagtcgtgccgccgccgctcgccatgccgatcgatctgtagctaggatcgacgacgacgagagggtgatggccttcaactgctcgagcttttgcttacaccgcaacggaaaggatgcgagggaaggcgattgttttgaagttgattgatgtaagtccgattcggaatttggatccgaaacccaaaatttccaacttccaaaggcccacgaaaatctcacccggcccagcccaatcgcaggaggtttcgaaggtttctcgcttgcttatgatgaagtgctctctttgcttggtttgcaaggtgaaattattcaattggttaatcagtgaaaaaaagagcataaggtagattgatgagaaagctgagcatcattaaagagagtgacaagggcgatcaccagttcgacgaaaaagcaatgggcaaatgctgagagatcatactactacatccctccagtttggttaggatagaagattaagcgtgcacaaagaacgagaaaaccattagcgtacggttaacagagttttaattatttaatttttttaaaaaatagatttatttggtattttcaagcaatttatatataagaaccttttaatggtttgaaaacatctaacgaaaatctaggtaaaatctacatctattaaaaaacatatcaattatggttgtggctatcttttttttccttaaaaaatatggtaggacaatcaatgcacctttggatgcataattaatagtcatctgcattaaatgttttctactgaatttatcatttaatcatgtaaaatagtttatttactaaaatatatcttcagaatttagtgtcattcatctataggcttatgtttttaaacattagtttttttttttgaaagaaagttttataacattagttaattcctctacaccctataattctataccttctacataatcatcttctacagtatggttattgttatgaagatgtgtataagtgaagccacgtcatttgtatgaatatattgtgacacaagttgccagctgatccatccatcctttaatgaaattgatggcaaagagtgaaatttctctgctgccaagcgccgcgttgtcgcatgccacacacctttgctgacacgcatgtagtgcagatatgcctctccttcttcggcctatattttttccccttaaacacagataaactctaatatatgaatgctctcatgtgcctttaggatgcgtgaattgaaagatacgtgcaatgccatacatctcgagtcgactggagggggcccctaataagcgactggtcacgcgggggcgtagccacgcgaccagcccgctcctcctagactcctactactactactagtctactggtactactactagtctactactacaactgctggtgcaactactacactacaacaacagtactactacgcgtatatatacgtttgtatatactttgtatacatacgtaaaaacctttgtataatacatatgtattatcagtataaagtttctacgtatgtatacaaagtatacacatatgtatatataatttttatgtgtaccaaaaaattgacgtataaaaaatatacatgtatacaaactttgcatacgcatatacaaagttagcatg

SEQ ID NO: 19389 - DNA, 2435 bp, Oryza sativa
tggtcttgtccgagttctccaccgccttgtccatatcagcatcagccttcttggtctcgttgaaaggaaccgatgtcaccatggctgctgatgtaattgagggtacagatgaagctgtagtagcagggaacacgcgttctggtgcagcagcagtactcttggccactggcctggcggtggcgctacttggtaccatcgtcgaacaggtggtgtgcgtggcagtggcgccatctccagggaacatctggacgtgctgcatatccagtaagcagccctcgtcgtagatgtcgtgaccatgggtggtggaccgagccctctccgcgtcatggctggacatgaacgacacaagagccttgacttgccatgtgctcaccgcaagaacctgcaccgccactgctccataggtatcgtacacttgatgcaacacctcagatgtcactggatatatgatctggctcacggtgacgcaaaggacagcagctgagtcgcctcttggacagctcggcatttcattgaacaggtggtgggcatctcctccaaagacaccaccaccaggttgctggctgttcctctgaccaccagcgctcttccacttcatctccacacctaaaaccccacgaatcgactgctctgataccatattgtcacgaacgcactccattccaccccaaatcagcaacaaacacacaagagataaccatcaattctcagcagtaactcagttactcaagatacaatgtggcagaatagaggcagggattgagaagaagcaatctagacttggatttgagagaagaaaggttgagaaatcagataatagaatcaggggtaggggaagagagctcgaggaggaggaagagaggcatagccttctgtttgttcaattcttcgatgccctgttctgtggctgaagggaagtatttgtactcctgctcattgacttgctcccttgttaggtaacttgggctaagcccacttttagctgcagcccactatatggcccatcgtgtatccgaccatggggtacatgacattcctcccaccttgaaattcgatttgtccccaagtcgatccaaaggatggtacccttgccgacattgaggagatgctgaactggaaacaccaggatcccagggccagttcttctccaactcaataactatagcctcctgaattgcagaagtttccacaatatcaacagtttgtttctccttcatgccttgaaaactgctgctatcatttctcatttgaaaatgcatgctcatgaaacaacttgctgaaaatattgaattttcaatctgaagtcgaacttggttgcacctgaacaaacccatctccaagatggagcttggaacgatctgtgccgaagattgcacaagcaataatgccatagccatgatacttccaactgaatgatttggtaatttatccaaactgaacttggcaacaccaagctttggtccatccatttcatccttggagacagattgttccgtcatcttaatccgagtcaccatttcttgatcttctacagtgaccccttcaggaagtaaaaatgacagggaatcatccccttgcaaagctagattttcaagcaatgagctaccagcaaaatcaaccttgtactggaccaattcagcactttgcaacatggtgaagcaattggagatatgactgctatcttctagtgattctccccaaaccatctcattgtgaataccaccaatggtatagttaattgagaaattatccccattacacaacgtaattgtagtgagcactccatatatctgaacagtcaagtttggtggtggccatggaattttgagctctgtaggaatcagcactccctgcaaattcctaccattgaccaataccttttgggcctcctgatcttcattagcacaattaaacaagcactcaccccatgtgtcatgcattggccaggaaattagcttcagttgcacaaacataccaggatcatcaaatgaccaaccatagattgaatactgcatatgctggtaggcagtccaacatgtaccagatgaatgcagctcatagcaaatacaccatccaacaaccagattttgcagcaagcccttagtggaagtaattgttctactcatgaactgggcaacactgtagttcaaagagatttcaggatgctcaccatgtaaattcagtgcttcaatttcagctcgaacaccttcttgaataggagacgaccagggttgtaagagctttaccaccacacctccgttgccttgacaaagctgtggatcaggccatggtaagggccgagaacttgaggtcatcttagccttgttccatggaattactgctctccaaggtggtactggtggagatctaactgtgtattctgagctccggtcaaagcaaccatagattacttccaatttcgatgaaacgaaaga

SEQ ID NO: 19390 - DNA, 3943 bp, Oryza sativa
tagatttaggctagaaagaagaacattgttgaaagggacagattagactaattgatattcatcgcctaattgataatagatacaatcccatccttatatggatagtacaacttgactcctaagtaagaacttaatcttatcttatctctaacttaattggtataggctgcctatatgcctctgccttccggcccaatacccatgacaatcctatagaagtatttaatgcatatggtttatttagtatctaaaaggttcattgtctacttctatataactaaggacgaatgaaaattgctaacatatgcttacatgcatactgaaacataagacaaaattagaaacacaagaaaaggaataaggccataggtcactggtggagaaaccctttgtagtcccggttcgtaacccccctttagtcccggtttccaaaccgggagtaccaatccgggactaaagatcgctatctttagtcccgggtgaaataaccgggactaaagatcgagctgaccatttttttttgcatggccctgttgctgcatggtttatatatatatatagtttatatatatatatatatatatataaaccatgcatatatatgtttcaatacatatatatgcatacatatatatatatatgtatatatatatatatatattatattatattatatgtatatacatgcataatatatatgtatttatacacatatatatgttatgcaaattaatgcatatgtatatagatatatatatatgaccaaaatatatttacattatagaaaatgtgtacacatgcatatagaaacatatgtagtcatgtattaattacaatccattatatgtcctagctagctagctatcatttcgacgtagtagtactcgctgctagctcagaagctaaggaccggtgaattgtgtttccgtcgtagtagaattcacccttgggattaaggatttcttcgttgatgaatcccatgagttgttcttgaaccgccgtgataaattccttgtgtgtggtcaggttatcctcatgcgaataaactatatgaatgtatgaaattgattagtaattaaacaagaaatcgctacgtaatgaaattttgaatttatttgtacgtacatcgagctctcttgtggtgatgatttggtttgcaaggcagtggcaatactcgcacacgtaatagccgcacaagttatttccctgcttttgctttgcgcactacaaataaatgacaaacaacgagagatctaattaatatacacttgtatgtatttgaatcggagaaatataaatatagagcatgtgtactcacaggaaatttgaacttccgcctaagtctttctctccatttgccgcggaccaaatgacggaaccgataccaagccctacatggagtttaaagctatgattcgtagtagcaattaacataacaagattttcttaattaacaaaggaacttatgacggtacctgtctataagttcgaaaaccttgtcaaacgtagactcttttttatccattgagtcatatacgttgacggtgcaggcctccaggtcgaagagtaaaagcacccagtggaatctgcaatgtgcgtgggatgcattacatatgaaacacttagcaagttcgtacgggaatgaaatttggtatgtaggaagacagtaaatttaaactaactctgtgttgtatggcaacagttgaacgtcttgtaatgctgcgccttcaggagatggacgagattgtcctctgtttcttgtggatattggtcgagcattgcgacgtttactctccgagggtcgatgaatccagtatcgaaaaccctccgccgtcgggccctttgaatctccattctacaacgataaaagggagtatattattttctatagtctacttatatacaaggacctaatttattaaaggagacgtatagtaagaaatctaaccgaacgatatacttacaaaatccagcaactcataatagagacgtcgagggcgtccagctggtatagttcgtagattcccttgaaattgatccagagaatgtcatctccttgcaagaagtccgtgtccctgatcctcgctccgatcatctctctaccggcggcgctcatctccatgtacagctgatggaacttgtacatttgtgtgggtagggactgcagcagctcaggcttgacaagcggtttaccgagttcgtacatgtatttcacttccgccttttcgattggtgcgactcctagcaattgatccgtagttagaccggtgtcagtaataaattgttctatcgtcatttctttaccggtaaccaacggctcgatctctgttttggttgctctccaagctgagggactggtttggactttccagaagatgctttcttcagcgttcgctcatagtccgatagcttgatggcctccttgacagatgcagacatacccctgaagaagttcctgacactggggtctataggaatcttcttttctggcttcgaggcttgaattgtctcttgacttctgatgcaacgtaagcgtcaagctcctcttgcgtgcaatcgtaccccgggtccttgttcttggcggcgtcaactttcgccttcttcgttgcccttgtgtgggcaggcggtgcagctgggggggcccttgactttgaaggtgccggaagaggagcttgcgggggagtaggtgtaggagcacgaggaggagtcggtgcaggatcctgaggaggagtcgatgctggagcctgaggtggagacggtgctggcggagcatgaggaggagacggtgcaggatcatgaggaggagatggcggagccggaggagatggtgcacgagacgccgcttgtcgcccagggaggatgatgtaccgcctgcgccatagaataatggcatggcttgtgtctcgtagatgcgtctcaccgtctcctccagggtaatccagctcgaggtcctcgtacgcgccttcgaccaactcaacttcgaccttcgagtatcctgctggaatcggcctgcagtggtaagtacctgaagggtccgttgggatggccatgcccgacgccaccttcatgttgtgagagattatttattagtaatcaacatatataagcaggaactagcggaatggctaaatcttacctttattgataagttcttgaaaggaatatgcagctcacatggtgtccgctgagtgatgtcatcaacgggacaggtcgattcgtcctgtgtttgcatggcgtccatgctctgcgatcctacctgccccgttgaggcgcagctgctacggtttcctgacgggctcaccattgcaggaggaatggtcggctggggatcatgggaccgatgtgcggccatgcgttcatcaaccttccttgccacctcctcttgcatgttgagttcgtagctcgatacccggaactctaggtctgcaatcttcgcctcggtatctctcttgctcctcatccgactcctgtacgtgtggatgtcctccttgaaaccaatcttccaaggaatcacccctttccctcgtgttcgtcctggatgctctggagtctgcagggcgagtgtcagctcgtccctatctctgtcgggtcggaacgtgccctgagaggaggcttccactgcatctgttagtcgttgcgcagcctctcgtatctgaacgccgaataccagtgagccatcagctgggttgagcgttccaccgtgagcatagtaccagaacttcgatcgttccggccaattggctgttgccggttcgatacccctctcaatcaagctagcctccatctcctcccacttcggcatcgcgacgctatagcctcctgaccccaagtggtgatggtacttcttcttggcggcattttctttgtttctttccatcatcgcctgcccttgttcacctgtcttatatgcaacgaactcgtcccagtgatcccttagctttgg

SEQ ID NO: 19391 - DNA, 3181 bp, Oryza sativa
cgtccatcttcttccacttccgttatgatgtgccgaccctcaagcttcttcgctgcacctcgttgcccgcgtgccctcttctgtccaacggagggttgactaccactagcctcctcctcctggttcccctccacatccctttccacgtgcccctgctggttcccctccgcatccctctccacgttcccttcctcgttcaagtactggtttggatcctcgttcccctcttcttcattccagtactggctgcttccctccgcgattgtatcgtacaatatctgttcctcatcgcggtcagccatctgttgatacaagaaacatctgctaagtcacgagacatttatgttttaacaatctaagtcatgtatgctaagtgtaaatgtcgtacattagaaccctacacaaacttacgtgctaagtctaattacaaatcgtgatataagctaagtctaggtgacgtatattatacaaccctagctagtaaataattatatactaagtctaattacaaataaagtaatcttatattaaaactcaaataatattacatgctacgactaaaatagtcatgtatgctaagtgtttcgtgcatatatgctaagtctaattaagacaacaatagtcaattgctacttgtcgcaccatttccgtagtaaataattatatactaagtctaatctcaaataaagtaatcttatattaaaactcaaataatattacatgctaagactaaaatagtcatgtctgctaagtgtttcgtgcgtacatgctaagtgtaattaagactacaatagtcaattgctacttgtcgcaccacttccgtagtcaataattatatactaagtctaattacaaataaagtaatcttatatatatattcaaataatattacatgctaagactaaaatagtcatgtatgctaagtgtttcgtgcgtatatgctaagtctaattaagactacaatagtcaattgctacttgtcgcaccacttccgtagtcaataattatatactaagtctaattacaaataaagtaatcttatatatatattcaaataatattagaacactacacaatcttatatgataagtctaattacaggtctaataatcttaattaattgcattacaaatataacaatcatttatattattacgtcacttgcctgctccaattccttctagggctagctcttccactcaggcttgacgacgactccgacaacacgtcttttctgcaagatacaaaaagatgtatatagtcaaatgcgaagtaacatatacatatatatatatatatatacatatatatatatatatacatatatatattatacatatatatatatatatatattgcatttcacgttaacgttcgtcatcgttcgttcgctcgttcacgttccctagatcgttcacgttcgttccctcgttctcacttgtcatcgttcgatcgttctcgttatcgctctcgttcgttcgatcgttctcgttctcgttcacgttctcgcggcaacatacattgacgtgttcgttctcgctctcgttcgttcgatcgttctcgttctcgttcacgttctcacggcaacgtacgttgacgtgttcgttctcgcttctcgttcgttcgatcgttctcgttctcgttcgttaatggcggtgtggcggcatcggggcgacggttggcgccgtggcgacggcggcggcgtggcgacggcgtgaagacgccggcggcgtggcgacggcgtggcgacggcggcgtggcgacgacggcggcgtggtgacggcgtggcgacggtggcgtggcgacggcggcggcggcggcgtggcgttgcggggccgtggcggcatcggggcggcggttggcgccgtggcgacgcgggcggcgtggcgacggcggcggcgtggccacggcgtggcgacggcggcgtggcgacggcggcggcgtggtgacggcgtggcgacggtggcgtggcgacggcggcggcggcggcgtggcgttgcggggccgtggcggcggcggcgtggcgtggcggcggcgacggagagagacggagagagatcgagctgagatcggagagatcgagagataaagggagatctggcggcggcggctctcaccccagagatgcggcggcagcggaggaggcggaggcggcggcgaggacgacgagctcgagacgacggcgagatacggcggcgtcggcgcggggatttgccctaggcagtggcggcgaaggagagaggccgagagagatcgatcggccgaaaacgtctaagtgttggtgaagaagacgcggcgcaccgggaatatatatacccccggatcttactcccggttgttctcaacaaccgggagtaaatatcttttcccgctatttcgaaattctttttaaacccggttagggttaagaaccgggactaaagattatagcactgcatatgattttcgcttacatatgtgtttataaaatagaagttaatgcattaacattatttaaagtactaaagattaatgacaattacttcgaaaaattatttttgtctgtaataaattaagtggataaatcgtaataagcaaatatatgacttataattaataaaaattccaatatatatatatatacttagcatatatatgaatgatattattatattggtaaaaactctaattaagatatgtatgtacatactgcatgatttaaaattaataaaaattgtaatcatcatatatacttagcgtaggaattatattaaattaaatgctaaaaactctaattaacatatgtaaatgccacatgcatgatttaaaccttttaaaaattcgaatagtcatatataagtagcatatgaaagatagtaaattaaattgtgaaaaactctaatatatgaatgatagttttaaaaatatattaaatttaatacttttaaaaattctccagtcaattataattagcatatgaatgatagtaaattaaatgttaaaaactctaattaacatataaaattgccacttgcgtgatttaaaacttttaaaaatcctctagtcaattataattagcatatgaatgctagtaaattaaatgttaaaacctctaatgaacgtacatatgaaattgccacctgtatgatttaaaacttttaaaaattgtaagtatcacatataactagcatatacatgattt

SEQ ID NO: 19392 - DNA, 515 bp, Oryza sativa
aagacttgcgttacatcattggcaagaacaaaaggtttgtccgagtatccaaccttgttaaggtcaacagttgtcatcccactgtcatcaatcattacgcctccaccagtcaacctaacccattggcaccggaacagaggaaccttgagaggaccatagtcaagttcccatatgtcctcgatggcaccgtaatacgtggcagttgttccatcgtgtcccatggcatcgacacgaacagcgctgttttggttcgtgctcttcatgtcttgggctctcgtgtagaatgtgtacccattgatctcatatccctggaatgtcgcgatcgacccagacggtcccctcgccaggaaggcaagttgttggttgatcgactcgttacccatgagatgttgtcgtagccacgcggggaaagtatcaatgtgatgccgtgtaatccatacatcggacttaccgatgttcctggcgcgaactagagccaagtgctcctcgatgtaaggagctaccaatgaagagtg

SEQ ID NO: 19393 - DNA, 13229 bp, Oryza sativa
tttttaccgtgaattggagaattgggtgatgttgtagctttgttgctgctggtcgtcgggcttcttgtgggacgggttgaaggcgacctgctcggcgcaatcgcggttgtcaccagagtggtcgcggacgacacccatgaggtcgaggttgtactggtagttggagataaaaatgttcatgtcgtcgatgtagcccttgccgtagatctggtttgcactaccaattcaaaattgcacttccttttccatgccaacaaaacacaggctaaaaactgataagatagttctaataacactaagaggggaaatccttgcattatataacctaattttcatcacattgctgatggaaaccaagtttctatgtgagtgtttaacaaagttgcaaaacacaacatgtactttccagtaagtctaaggtattgaattaattttctaagttgagagaacattacatccccatagtagcattataaccctaaccattataaatatgcgttaggtatttgagtatctgaaaagtcttatttgttacagcatggaatgggccaaaccatgattagaaaggaaaatcacaatatttatgtaaaaaccatttaaaaaatgaaactaaattagtataccaatttcaactaacctgttctgacagcagatgagtgtaacagggagtggcaatttgatagtgttgtgcatatatacaagtcaaaactccaatggaagtttgcacttacgatactctttaagatttgataaaaaaaaaggtgggctaaattggagggaatatttcttttaccttcatcattgttgttgtaagtacacctacccagctgccctcatcaaagtagaaatccttaatttaatttgtaagaaaacatgcttgctcacccatctgcaccgaaaacagaaattaccattcgtgagaccattagaaaaacacaaacggcttgtttgtcaacttaaggaaaggggattgggagtttacacgagggaattgacggtgagattaagatgggaatttgatttttcatcccagtctcttgtttggtagaggtggtggaaattgatagggaatttagttggagattagatcattaatgaaaacggatggctgagatttgtttatgtgaagtaaaggaggaattccctcccaattacctgcccctacccaggtattgaaaatgagggagttcattcctcaattccccatccctatcccacaaaaattcctatgtcccccaaccaaataaaacagttaatagcctcatccctctaaactcccaatccctcctaaaaactccctccaaccaaacagacagaaagatcagatcacatgttatagaggagtgcagattggaaggttttgaacaaagatgtattcagaaatacacatattctaacttgtatgatctagatctcctccacctagatcttcttctgtaaacatgttaataaagatttacaatctccaattatctttaggggaaataaagaaagaaaggtttggaacatgagaatcaccttggatttatgcacattcatgtatggtacggtcatgctcgttgttgcttgccagcttcttgcatccttgtagaattcgtcatgattcaacgccagtccaaatagatgcctggacgctcgattgcctcggcagtggaggggcacaggacgccaaccacatcaatatatggagccgacatggctgaggaagccgcagagctccaccatctgcatctgcttgcctcccatggtgcaaaagctgaagaactcgaagaggggcggcgacggtgacaaaggctcaacggtttggagtgcgggggaggcgcgagcggggtgactgctcggaggcggtgtgcggcgtaagtgatcgcggaggagggggtgggcggcggggtagggcgagcggtggaaaaggcggctgccgacggtgaccacggctctccggcgagcacgcgcgaggaggcgacgacggggacaccggctgtccggcgggcacgcgcgagcaggtggcggtgtagggtggccatcctgcagttgtccccgtagcattgtccggcggatgctggcggattgatttctggcgcagagaggcgcggacgcgagggggccgccggctggcggtgggtggcctggcggtttggagtgtgggcgaggtggccagcggggggaggcgaagggcgcccaacggcggtgagcgacctggtggggaggaggcgcagcaggatggcggccggagttggccccggcagttgcgattgggatgagactgtgaagaagtggatgaggggaaccggcgggctttgagcgaggaggcggcagggtagggcccgcgacggagccgcgcccggagccggcggcgacggccggctgcccggcgggtgcgcgcaggcgcgggaggcggcgaggcgcactaccgggaaagaggtttgaccaatcgctattttttttttgttgtttggcgttcttttttttatcggcctttttctcgtgcgcgacgtggtccgccgatagaggtggccaaacgggccgggccaaaacgggcggcccgaggcacggcggaacctgtagccggctcggcccggcacggcctgctacagtaacgggccgtgccggcacggcacgagtagccgtgccgtgcttgggccgccggccgagcccgcgggccggcacagcacggcacggctactgtagtaagtccgcatctcatccttccgcaagtccgtatctcatccctcccaactgacggccagcccgctagccgcctccgcaagtccgttgagcacccctcctagctgatggcccagcccgccagccacctccgcaagtccgcatcgcatccctccgcgccatttcggttcctgggccaaccgtgccccgtccacggcccatttttcattcacggcccgtactgacacggcgggccacacgcatgccgtgccggcacgggcacggcccggccatccacgggccgtgcttgggccggcggctcggcacgtgggtcgggacggcacggcccgtttcatgagccgtgcctaacgggccgtgccgaaacgggccgtgccggacccgtgcccgtgccgtgccgggccgggccgcccgtttggccacctctatccaccgatggcgcggtttgtttgagccggatgacaggtgggtcctatgtgatattggatctgaaggattgcaggattggggatgaacctgtactttttatattagtatagattactcttgtaatttgttgatgtttcaactgttaaagtttgatgtttcatctatgagaataatacatttcaatcatgattaaactgtgtttcaccatttaatagtctgaaatattttttatttagtagtgaaactttttcgagtagcggtaaaacatcacatgattgggagttggatttgtagtcaccgttagatatctattttcttgtttttccaagaaacaaaacgggaaatgccaaaacaccactgcagtgcagtcatccattccgaaaatgccggcaccatcaaattaggttactttttaatattagaaacatgtggataaaaaaattaataaaagagatgacaaaggaaaaaatatagaaaattaagataaaagaatagaaaactaagttaattgaaaaatcgttaaaatagttagaaataagtacaacacattaaaaatatgtttagtactttagaaaatcttctaaaaataattctgaacttctctttgttctcgccgccatatatctttgtagcttttgtgtagaaattactcataactccgaataagtgcatttaaaacttgttaaaatcgttagaaataagaagaattcataaaatgtgtaatgtcagttttgagtttaaatatgatgttttaaattatgatatgattatttaattagtttcacttttttggacttacttaacatttgtttattttatgtataggtggatcagcaatggatgtacaccacgggccaatggtcgaaagagtttcttgaaggcgtgcattattttttgagtgtgggcaatgttaacatgcataagggttttatatattgtccatacaaaaagtgcaaaaccagaagaagtattatacatcaagaactattcatgcccacttgtttgagtcggggttaggggcggcaatttcccccgtggggcatgggacccacccctacgggggcggggatgggtgctgatttcgacccgcgggaattcggggtcggggccctggccatgggcggggacgggggccggggaggatagccacccgcgggtgacccgcggagccccgagggtgtatattagactattaatactaccatattgcaagccaaaaagcccatctagcctatcatatataaaccaaaccctaaattccccaccctctacccatcctcctttcctcaccaacccagcagtcactctccacaaccaccagaccttcctcagttcctccggcggcggcatcggcagccaggcacgggcgacggcgtaccaatcataaatttggtaagcctggagtaatcatcggcttagagtcagcatcggcttcgaagtcctgagattagccgatgagagttatcaagtcgtcggttgttggattctttctatattcggttaaggaaattgatctactaaaggaaatttatccagaatagaccgagttcaaagagaatgcggcatggcaagttatctattaattaggaatagtttgttagtttcctttttaactttaggaaagtgtgtttagtgtcctataaggactttatgttttccttttatctttaggaaagtttctttcttgtcctacaaggactagtatctacccatgggtataaatatgtacacctggggtcattgtaaacgatctctcgatcaatacaattcgtctcatcgccacctgttaccttttctattttattttatcgtccggcgggacttggcacctgacgcggggctgcatcggtgttcgatctctggctaaggggtaagtccaatgtttcgccggcctaggcaattgtatcgtttacgttggcgtcgttcaaggctgcatcagtacattcgacctcttggattgctctggtttggatgatatatttgcctacctatttatcatatgtctctgttaatctagtcttagcatatcaatttagctctatcggctgcttctcgttttagggtttctgccggtatcggctaaatcgcattgctagattagattagcttagacatctaccaccctgaaaactcagtcaacggcttgattgtttagatattatgtttcttttcaatacttagtgttgcatcagttaagtttgatctactatgtcatgcttagagccataatctctagcctgcttcttgattgccaataagagtttcatcggggtttcagctggtgagttatctggacgttgcatcggctcataaggattgcatatacatataagttggatttagccgatgacaacaaaggtttcactgtttaatctaatcttgtggatttcatgacatcggacctccagccgatgtatactttaaccttcggatcagtgcttattctatcatatcaatgctcgccgattggtttatactggactatattattgttatattttattatcagtagccaattgcctatatatcattatttgctaaagtgtaagaatctacattggacgtatagccgattgctcaaaaccctatcgctatcggctggtatcggcatcggttattatcggctatctgctggaactactccatcggcttgtcaaccgatcggctgttttgtctactatttgcatatcttgtcagttgtaggatcaaactgactggcacgcccgcatctcaccaatctttggacctacacaggagctaagcagatctctcaggccggtgtgttcgattttttcatcaacacacgggcggtggcagcggctaggcgcgtgtgctggcggcgttggccaggcgggggtggcggcgtcagcggctaggtcacgggcagcggcggccaagtcatgggtagcggtggcggcggcggccaggcgccggcgacggcgtctgtggccagggcgcgggtggtggcgtcgacggcggcaacagccatccgcgggcggcagcggctcgcctcgtcgtcttccagctcgctgtcctcgtcgtcgtccagctcgctcagctgggtattgcggggccccgctcacccgctgggtcccctgcggggatgggggtgggtggcgttttccacccgaccacctctgcagggccggggtcggggggagaagtcggggagcggtggcgggggtgttctagcccaacccacccccgatccgccccgttgccaaccctagtcggggttcatgcgtagctataattgctggacctcacacggagagtttggggttgcaatggaagaagacgaagaagaagacgagaacattccggactaagctcaatgcggtggattttaagaaaatataacaggtgaggcagacggggctgttgaagataacgacgatgcggataatcttggtcagatgttgcacgacatacacaaggactgcaaaagtgaaaaggaggtccagaaattagagcgtatgtttgcggaccacaaagcgtcgttgtacccaggttgtgaacaggggcaaaaaagttgggtaccacgctgaaattcttgcaatggaaggccaaaaatggtgggagcgacaaggcatttggtgagttattgaaatttgtaaggaacattctttcggagggagatgaattgcccgaaacaacgtacgaagcaagaaggtagtctgccctctagaactggaagtacagaagatgcacgcatgtccgaacaattgtatcctctatcgtggtgaggagtacgagaacatgtgtcacgtccagaaattcccgaatagaattccaagcagaatgtgcattaaaatccccgtccaggaccagccgaggtacacaaacgacaatgttgaccttcagatccacgtcttacaaacatcataaaagtcttacagaaatgcagcggaaaacaaaagataactggagctaatccttgacttgaactgcagcgggaacaccactccacaggcatcctcgacggcacggacgaagcctactcctcggagaacccgccatcggacacatactcgagctctgagatcgggggaaaatagagcaagactgagtactacccactgtactcagcaagtcataccggaatgggggtatggtgcatggattcaacaagggatagctaagcaggttcatttgcataaatactggcatttataaacaggaattgaatacgaaaacagttgtaataattaagcagtattcagcatccactgtccaacgctacaccacgttgcaacaggcccaaccaaccacctataccatccaacttcattagactaactaatgtgagtctaatcacggtgaatctggttgaccgcccataaccgcgggcgcggctattcgaataggtttactctgatcagaggtgtacaactgtacccacaagacacagccccacgacacgtttccgtgcgccgacatgccaccacgacataccggaaagaggccgtgacaggacccttcgcataaccccctctagccaagcacaccacacctcaggtttcacccccgtccccagcgggcaacgggcagtcccctctcgtgcctaggtgaatccggaagcgacagaggccgtcgcagggcccgtcccgctccatcacgcccacccttgcctggatgcgtcgactagaggatagctacactacaagcccagccgttgcccacgctggcttgtagtaagtacgataaattcttccagggcatcccgcgaaccggtccttaactgccatgggtgcgaccagcaaaactatgcacccacagcccaccatgtgattcattttaattaaccaacaccaaagcggtgtcactaatccaacatgaccattagaactaacagtctaaacattaatatgattttccccattgtgaactagttgaactaagcatggctaagcaaaccctagtcctaactctaatcatgttataacccaagctaacaaaggagcatggtatcaaaatagcatggctgtaataataggtaaccatcccatagtaacattgcaaaacaaatgcggtatttgaaagaaaacattaggacatttgcaatataggatcaatatgatcaagtgacaagcatgacttgccttgctctgctgctggaggaacctcggcgactatctcaaagtacaccggagcgtcggatgaaacggaatctagcgacaaacaaagcaaacattgcaaacaggctataagactactgaaacagggaacaaaaccatttttaatggattctacacatttttcttgatttactgagacttgaatgggattaaacggagctcggatgaattagttatgaattttagaagattcactgtgtttattactataacaaaaatccttaaataatttattgcgcaatattaaccaggctgacgtcagcacgggggaagcggcgccgacatgcggggcccaccggtcagcgactcgggagagggaggaagggcgccggcacgcgggcccactggtcagcggctcgggagagggcggtctacggcggatcgggtccacggaccggggaggagcggcgcaccacgtggcggccgaaccgatggccccgatctacccacggagcggcagcgggagctcgcggccggggcgcgcgggcacggcgcaaaccggcccggcggccatggcgcgcgacggcgcggcgcgcttacgtgcagcggcgcaagacggcggccggcggtgaaggcgacggcgcaaaaggcgacgcgaaggcggctgcgctaagcggcggctaggaacgggagggaacgggcggcgataaaggcggccgccggcgcggctcggcatcaaagccgaccggccggctaggtctaacggcgacggcacgcggccgacgacggcggcgaccggcggcacgggaggcggcggcggcagtcgaaggcgacggcacacgacttgaagcggcggcgcggcactaagaggagaggaaggggaaaaaaaaaggggaaatgcctcaccgagggtggccggcgcggaggaagacgatggcgaacgacgacaacaagccacgggaggacgacgtcggctagcggacgagcttcggggtgccctaaggaaggagaagagagggattagagagagggagatgaaccacggcgatcggaaaccatggccgaaggcggcggtggaggtggtgctcacccgtgcgcgaggggatgagggctccggcgacgaacctcgacggaggaggggtggacggggtggatctcggccacgcgaacccgacggcggcgacggtgcagcctggcggcgaccctaccggcggctagcggcggccggagcagcgaaaaaaagcggcggcaaggggttgcacggcgcgggagcgatgggaggctcgagagagtgcggcgaaatggggaaaaagtgagaggggacggcggcgatgcttaaatagggggagagggaaccggacgtggccgagagaggcgggaatcgccggccgacgtgggggagtggggaggagagagagcgggattcgattttcgaatcccggccatctcgggcgcgggcgcgagcgggagagagaggggagtgggcgcgggaaacgcggcgcacgcgcgggcgtggtcgacgtggcccgggggaggcggagacgtgggcgcggcggcggtttcggcgcggcggcgcgccgggatcggcgggaggagggagacgggcccgacaggtgggccccacctgtcggcgaccccgagagaggaggcgggcggcctgggtgggcttcggcctgcggccggcccagcaaggaggagggaaggaaggaggggaatgggccggcggcccattcgaaaaaaaaggaggaaaaagggagggaaaagaaaaagaaaaaggaaaaaggattttccctggaattaaaaatattgcttgctcaattttaattggttaaaattatttctagagctctaaaaattccactaaaaatcctgttaatgaatttcgacatgtagaactcaagaaaaattccacatgtcaaatccgattattatttgcattactttcttagggttttctcctgatttcaccagcattttcttagggtcatttataaaaattacaattttggcttgggaggaaaacttcggggtgtgacaacatgcccgatttgtaaggcactacgacaaaaaattagacaagatgacccaggtgatgttgacggacaaccttcaaaaaagagagttccaactaagttgatgtgttatttccctataataccatggctgaggcgtttgttcaggaagaaagcgcatgctagaataatgcgttggcacgcagaaaaacatcaacaagacaggatgctgagacaccccaccaatgggttgcagtggcaaaacatcgacagaacatttgaagactttggagaggatacacgaaacatagggttcggtttaagtacggatggcatgaatccattgggagagataagcagcggtcatagcacttggcctataaccatatatatctacagcttccccccttgattatgcatgaagcggaagtacatcatgatgccaattattattcaaggtccaaagcaacctggaaacgatattgatgtgtagctaagaccattggttgaaaatctgaaactgttgtgaagaaagaaggtgcccccgtgtggaacgaggacaaataagattggcctacgagcgttgctgaccattaacgattggcctgcacttagcaacctatccggacagtcaaataatcggtacaaggcttgcacgcactgtatggatgaaactaaaagtacgtatttataacattgtaggaaggttgtttatatgggccgtcatcgattccttattgcaagccaccttgtccggaagaaagcaagcatttcgaatagaaggcagaccaacgtactaagcctaagcatcggaacggaaaaaccgtgtttgctctggtgaaagatctgagagtactatttagaaagggacctggcagccaaccaatagtgagtgaagacggtcacgcggcgatgtagaagaagaagtctattttttagaagataccctgttgggaagtcttgcacctcactaagagcctttacgtcaacctggtaggcttcctaggtttatatgggaagtcgtaagatgcactaaaagcacgtaatgatctcaagcatatgaaacaatgcgacgaccttcattcggaaccgaaggagaaaagaagccattacttgcgtccagccaactacaccctgagcaaggtagagaaggaaagtatgtttgaatgcttgaagagtattaaggtaccgtttggatactccagaacgcaattttgcagaagatcattgatccagacagtttaatagcgtggtgcaatgtcttgtcagctttgagataatctttccaccatcattcttcaatataatgacgcatcttctatgtcaccttgtgaaagagattggtattctcggtcctacatacctacccaacatgtttcctttcaagaggtacatgggcgttcgaaagaagtacattcataatcgttctcgtccggaagcaagcatcgccaaggggtatggaacaggggagggcattgagttttgcgtagaatttattgaagacctttgtccaatcagggtctctgaatcaagtcatgaggggagactgcggggaaatatgactcttggaaggaaaacaataatgaatgtagacaacgatttatttcgtaaagcgcatttcacggttttgcaacaatcttcattggtggctccttaaatcgaggagcacttggcgattgttcgctccaaaaacatcggaaagtccgatgcatgtattacacgccatcacattgatactttccccgcttggcagcgacaacatctcatatgtaacgagacgattgaccaacacctagccttcttggcgagaggactatcttactcaattttgacattgcagggatatgaaatcaatgggtatacgattgaatacattttgcatacggccccttaagagcatctccagcaaagcacctaaactaagcccccaatgagtctaaactaagcccccaatgagttttgagtgaaggaagaaaaataaaggtatagcagggcccctattaaaggcccccaaaataggaaggcacccaaatttctccttcactaaagtatatcaggcactaatcatgtacaagtgtcctaaatttcttcagaatgactaactgtttgtattgagtcgttaatactgcagaaccaatacatatatgctaaataaatacacgttataaacagtataatcttggttgcccacaccatatttacatgtttgaaaactttgatttttaatttgaattgtgcacttcgaaattgtgaatttaagtatggttaaattatatgcgttagaaatattcatgtttaaattattgtggtgttaaacgtagtgtaaatatggattgtattttaaaatacaagagaaacatgaatagaggcttaaaaaataagggctactgctggagttggaggcatttttttgggtctttgaaaaatgggggcagccctcatttaagtggggcttcaaaataaggcctattgttagatatgctctaagagcaaaaatagatttttacatacgggtcacttaaaggagccgcatacgaaaatggagaacgattttagcaagcgattagttacggtctgtctgaaatctattgggcccctcgtatagaaaaatcaaaatcgtttttacagtagtgataagatcagaagactctcaccttgatttaatctgctacgttaatcatcattactcgtgaaggcaagttcgcaagggccaagggcgctagggcaaggtgtggatgcagcgcgcgtgggcgtcagtgtcaccggtttgctgggtcgcgccatcgtcgtccactggtggagaaaccatctttggtcggtcgcccgaaatccacaattgtcccggttccattaacacggacaagcaatatcgtgtttagtcccgttggaggatccggaaggaagatttgatctttagtcccggttggtgttaccaaccgggactaaagatccgtgggatctttagtcccggttggtaacaccaaccgggactaaagatggatctttactcccggttgataatatcaac

SEQ ID NO: 19394 - DNA, 3593 bp, Oryza sativa
ctgcacccctgatctgtgaatgaatctatgaatcgatattgtgaatgaatctgtgatgttgtgaatgagtatgtggctcgatgttgtcaatgaacctttgaatcaatattgtgaatatatttgtgatgttgtgaatgaatatgtgaatggatattgtgaatgaatttgtggtgaatctgtgaatcgtgctgtggagttgtgatgtggatttggggtttgatttgatgatatgcataccactcgattcgggagaaaataaaaaagaaaaaaggactagctgatggactgccgctaccctctctttagtcccggttgatgacaccaaccggacatcaaccgggactaaagatcgatctttagtcccggttttttcacccgggactaaagatagcgatctttagtcccggtttgaaaaccgggactatagggggttacgaaccgggactaaaaagcacttctccaccagtggtcgttcctggtggttcgttggtgagtcctcgtgaagacgtgagataaaacagtctaacagagagcgaggttagaagcgagaagacgaaacgtacgttgcgttacactgcaccctcgacgcctcgatcaactgagtctcgactcgagatcgatgatagccgcggacctccctgacccctgtttctgacatactccctccgtttcaggttacaagacactttagctttagtcaaaatcaaattgttttaaatttggttaagtttgaagaaaaaacaataacattttcaacccaagacaaatttattatgaaaatatattcaattattgatttaatgcaattaacttgatattataaatattactatacttgtctataagtttagtcaaatttaaaatgctttaaatttgaccaaagttaaaaacgtcttaaaaacctaaaacggaaggagtagtaggctagcttgtaaattctgacatagtatgacacaacacgttaatatatattgtaagtacttccaccgatcttgaaatatatatggtaacttttgtgtatgtatatattttggccttttcggtcgattaggacggtgggcagggttgaggtttatagcagctcggcggggggctactagtgcagcacgacgggtgcacggataaggaacgccgatttggagttgtcgcgccgtcttgttggcgaggcatggagaggcaggagagactggagtcgggcaccgccgcctcgttccgggccacgccgtaggcgatcatcaggaggagcaccgccgccagaaccatcgcttccggcgcccgctgctgcgcagccactcctcgtcttttcaacatcgaacgcaggctcaccggcgagaacttgtgaacgaactccggcgtggcgccggccggtcgtccagtctgatttcttggctagaggtgcttattactggctagcactactctctctggtcattagtttgctacttatatatagaccctccggtatacatatataatgccggaccagctgctgcccggtttactggtctcgatccacaccaccatagcgtgacttttcttggttctagaaagattatgaccctgtttagatgggactaaaacttttaagtccctatcacatcagatgtttagacactaattataaatattaaacatgaactattaataaaacacatccataatcttggactaattcgcgagacgaatctattaagtctaattaatttatgattagcctatgtgatgctacagtaaatattctctaattatggattaattaggcttaaaaaatttgtctcgcaaattagctttcatttatgtaattagttctgtaagtagtctatatttaatactcgaaattagtgtcgaaatacagagactaaagttaagtccctagatcgaaacaccaccgtatactccctccatcccataatataaaggattttgagtttttgtttgtactgtttgaccactcgttttattcaaaaaattttggaattattttttttgacttactttattattcaatgtactttaagcacaacttttcgtttttatatttgcataaattttctgaataagacgagtggtcaaaaatgtaagaaaaactcaaaatcccttatattataggaagaagggagtactaataaaatttacctaattataaggtgacgaagaaacatccgcttgattcctttgatgtgataaacatgtacagccaaaacccaaccggtagaattttctacggctagttgtctctttttgtgtgactagcaggctgggtcgaagattgatggaatgtgaggttcatggaaagcccaaggtatacacgccagaacaaatgaacgattgaatggtgtgcatgcacgctatcctctatccattgtgcacctaatataatgcgtagtcatatttaacattatcttcaaaactaatattggacttcttagtttcttaaataatacgatatttgtatgaacaaaactacaacaatagaaaagtaaatttgagtcaattcagtgatattatttattaatattagactaatcattgatcaaaattcagatttaaatattaaaatacgtacacgccttaactatataaaaaagcgagtacattaatctccaatgagagctagtgtctgacgacgacccttcaacgcatcaaattaaatgaatgcaccttttaaatttctttttagtatgcgtgccaatatagtacatatattctaaattttcctttatcttgggaataagaaataccatatttttagggatggttgaaattgcagcatatggcaggccttgacggcggaggctactataaatcggacatccgatctattgcaaaagatcagatgcccacgtcagcatgacgtcatcaagcatgcatgcatgcaaaactattttaaaatatttttttctcttaaattatttatccaaatcatgatccgattacacgattaaattcgttgtaattaaatatttaaaacaagaccacacatggatatattccgatgaaaaaactagcttattattgaatcatttttaaatgttgcacgttgttccactaagtatatcagaattgtttcactaggtagataaaaaatgtttcaatcttttaagtcgagcgttgttttaccttatatgaaaacaatgtttcagcaaatagcgaaagaatgtttcaagtaactgcaatatttcatccatacaaagtgaaacattataagtacactaggtcaaacatttttggtggaacaacaaatgaacgaattcccttaatagagggtttccatcatatgtgggtgatttgttgcaaaaaaaatatttcaattcactgcaacattagatctatacatagtgaaacattgtgagtacactaggtgaaacatttttagtggaacaaaagaaatgaaacgaattcccttaatagagggtttccaaaatatgcaggtggttttcaaaatagcagccaacctcctttcgggcagctgtgagtggcatgcagcttgccagcttaaccggcgaaaaagaatgcaactgaaaggaaaagaaaggaaggagggaagagaaaacgggttttttcgggggggggggggtcatagtgacgctggc

SEQ ID NO: 19395 - DNA, 4340 bp, Oryza sativa
gtgagatcgccctttttgtgagttcggtcgggggaaagagcttgcctctagagatcgcgtatccgcccttaatgctactaagtcacgtatgagcgacaagattatacatgttcgggccgctatggagcgtaatacctactcctgtgtgtgggattaaggttgagtgttacaaaggctcctaaactccggagagggctctcgctcttcttctcctaaagttcaggcttgctgagagtcgtcccttttttcggtgggcaaggtcctccttttatagctcaaggggataccacatgcaccgcctctacctactttttcatgggagggggacccacttcaccttgtccgtgccacgatccgcgccttcgctcggaagctaagcagcagcctgtccttgagcgcgacccagcgccgcccctcgcctgacacgagggacaaccctgccatcccctcataaatgggtgaagacttgtggtggtcctcctctcgtggagggagctccgaatgacgctccgatgggacgggtcatacctacctccactccaccggatacagaggcgacgtgggggcacggccgcctgtccaatcggtcttgaccggcgatgggccggtcacatacttggtcagtcctgactgacgtgcgtcagtcaaatggcactgcaagtctgcccctaccgcattaaatgcggtgaggggcagttggggcgccgcgcgcattgatagcggttcagcctgggtcccctccccgctcgctccccctaccacatggcagttgggcgagggcctcggggcaaggcagcgcgagggcccgaggggcatgacgtggcaccccgagccccccctcctcggccacttctgcaattcgtgaggcgtgggggtagggccaggctgtagggccacgtggctggatgggccactttgcatacccctgggcccatatctccgacaccctttatcctaaattgtactcctatttttttgaatggacatgattgtcgacgtttgatgtctcgactacggtatttggacagtatggggatcgtcggtgctaggatatacgcgagactgaggtaaaagagatggagacaggaatttttatacaggttcgggcccctgagtggtcaggtaataaccctacatcctgttggccggagccggagttgcttttatttaccataaccacaccagtacaatatgtggggtagcctatctaactgttgtcgacatgtcggtctgaaggtctgactcgtagtcgacaacagggtagtcttcctcctcgaatccgtgcccggcgagatcagagatagcgctttcgtatctcctgacggtatccggaggaatcgtaggggaatagccatgcctatcctgaagtcgatatccggcggcatgtcttggcgtatgttggcttgtatgttgtggcttctggtgggcgtgtgttgattgtcatgggtgtcttccatggtctcgtggtggtcatcgatgaggtggtcatcccgatcgtggtgatcgtgttggtcgtctcatggtgagtctgtctgtccccctgtcctcctaggggggcttgtatttatacccataggtattgtcacgccctgaagttttcccccctttgcttgctttaaaaattggctaaataaatcgtccgaagaaattatcttaattaacctagagctaattccctaattaataaatgcaaataataatcggaatcggcatgtggaatttttcttggattctacatgtcaaataatgctaacaggatttttagtggaattttcagagccttggaaataatttttatcaattaaaaatcaccaaagtgcaattttaatcccaggaaaatcctttcttcttttctttttcctttttcctccttttttcctcttcttgggccgtcggcccagtccacccgtcgcccgcgctcggcctccccttgtgggccggcccgttctccttccccctctctccgggacgctgacaggtggggcccacctgtcaggtcgtccccttcctccagccacccgcctccaacggcaaccgccgccgaatccgccacgccgccgcctcctccgctctttccgcgcccacgccgcgccgctcccgcgtcctccccacgtcgccgcctcttcccccgcatctcccggcccgcgcgcgcgctcgagagggcgggattcgagttcgaatcccacccctctttctctctctcctccccacgtcgccggctaaatcgggagggttcccggccacgtcctcccctccctcgcccattaaatcactctcccgagctccctctctcgtttcccccatttgccgtcccctcccgtgcctcctaccgagcccgcgccgctcgccgctagcgccgccgcttgccgccgcctccggccgcacgctgccgtcgctagagccgtcgccacgccgcgcaatcaccgccgctagcttcgccgccgcgagagctacctcggccgccgcttcgttgccgcgaatcaccgccggagcgccgtctccctcgcgccgccggtgagctcgccatggtttccatctccggccatttctcctcgccgtgccgcggctcctctcttctccctaacccggtcatcgcctttcccaggttgtgctcgaccccgtccgccgttgtcggaagcgccggccgccgctcgtctcttcccacgccggtcaccgccatcgcctcggtgaggaatcccctctcctccttcctttcctctctctcccatgagcgccgccgccctccgcgcgtgcgccgtcgccttcgtctgccgccgccggtctgtgcgccgtccgccgccgcctcccgcgccgtcgcttgccgttgccggcgctcgcgcgccgccgccggtcatcgccggtgaccgcgcgtgtcaccaccggccgccatggctgccggtcggctttgaagccgagccgtgcctagccggctcccccgcgccgtccgatcgcctttgaggccgatccggaccgtcggtcctgtggaccggcggtggaccacccgcgtggtcccggtacacggtggaccggccaccttgtgccgctgacccatggggcccgcttgccagccgccccctctccctctcttagtgccgctgaccagtggggcccgcatgtcggtgccgccccaccccttgctgacgtcagccctggggcaatattgcgcaataattaattaaggacttttctttattagtaaaaacacagtttatcttctaaaattcataagtaattcatccgagctccgtttaagtccattcaagtctcagtaaatcaagaaaatgcaaagaatccattaaaaatggttttgtttcctgtttctgtagtcttatagcatgttttgcttgtgtgctttgtttgtcgcgtaggtttcggccgtttcgtcgatccacggtttctcgaagacgttgctgaggtctcgtcagtgcgagagcaaggcaagtcatgcaatacgtttgatcatattgtacccaatttacaaatatcccgcatttctattaaatgttgcatccttttacaatgtcatgtgggatgggtcctaatactcagccatttattgtttaccttatgccattgataacttgggtatcaaaatgactagatgttggtttaggaaatgcttagccatgcttagttcaactagcacacacatggggatcacattattacatagactttgactatgagcatagctttggattggtgccaccgcaatggtgttagttaattaaaatacattgaatggtgggctgtgggtgcatggttttgctggtccacccatggcagttaaggaccggttcacgggaaaccctgggagacttaccgtgcttaccacaagcgggagtgggtaactgcttgatctgaagtatagctcgaccctttcctaggcaccggtggcgagggtgggcgtgatggagttgggtcggccggggtgtccggttgtccagctgccggattcaccgcggcgcaagaggggaccgcccactgccttttgaggggtgggggtgaaaccttagcgtggtgtggatggttaggggagggttatgtggagggtcttgtcacgatttccccctttgcagtatcatggtgatacttcggggcatggcgacatgtgtggaatcgtgtcttgtgggtacagttgtacacctctggccagagtaaaactattcgaatagccgtgcccgcggttatgggcgatcaaccagattcaccgtgattagtctcacccctagtttagcttaatgaactggtgtagttcaggtggttggttgggcctgttgcaacgtggtgtagcgttggacagtgattggttaatattgattaattactacagctgttta

SEQ ID NO: 19396 - DNA, 633 bp, Oryza sativa
ggaattctcttctttgttagctgcccgtcaacttctcctggatcgtcccgtctaatcttgtatcgtagtgctttgcaaacagggcatgcttctaggttctcgtactcctcaccgcgatataggatacaatcgttcggacatgcgtgaatcttatgaacttccagtcctaacgggcagactatcttcttagcctcgtacgttgtctcgggcaatttgtttccccccggaagaatgttcttgacgagtttcaataaatcgccaaatgccttgtcactaaccccattttttgccttccattgcaacaactccagagtggtatccaactttttgtgcccctgctcgcaacctgggtacaacgaagttctgtggtcctccaacatcttgtccaatttatgggcctccttttcactttcgcagtcctccctggcgtcctgcaacatttgaccaagatcatccgcaacgtcgttaccatcagcagctatttcctcctcgcccgtttgatttccttcaaatccaacaaattgagcaaagtccggaatattgtcgtcttccacttcatcttcttccatttcaacaccttgctctccgtgggatgtccaacaattatagcttggcatgaaccccgactcaaac

SEQ ID NO: 19397 - DNA, 9756 bp, Oryza sativa
acaggaagcagcaagcctgagagggaaccatgttatagaatggcagaatattttgtcagtcactcttgatcactctagcaacagtcagaaagagtagtatgaatagtgatgtatgaattaaataaaggatgattatgttaccatggaaggataatactatggacaatgtaattaagcaacaaagcaggcaatattgtatccatgaaaagatatgtttacatttgagagctatctaatactgttgcctatcaacttgtctttcagatatttttacaaggaatctagtgtttttcaacttgttgcagatcaaggcgtgcaagtgaacttaatttgtttccttgtttgcatagtttttcacctatggatttattaaaaagagataattgcttatttgacgctcttttgtgttggaaatatagtcattaattggcatgttttaatccaaaaagttaaagcaataatcatggacaatcaaaacaaagacttttctaaactggacagtgggagtacatgtataagtgcaagtagatgtacctgtattttgtgtgccatagatcagtacgtagaaaacaaacccaacccagccgtacgttcttcaacatgcgatctgcttaccatctgatgcctctgctagccatgctactcatcctcgtccttgctgaccatacaagctccacggaagcagtagcaccggctgcgtgcctcccagaccaggcagcggcgctgctccagctgaaacgctccttcaacgccaccatcggtgactactctgccgccttccggtcatgggttgccgttgccggcgcagactgttgcagctgggacggcgtccggtgcggcggcgccggcggccgtgtcacctcgctcgacctgagccaccgtgatttgcaagccgcctcaggtcttgacgacgcactcttcagcctaacctcgctagaataccttgacctctcttccaacgacttcggcaagtcccagatgccagccacagggttcgagaagctcaccgggctcacccatcttgacctctccaacacaaacttcgccggcctggtacctgccggcatcggccgcctcaccagactctcctaccttgacctgtcgacaacattttttgtagaggagttggacgacgagtacagcatcacgtactactactcggacacaatggcacagctctcggagtcgagcttggagaccttgctcgcaaacctcaccaacctggaggagcttcgcctgggcatggtggtggtgaagaacatgtcgagcaacggcactgcacggtggtgcgacgccatggccaggtcctccccgaagctgagggtcattagcatgccgtactgctcactctccggtcccatttgccactcactctcagccttgcgatcacttgcagtgatagagctgcactacaatcatttatctggtccagttcctgggttcttggctactctctccaacctaagtgtccttcagctttcaaacaacaagtttgagggatggttccctcccatcatcttccagcacgagaaattaacaactattaacctcaccaaaaatcttggaatctccggaaatttgcctaatttctcaggtgagagtgtcttacagagtatatctgtcagcaacaccaacttctccggcacaattccaagttctatcagcaacctcaaatctctgaagaagttggctcttggagctagtggtttctctggagtgctgccatcctccatcggtaagatgaaatccttatctttactagaggtgtctgggttagatctagtaggatccataccatcatggatctcaaacctgacttctcttaatgttctcaagttcttcacttgtggattgtctggacccataccatcgtccatagggtacttaacaaaattgacaaaattggcactgtacaattgccagttttcaggcgagataccttcactgatcttaaatttgactaaattggaaaccctcctgctccattcaaacagttttgtcgggatagtggaactaacctcatactcaaaactgcaaaacctgtatgtcctgaatctttcaaacaataaactaattgtgatagatggagaaaataattcttctctagtgtcatatcccagtattagcttcttacgtctcgcatcttgcagcatatctagctttcctaacatcttgaggcatctcccttatattactagtcttgacctttcatataaccagatccaaggtgcaatacctcagtggacatgggagacatggacgatgaactttttcttgttgaacctatcacataataactttacgagtattggatccaatcctttacttcccctttacattgaatactttgatctcagtttcaacaattttgatggagcaataccagtaccacaacaaggaagtatcacacttgattactcaaccaaccgattctcatctatgcctatgcctcttaatttctctacttaccttatgaatacagtaattttcaaggtctccagaaatagcctctctggatacattccaccaacgatttgtgatgcaattaagagtttacaaattattgatctctcttataacaacttgactggatcaataccatcatgtctgatggaggatgtaggtgcactacaagtcttaaatctaaaaggaaataagcttgatggcgagttgcctgataatatcaaagaaggttgtgcattaagtgcattggattttagcgacaatctgattcaaggacagctacccagatctctagttgcttgcaggaatctggagatccttgacattggaaacaatcagattagtgattccttcccttgttggatgagtaaacttcctgtgcttcgagtcctggtcctccagtctaacaagttcattgggcaggtactggatccttcatatactagatacgggaataactgtcaatttacaagtttgcggattgccgacatagcctcaaacaacttcagtggcacgttgccagaagagtggtttaagatgcttaggtctatgatgtccagctctgataatggaacttcagtcatggaacatctctatccccgggagagggtacaagtttactgttgcagtcacatacaaaggcagtcacatgacattttccaagattttaacgtcacttgtactcatcgatgtctcaaacaataaattccatggtaacatccctgccggcattgaagaaacttgtgttacttcatgggctcaacatgtctcataacgtccttacaggaccaattcccactcaatttggcaaattagacaaccttgagacattagacctctcctcgaataagctttctggtgagatcccgcaggagctggcatcattgaacttcctttcaatattgaatttgtcttataatatgttggatggaaaaataccacaatcattacacttctccacattttccaatgactcttttgtggggaatattgggttgtgtggacctccgttgtctaaacaatgcggttatccaactgaaccaaacatgatgtcacacactgctgagaagaattccatagatgttctactctttctcttcacagcattggggtttggtatctgtttcggaattacaattctagtgatatggggaggccacaacaggaaacaaccttgtgagagagcaattttatacattggcagaatagtttggtagtgactcttggtcaacccagcaacatttagtaaactaatattaataatgaggcatgtatgagctaaataaagaagtgatatgttatcactgatatgtggttgttctaatttaagcaacaaagcagacagcattgtatgcatgaaaaagataattatgtctgagagctatgtagttctcaattgcagcatatttcacggcctccaagcacgcttagtatgacaagtgggctgcctagtcaaaaacctcagggtctaatggagttgcaattctctgataattccattcgttattgttgtagctaagtgaaatgtgtcgctaatgttgtagcaagatgatagttgtcattaaaattgcagctttttcaaacttattctttacaggtttcatattttgtatatgctgagctaacaaaaaaagtcacactgcagttcattagtttgggcaaataccctcacacgttctaggccatccgaactttacatatgtggtgtcattattttgaaataatgaatatagaaaaaggcataactactttttccttaaaagaaataaatcatgcagatggctcagtcccttcaacacgatcgttatattgaccatctgaggtaagacacaaactatttgtacatctacaaggttatatggttattaatgtaggagaacagtacctcttcggctctgtcatttcgtcgaacggttggcgggcgaaatcaatcaatgttgcagactacctttacacgcaccgaactaatcacggattcttctctaataaaactaattacatattctgatgctggaagatttctagtcacggggttaattactgcgatcgaactctaactgggattgcatacgaggaagaggaaaaatctggcggaaggcagcaagcaaaaggaattgaggattacctgaatggaaaaatcgctgccggaataccggagacaattcgtcgaggaggagacaaaagaagcgaagtcccgccggccgccgccgccgccgccaccgccaccgccggtcgccgccgccgctggcgttgcgtgtctgctcggttgaaattagttaggctggcacctgtaacgtgcatccaccgcccaagttttagatccaacggttcatgatctgtcacccgaatcaacgttaccaaacaattttgccaatgctatcttatcaaaactttggtagtttcgaaatttttatttcacaaaaataatattaaaatttgaaattgcaacaaactatacacatccagcgctaccaaaaaatggcaacgccaaaattgatttattaagaagttttccattttatattgtgctaaaatataaggatttctaccatccacagtactacttttctcatcaatcaccttatctctttttttctataaagctaatgcctactaaacacctaaatctcaacatacaacatactccctctatcccataatataagacatggtcaaagttgacatggtctccaaaactaatttttagcttataatttttcatatactaccaagtttataacaacaaaattataaccatatgaaagtaaatttaaatctcaatctaatgatataaattttaataaacaaaattcattttatattatactaagtgttggtaaaatgttttagaggttgaatattgaaatatgtgcacgtcttatattataggatggagggagtagtatttattagcattcctaaaatcaacatacgagcatgccacatcaacccactaagcacacaaagtttaacatacaagcaaacataatctacaacttatttaattctaaaactaaacatacacatgctaaatcatcattatcaaattattttcacaatatttcaatccaaaatcatttaatcatttctacaatatctcacatatatcccgcggcagagcacggttaatcatctaatatttaaaattcttctcattttatctctacctaccttcctacccccacatatctcttattaagggatattagagccttttcaaccttcatccatgctctttatattttaaaacaaactgacgtggttacatccatcgtatatccttgggatctgtccagatcggtgctattttaaaccatatattattgtttggtagaattataaatatataaaggcatttagtttgttatcaaatacgctgtccagattcgtagtattagaatacgtcacatcgacccaaaatcccttataatatgggacggatggagtattggtcagtctagagaatttaacaaatcacatttagtctattgtactaaaatttaataatgttggtaatttatcaaaattttggcaatgccaaattttaaaaagatgaaaatatctataaactgaactttcatccactgagaacacgctttcactataggaatatccgaagaattttcagggagatgccaaccgtctcccctttctacaaacacgagacgctttcactagcttttcaatatttgtcacatcaacaagtgtgaacacttagaatatgtaacaataaaccgtggtatcttctggagaatagtaacaaaatcgtttgcctctggagtcaagggctcaaggctgtaacatcgaagtgcttgtcaagaaagaaaaataaaccatagcactgatgatgatgagggcgacggatcggagaccacagctgccggcggatatacgagtgggcgctagaaccctgctccaagacccgaatattcatcgaaattatacttcaaaattttaagaaatagaacataaaatataaattttacgtagattatactatttaaactttagtcttgacaaaattctagctccgctgcacgcgcatgtcctcctccgtatccaactcaatatatgctatggtgcccactacagcatcgttaagtcgctatatatgcttcctatcttattaattttcttgtcagtatagtcgaataaagtattattttttatatgttgtatctaagacactactaaaaaatcctcatagggatcagtcttataggtgccggttcctttaaaaccgatacctataggccttttctcacctccacacgtggaaaaaaaaagaaccggcacctttaagacactataggtgcaggttcattagtaaaaagcggtaccaatactatatgtgtcagttttttaaaagaaccgacacatatgatatattataggtgccggtttattaaaaaaccgacatgtataatatgttataggtgccggttattttaccggcacctatacaaaacgacccgagcagacgagccgagcgccgtatgtcatccttatctactgccacccacgtcgtcgtgtccttatccacttgctctcgcaactcctctccctctcgcgtctctctgactctctccctctcgcgtctctctaaagacggagactacccggcggtggcggcggcctcccgaggcgggcggatgcccggcggaagcagcggctgcggcgccctcccctccgcccgatctagcgggaggggaggtggcggtctcccgcagctgtccggcggtggcggcgtgctcccgaggccagcggctgcccggaggtggtggtggctgccgcaccctcccctctgccagatccggtggaaggggaggcggcagtctcccgcggcccgacaaaggcggcagcggcagcggcgctcctccaccaccgccatcccggtgacccaagggcctcatagccgccgcatcatcctcaaggccgctgtggttcgagtgtgttcttttctctcaagttctcttgttcatatgtgtaccgagaatatgcggatttggatcggatgaatattatagttaaatggatgtaggaattgttgttgttattgacgtgttccttggattttgattttcgatgtgtggatattgttctgggatgtggaggggatcacgggatgtggaggttttttttttttttggctcgtgcagacgtaaaggtgccggttctattttacctattggtgccggtgctagcaataggtgccgaccaattggagccggacgggaaaccggtacctattgccagttcccaaccggcgccaataggttttttttactagcgacataatcagaccaatggaagttatttccgtggttattttcggttgttgccaatacaatacagaatcctctttgatcattattacgtgatatttatgataaaatctaataaaactttagaagcattaaccataatatattcgaattttaaaacaagaaaaatggtatggataaatttgctttgcaaaatacaatcataatatcataaagttttatagattttgtatttttattttaatataaattgatggtcaaagatttaaaagtttagccgaatattatttcaaacatcaaatatttatcaccggatatagtaccgactcataatattcttattgtctaggtctctctaacttgaggaagatcctcaccacagatacagaggtgcgcatcctatatatataccacaagaaaaaaaaatgaaggctaacctcaacttcatttggcagataaaaggaaaaataagtgcttagtaaacactgacaacatcaatgaagttgaggtttactccctccgtttcatattataagtcgctttgactctcttcctagtcaatttatttaaagtttacctaagcttataaaaaacataataacatttccaacataagacatatatatatatatattaccaaaatatattcaatgttatattaataaaattaatttagggttatagatgttgctaaattttatagaaatttagtcttaaaagaagtttgattaggaataaaataaaaatgacttataatatgaaacagatggatagattagttaatttcaaaattttgcatgcacatagagcgagttcacacccctacatccattagagcattgtaaatttctaggcctaatgaaaatatatgaaatttgcaaaacttctactatcatttttttttcatatcagtactagtatcatttaatttgacatgatatatatgacccaatataaaacgctgcagctctggttatggccctcactccgtcgagactcgaggcaaatcatgggaaaatcatgggcttaaagtgaattaaagtgattaaatccggtgaattaagtgaaattgaaagggaaatcatgggaaaaatgatgagagagtagtagggaatcgatttctataatcatttataggagggaatacataacgaggtatatcaacgtggcggcagtgctaaggctcagcccagagacaaaacaaaacaggcagataaacaaatcccttatcgcctgcgagaaaacgtaacataaaaaatagcgacgacagaaaaagatgaaaaaaaatggagaaaaagcaaaaaaattggaccgaagaaaagaaaattatagtggatggaaaaaaaaaggcgacgaaaaaatgtggacggtgaaaaatagaaaaaatggcgaaaaaaaggtggacgaaaaaagggaaaaagcgtacaaaataaagaaaaatggtgaaaaagggacggaaaaaaagaaaaaaaaaggacagacgaaaaaacctgaagccatacttattttttttattaggtatatgacggagctcgtggctcctcaccgggagaccgcgcaggcccccctttgccggttcggccgggggcttagggtgcaatctcaagctctctctgtatgtggaaagattactcgccggcaagacacacgagacacggcgatgtatacaggttcgggccgctgccaagcgtaataccctactcctgtgtttttgtggatttgtgtatgaatgagctacaaagtgtcagcccccttctcccctgttctaagctcttaatctcgaaaagaatcaacccacctttctatgggcaaggtcctccttttatacttcaaggggataccacatgcacccttctctttccaaactggactgttcttttctttatggacggagatcggtatggttgctgtccaaacgacacttcgatgggacagcttacacctaccttcactcccggcggagacgggcgcaacgtgagatcgtggctgcccgttgctgatgcgacca

SEQ ID NO: 19398 - DNA, 16546 bp, Oryza sativa
  unsure (1)..(16546): unsure at all n locations
ccctgctgtactgcgttgtacgcagcgtgacacgcttgaccagactgcaataaatgctgttagtgagcacagctgtgctcacttatcccatatatgtggcgcagacttctttaaggggtcggggtgcctcggccctcggggccggggcaagcgcaacccgaccccccccctcgggggaaatcacgaggagggcggacacctcaccctcgggcccgacgtccccgaaggtgccaggccacgtgggcgattgcgtctgcctcaagcctctggtcatgatactcccggtcccatatcaccgacagtagcccccggcgttatgccagagcaatctcccttcccaagggaagcggtcaggtgtgacgccacccctaaagcctagtgacaggtgggaccggtctccgtagttgggcaaaatacccaacggtctcaatccatgcacattggtattggtaactttggttgtccatactgggcggtctattcaagactgccacatcacttgagcagcgcgcgaatctgggtgagcagatttgtttcgctcggagatacggtaacgccgcttcggtcggcgagcgtaattaacgcgcgcacgatacaatccgtttcgattgccacaaccgcatatccacttcacgcgccgtaaacgggcgaatgggattagtggaagcgtgggtgcgggaaacgagggagcgagatagcgagatacgagggagcgaagtagtgggcgcgagaaacgaggagccaggcccagcgatggcaagggtataaaagcatcgagaaaaggatttgctcccttcctttcgccattgttcctcttgcctttgccgcttaagctctaactctttccctgctacgccctactttcgccacacacgctcgttcccaatcatctcttcctccaccgccatggcacggggctctgctctgctcgacggcagtgtgctgccgccttcccgcatcgtgaacgagaggcacgccggactgccgcgccgcttcatgccggagtccgccaccggtcgggagatagtgatgctgggagaggggcgcccggcaccagactacccggggcggtccatcttcttcctccccttcgcgatggctgggctggtcccgccattttctcattttttcatggatgttctggagttctacgatctccagatggcgcacctcacccccaatgcggtgatgacactggccatcttcgcgcacctgtgcgagatgttcattggggtgcgcccctctcttcagctgttccggtggttcttcaccgtgcagtcggtgtctccgccgtcggtggttggcggctgctacttccagccgcgggggccggtgctgaaccgctatatcccctgcgtcctccgcaagaagtgggacgactggaagagcgactggttctacaccccccttgccgacgaagcgcgcctccgccttccaagccagcccccggcgcaggtctccagctggcgggcgccggtagatctgggggaggagtacgacgccgtcctcgaccgcctggcgggcctgcgatcccaggggctcaccggggccatggtgttcggcgattacctccgtcgccggattgcgccgctccaacggcgcgcccggagcgcctgggagtacactgggcctgaagactacatgcggacccaccagggagccagatgggattgggctcctgaggacttcaagatcgtagtccaaagggtgctgaaccttagctccgcggaggcgtctcgccttcctcaggagatcctccccctctgcattgatcccgaccgcgtctccattctatccattatgttgggggtcggggcctcagaggagagagcccctaagggccacgacggcgcgggcgagagccgccgggggaaacaatctgccccaggagggggtcgtgcttctgggcctcgcgtcgggggcccggggagcagccgccctgccgacgcccaggggaagaggaagctgggaggaacacctcccccatctcctccccgagggggcggggcggtgcgtaccagcggtcggcgcccggagggggccgcgccgacgtctcagcccgagggggagcgcaagaagaagcggctccgcaagatgggggagacggaaccagcccggggaaacctaatttcccccccaaggtggtcattcaaccgaccccctcgcaggttcgtctcactctcattgcaaccatctttctccaaaaagaagttttttcttgctcactttgttcgtcttctggctttttcttctgcttcagcgatgtcccgtcgcattcctcccgccaccccaagtccggccagtccgaggccgaagatccagtggccgcagaggagcggaggcgagagtctgaccggcgcgaagccgcagaccgccttcgggaagctgaagaggccgcccgggaggccgcccgggttcgccaagcggaggaagctgctcgggaggaagccgcccgagcccgccaagccgaagaagctgcccgggaggaggccgcccgggctcgccaggctgaggcgacagcgtcacttgggcccactccctcgggcggccctcaggcgacatcctccgaggcggctcgcgacgaggccgcgggcgcatcgcctgggcctacctcaccgggcgacgcccaggaccaaacgggcccgggggacatccccgagcccagcgcatcctccggggggccaagccgcgtcgccttttctccaaggcggcttttctcctcctcttccgtcgccccggtgagcgccgagcccattatgcaggccttggccgccgcaaacaccgcggtgctagatggattagcgcccaggtggaggccttgcgagcggaacgagcggagctcgagnccgcatgggcgcgcgtcgaggaggggcggcgctcggtggacgccatggtggaggtgggccgtaaggctcaccgccgccacatctcggagctcgaagcccgcaaggcggcgctggcggagattgcccgagaggtggaggaggagcgagaggccgccctcgtcgccaccaccgcgatggtcgaggcgcaagacaccctccgtcttcagcacgcaagctgggaggcggagctgaagagcaagctcgacgccgcccaaggggttctcgactccgccgctgcccgagagcggcgggcaacggaagccgaagcggcgtcccggcggcgcgaggaggcccttgaggcccgtgccatggcgctggaagaacatgccggcgccgtggagaggggcttgacggaccgcgaggccgccactgctctccgggaggcgacgctggcggcgcacgaggccgcctgcgccgaggaggagtccgcgctccgccttcgcgaggatgcactcgccgagcgggagcgggctctcgaggaggccgaggctacgaccaaacggctggcggacagcctatcccttcgcgaggcggcgcaggaggagcaggcgcgccgcaatcttgaatgcgtccgcgccgagagagccgcgctggagcagcgggctgctggcctcgaggcgcgggagaaggagctagacgcgagggcgtctatcggcggggcggccgcgggcgaaagcggcttagccgcccgcctcgcagctgccgaacacaccgtcgcggagatgcagcgagcgctggactcctccaccggggaggccgaggcccttcgcttggcgggcgagattgggcccgacatgctttgggatgcggtctcccgcatgaagcgcgccggtcggcaagcgggcctctggggaggccagacgtcggtgccccccaccaatctggaaggcctcgctccgcacctcaacaggatggcttgggttctcgagcaactccccgaggagctcgagaagaccatcaaggcatcctcgagggacctcgcccggggggcggtcgaactcgtgctagcgagttaccaggcccgggaccccaatttctctccctggatggcgctggaggagttccctcccgggaccgaggatgacgcgcgcgcgcgggtcggggatgctgccgaccacattgtcaacggcttcgagggctcggcccctcggctcgcgttcgcccccagttccgacgaggagggcgacgccagcggcgaggacgacggtggcgacgaggccagcgacccgggtgcatttgaatgagcccccaggcccccgccaatctttacttttttttctttttctttcttctaaggccttcatgcctcttttgtgtatagatcaacttaatctgcaatcaaaaatgatgaaaaattttctatgttaactttattttgctatgcatatgagttgaggatgatctgtgccatggtccttttgcgccttagcttgaaataagggctcgcgcccaagtcccggtcctcgaatggctcgggtcggggctagtgcctggggagatccacatgtcgagactggccaggccgggaacgtggtgaccgagggttatgggtgacccgattgtgggtttctgccgattcccccccggagttcaccacgccccggggcacggctcggttctgggcccgtttggcgattttagctgaccgaaccgaacccccgagggcaaggttgagtacaagtgaccttattttaagtcaagatccttcaaaaggaaagaacagcacagacacaacctttaggaaattgaaactgcttttattgaaatgctgaaaggaatatatgtgcatgtgtggtagcccccggctaaccccgcacacccgaggggggtgcggggttggccggagccaaaacctgacacccgaccccccctcttcgcgggtagaagcgagcagggtgttcaatgttccacgggtttggcagctccgtgccgtcgcccgtggccagctgtaccgagcccggccgggggacaccgatcagtcgatacggaccctcccacattggtgagagcttgctcaatccagcgcgcgtttggacgcggcgtaggacgaggtcgtcgacgcagagtgatcgggcccggacgtggcgctgatggtagcgccgcaggctctgctggtagcgcgcagctcggagggccgcgcgccgccttcgctcttccaagtagtcgaggtcatctctacgaagctgatcttgatcagcctcgcagtacatggtggcccgaggagacctcaaggtgagctcagatgggagaaccgcttctgcgccgtagacgaggaagaaaggcgtttccccggtcgctcggcttggtgtggttcggttcgcccagagcaccgctggcaactcctcgatccatgaatcgccgtgcttcttgagaatgttgaaggtcttggttttgaggcctttaaggatttctgcattggcgcgctccacttggccattgcttctggggtgggcaggtgaggcgaagcagagcttgatgcccatgtcttcgcagtagtcgccgaagagttcactagtgaattgggtgccattatccgtaataatacgattaggtactcaaaacgggccgtgatgcccttaatgaatttaagagcagagtgcttatcgatcttgacaaccggataagcctcgggccacttagtgaacttgtcgatcgcaacatacagatactcaaacccgcccggggcccgtttgaacggtcccaggatatcaagcccccagacagcaaatggccaggacagcggtatgatctgcagggcctgggccggctgatggatttgcttggcgtggaactgacacgctctgcatcgccggaccagatcgactgcgtcattgagagccgtccggccaataaaatccttgacgaaaggccttgccaaccagggtacgcgaggcggaatgggctccgcactcgccctcatggatgtcagcaagaagctcaacgccttgttcctgaggaatgcacttcaggaggattccgttagccgcgcgccgatagagggtcccttctaccagcacatagcgtttggaaatgcgttgtacgcgttcactcccttcgtggtcctcaggtagagtcttatctgtgaggtatgtttggatctcagagatccaagcaatcaatctaagggagcttggaacgctctcttcgggtcccgaggcctggactccgacgggcctcgggggccggtcaggcgcatccgtctcccctaaggggtcgggtcgcgccgacggctgggtaagcctttcttcaaaggcgcccggtggggtctgggctcgcgaggacgcgagccttgagagttcgtcggctatcatgttatcccttctaggtacatgccgaagttctatcccatcgaaatggcgctccatacgccgcacttggcgtacgtaggcgtccatctgtgggtcagagcaccggtactccttacagacctggttaacgactagctgggagtcgcctaataccaagaggcggcggatccccagtccagctgccactctgagtccggcaaggagtccctcgtactctgccatattgttagtcgctcgaaagtcgagacggaccaagtatctgaggacgtctccgtttggagaggtcaacgtgacccctgcaccggcgccctggagagacagagaaccgtcgaactgcatcacccagtgggcggtttgaggcagctgtgaggggttcgtgctggcctcgggcattgagacggtctctggagccggggtccactctgccacaaaatcggcgagggcctggctcttgatagcgtggcgtggttcaaagtgcagatcgaactcagaaagctcgattgcccattttaccactcgtcctgtaccctctcgattatgcaagatttgaccgagggggtaagacgtaaccacagtgacccgatgcgcctggaaataatggcgcagtttcctcgaggccatcagaatagcgtaaagcatcttctgggcctgtgggtatcgggtcttggcgtcccggagggcctcactaacaaagtagacaggccgctgcacccttcggtggggccgttcctctctgctaggggccgtacccccggggcgttcttcgtccaagtggcccctcggggcgcagtcgtcttctgtgccgatgacctcggggtcggaggacgacaggagcggccttcccacagtggcctcggggccgtcctgggggtcgggggctcctggcatcgtcggacaagcgggcaaagggccaactccggtcgtcaggggcctctggcctccgttcggctcgggggcctcttctccctgctctttcccgggtcgagtcagcacagggttagcctcggggtcaaagggcgttaagtgcggccttcccgcagtggcctcggggccttcctgagggtcgggggcacccagcaccgtctgacaagcgggcagagggccgtctccggtcgtcaggggccttaggccaccgtttgactcggggacctttcctccctgcttgctcccgggccaagtcggcacagagtgggggtgcgcagaatgaggattgtcctcatcgcgctccacaaccaacgctgcactaactacttggggggtcgctgctaagtaaagtaacagggactcatttggctccggggcgactagaaccgggggagagctaagatacgcctttaactgagtaagggcatgttcagcttcctccgtccaagtgaacggccccgaacgcttgaggagcttaaacaagggtagcgccttttctcccagccttgatatgaaacgacttagggcggccatgcaaccggtgacgcattgcacatccctaagtttgctggggggggcgcatccgctcgatagctcgaatcttctcggggttggcctcaatgcctcgggcagagaccaagaacccgagaagcttgcccgcaggtacaccaaacacacacttatcggggttcagctttatgcgggcggagcggaggttctcaaaggtttccgctagatctgaaagtaaagtttcttggttgcgcgtttttacaaccaagtcatcgacatacgcctcaacattacgtcctatttggctacccaaagaaattcgagtagtacgctgaaaagtaggacctgcattctttaacccgaagggcattgatgtataacaataggttcctacgggggtaatgaacgcagttttttcctcatcctccctagccatgcgaatctgatgataaccagagtatgcatctagaaaacacaaaaggtcgcaccccgcagtggagtcgacgatctgatctatgcgaggcagggggtaaggatccttaggacatgccttgttaaggtcggtgtagtcgatgcacatccgaagcttgccgttcgccttgggaacgaccaccgggttcgccagccactccgggtggatgacttcacggatgaatccggcctccagaagcctcgccacctcctcgcggatgaaggcttgacgttccggggcctgccgccgcactttctgccggaccggccttgcgcccggccgcacggcgagacggtgctcaatcacctccctggggaccccgggcatgtccgctggtctccatgcgaagacatcagcgtttgcccgcaggaaggagacgagcgcgtcttcctatttgccatccagaagaccaccgatccgtgtggtcttggatgggccgtcgcccaaggcaacctccttgaccgggacctcgtcgcatgtggccatccgctgcctcggggcggtgggggcagaggggccaagcctctcgtcaccaccctcgggcttggacgcagcagcgaggcggtccgcgcgctgctccatacaagcgagcgcgactttaaggtcgccacggacagagatagggccaccggggcccggcatcttcatctggaggtaggcatagtggaccgccgccatgaacttcaccaacgcgggcctccctaggaccgcgttgtagggcagactgaggtccgccacatcgaagctcacccgctccgtgcggaagttggcgggtccaccgaaggtgaccggtaggtcgatgtgacctaatggccacgtgtgccccggcgtcacaccgatgatcggttgagacggctggagcaccatccccggggccttgatagcatcaaaggccgcgggggaaaggatgttgagagccgctcctccatctatgaggacacgtcccaacttcacgttgcagatggtgggggaaaccaccatcgcaatctgccctccccgggcaacacacggtgggtggtcggtctgatcaaaggtgaggaccacctccgaccaccgcgcccgacgtgtcgcctcatgagtaggggccatggccagaagctctcgcttcatagccttgaagctccggcgagagacgtgagcacacgcccctccatcaacggtggcaatggtggccccaggttcttggaaacctaggtcatcatcaccatcatcgatgtcaacagcgggggccttctgcttggcctcacttcgccgtttgccggaaggaaccgccggggacttgccctcacggcgttcctgcctcctgtcctcctcccacttcctcgttcgctcagccaaatttttgactgcgcgacagtccgctagatcgtggagggaggtgttgtggacggagcaccacctgccggcggggcgctccctgctgggagtaccagcctctttctttttgtcgctcgcaggcctcccctttcgggtggcccgcggagcgccctcgacggcgaggacatgaccctcgtcgccggaacggtccgacctcttcttcctcctcctgtcacgccgccctgtctgagcggcggatccgggggcggccgaagctgccactccggaaccggaggagttccatgtccacgcttcctctttacgagccactcggtccgcgagctgaaaaagctccgcggtagtctggggctctttggaagcgatcttttcgagcatgcggttgtgccgcacgccccccctgaacgcgtagatcaccgcgtgtgcagggatgcatggtatggtattgcggacttggcaaaaccgctgaatgtacgagcgaagcgactcatcatcgccccgctgtactgcatgcaagtccgcttcttcgcctgggcgaggatatgtgccttggaagttcatggtgaactgttggcacaaatcttcccaggagtggaccgacgcgggtggcaggttcattagccaaccccgcgcctgtccttttagggccatgggaaagaagttcgccatgaccctgtcgtcacccccagcggcctcgatcccggtcgtatagacctggagaaactcggtggggttgacgctcccatcatacttctcggtgatggtgggccggaaccttgggggccaacggacattccgaagactcgccacaaaggctctacagccaacaccaccggccgggggcacggagggctgatcctcacgtccatgtcgaggtgacactctggacgaggaggcgccctccgttgcacggggagtacgccggttattgcgccggcgctcgatgtcgaggcgggcatccggctccccacgctgatcctcccgagtcgacggtgtcgacgagggagtggcagccgaatgacgtgcagccgccgccgctcgccgcgccctccgccttgacgacacggagccggtggtagcggcgccggaggtgttggtggtggcgatccgtccaccagcacccaggcgctgctgtgcagtcatgaccaagttggccacatcttccagccatcgttgggctggagactccgggtcatggacgacaggtgggtgtcgtaggagcgcgccagcagcctgaagcgcaccctgaggcgtgctgccgtcgccgtagacgaggaggcggcgctccccatcttgccgtcctcctgcaccacctgcgactggtgatgccatggacttgtcgaccttctcaagcgcctccccctgcttagggcttcggcgcggaggagatgggggagtacgagctcgacggcgtggattcggctccccgtcgtcgccactcacactcggagagaggtcgtgcgcctttgcttgctcggccattaggctgaacaagggaaacttggcgcctacggaagagtctgagagctcagaaaacacacgctgagcccccctacctggcgcgccagatgacggagctcgtggctcctcaccgggagaccgcgcaggcccccctttgccggttcggccgggggcttagggtgcaatctcaagctctctctgtatgtggaaagattactcgccggcaagacacacgagacacggcgatgtatacaggttcgggccgctgccaagcgtaataccctactcctgtgtttttgtggatttgtgtatgaatgagctacaaagtgtcagcccccttctcccctgttctaagctcttaatctcgaaaagaatcaacccacctttctatgggcaaggtcctccttttatacttcaaggggataccacatgcacccttctctttccaaactagactgttcttttctttatggacggagatcggtatggttgctgtccaaacgacacttcgatgggacagctcacacctaccccactcccggcggagacgggcgcaacgtgagatcgtggctgcccgttgctgatgcgaccagtgtcagatcggtcattcttgtccaccacgcgtcagtttaacaacgtgcatgtttgcccttcttcgtgtaacaccttgcctgtatggttaggatgaagcctggtataaatctaaccagggctaacgtgccatctctaagagataacacgctagctccggcttgagacgagttgccttgaggctttcgtcttgacgggatggggcgaggcgtgcgtcagaccgcagtcgccacctaacccttgatctgaccggtctgtgactggtcacagaccggataaaagagcgtgctgtactgcgttgtacgcagcgtgacacgcttgaccagactgcaataaatgcggttaggtgagcacagctgtgctcacttatcccatatatgtggcgcagacttctttaaggggtcggggtgcctcggccctcggggccggggcaagcgcaacccgaccccccccctcgggggaaatcacgaggagggcggacacctcaccctcgggcccgacgtccccgaaggtgccaggccacgtgggcgattgcgtctgcctcaagcctctggtcatgatactcccggtcccatatcaccgacagtatacataagcgaagagtgatgcctgatttcgtaagcatgttttttaaattactaaacgacgcattccgtacgaaaattttctatatgaaagtcgcttttaaaatatcaaacatatttatctgttaagtttataataattaaaacttaattaattatgtgctaatagttttctcattttacgtgctctaacttaatctttattcttatgagttttaaacaccaccaaatccaaatccaaatggagacttccctgatacgaccgcgacactcgtaatattcttattccctaatacgcattaccgagacttccctcatgttagccgtccaaatcctaatgcgtagtatagtcatacgccttcagacttcaattggttggacttgaaccgacgaattgaaattatccagttggatttcacccctctttgaccatgcgaatatatattgtgcgataaaaaataatactggtaaaagttacgatgagagcgagatgactgcctcaattgaaagaagggttgttatcatacgtgtccgcttaagaacgaagtaggagtaaagtgagattgtgacgtacttgcgcagtttcttattacggagtaagtgaaatcatttacttttgtgataacattgattatttatcgtattaaaaagtttttgttggacttattttatcattaaaaagttttaaacatgacatatattttgaatatttacattatattttaaaataaaataattatcacacgttaggaaaaaacaaaacaacattcaactacatactatacgttcccactggcatccagtgccactggaccagtcgcatcccgtagaagtagaaggtatttataatctttgagactttgacgttgatgccggctataattttcgaaataaaaaaaccgggaaaaaaaatctccgatctgcgatactcgtggagctcggggaggtgccaccaccatcaggtggagctccggtaggaagacaaacatcgccgccccagttcacaccataggagattttctttcgtgggcttcaccacgcccgccgcggcatcgccgagctttcgactgcagcttcaccgtggcatcatcggatctgaagcgccgacctcctccctcccgccgcagccacggcccctctgaagtcgaagatgtcaatacttaaaaaaaaaaatgatggtgaccaaaacacgtttacactgacgggcagatgctccgtctgcattctccggccaatgaaaatcatgtattttcacaagcgagtggacgactgcctgttaaaatcgatcttcacgggtggctaaattatactgctcgccagcgaaaatcgttccagcgctaaaaaaaaacaatcacagcggacggagcggcgttgctccgtctgcatctacagtcgcagccgctcctcgatctgccagatcatatccaatccagtgtaattattctcaaatccacaaatgtgaatcccaaattgctaaatccacatagcaccataatttatagcatttacaagtttcacaaatttacaaatcagtaacagaaaaacgagagacaagacttacaacattcaaaaatttccaagctacattgaggccctgtttagttcaccaaaaagttttcgcaaaaacatcacatcgaatctttggacacatatatggagcattaaatataaagaaaaagaaaaactaattgcacatatagggaggaaatcgcaagacgaatcttttaagcctaattagtccatgattagccataagtgctacagtacccacatgtgctaatgactgcttaattatgctcaaaagattcgtctcacagtttccaggcgagctatgaaattagtttttttattcgtgtccgaaaacccatccgacatccggtcaaacgtctgatgtgacacccaaaaaatttcatttcaccaacaaaacaggacctaaacagcaaacaaagatctgcaagcttcctcagccacagcaacaacgatcttgtcatctcctgtgagatagatcaccaacccatgcatccatgaattggaaacaaaaactaggaaatgaggacgggagggtacatatacttggactggggaagggaagggagatggagtggaggaaccgcgtcgctagatttgatgcttcaccgcgctagagggatcgaggagccaacaatcgtcgattggatccgcttgccgccacctcccacagctagatctagcccttccatggccggatccgtcaccttcaccatcgcagcccatacctttgtcgccgctagtcgccacagcccttacctccccctttaccaccacagcttgccagatctgggagagggaggggacgtgatcgagttgagtggaggagaaccgtgccgccccctctttggtcgccgcccaacttccctctggctagatctaggagagggaggggggtagggagggtcgccgccactatttgttgttgtcaccaccgccgttgctgtcgcgctgctagcgctgccacctacaccgtccttccctctagccaaatctagggaagggaggggagggctaccgctggcttgatttggaggagagtggaggggatcgaggagaggagaggggaggtgagaggggtggcaggctaagagaggtggaggacttgggtgcacagttattaggaccggatcggaccggaaaaaactggaaccagagcctccaccggtctggtccagttaaaagaccgcatgtgcaagtgaactggtaaaaactggttggagctcagagggcaggtgctaggtaggattcgaacccacgatgggttgattggaagcacatcacaccaaccacgaagtcatgcttgtgtttatgtatgaggcaaatcagttatatatttaaacttctaaaccgccttaaaccaacagtccaaccggtcaaaccaatgaaccatcgaactgagggccttgccagttcaacaaccagtctggtctcaataactatgcttgggtggggagaagtcgggtgcactttcttttttaattcttcgagtgcgctcgctcgatgtctgaatttttttaaagcctccttccctttttgcacgcagatgtcttgcttttcgtaggtggggcttgaacttagggaccatttgttatttttacatgtgggatttttgggtccatctagaaaaataaaacccatgtgttatgaaaaatcgtgtgcgtcgtcatcagggttaggcgctttggatgatacaaatcgcactgccgcgacgacgacttgacgggggagagcaggcgttgtagtacatcgacgtcatagtcttgctcgttgttgaggtcttcgtcgtcccccacgccatccataccattgaggtctaaggcacgtataacaagtttaactagaaaaaagttaaagtaaacagacgaagatgaactaaatgattttgactatatatttgcatagctaaatattttatgggagagaaagagagtaccgtttaatgtgaatggaatatattgagccatatatagcgacatataaatacattcaactttgactagtaattaaacaaatataatatgtatgtttagtgtcacatcttatattttggaatatatagagtatatgatttagattttaaaccgttgttactataagatggaaactaatcacatcttatagtaagtcatatataacaatcggaacctataacatttatgccatattttaacatcttccggtagtctagcatttaagcgtgagatatatagacgcttaagactgaagtagaaatcggaaaaagcgctcaatgatgataatccttcctgctgatgtagaagttgtggtcatggctacagctagtcgttcactgcatcatcacggcaagtgcggtatacgacacaccaagcgcgaagagatagcgagagcgggcgtaggttgagaagccaacaagcatgaacgcatgatggtgttctgagtggatgagtgacttgtgacttgtatgtgtgtggtataggggacagcagacacaacatcaaaaataaattataaataaaataaaattaaaaaaaatctacagtgacgagtgccgaagatatgtatgcattgatgtcggatagtgtcgctgatcaactactttctctattccaccaaaaaaaaccctaatatcggacaatactctctctatttcgtaaaaaaaaaatctgatgggacatccagtactagatttgtcttttgaagacggagcgagtagtcaagttaagcacgtcttcaatctcagccttttatgaagttccatcacctcactgaacttctaatcgtcacaagcaactagcaagcaccttacggttggtgctcatgacatcctcttgctctgctgtacttctttcgtcttagaaaaaaaaactacttttgagtttgaatttgaacatagtttatgttcaaattcaataagtttttataacggacggatggaccacacagatgacttcttcagagatccggtta

SEQ ID NO: 19399 - DNA, 3839 bp, Oryza sativa
attcgttgctgtcagttaattttcttcatttttggtggtcagttcaagcctgcagtagtagaattagattggttcatgttgtttagttaagagaaaccaattgtatcatgctgctctgatctgaatagatggttgtgttcaacacctagtcaactaccattagcaatttatcataaatcagcccgtacggtatttgcttttgtaatgcagccagtgggcatcgatgctgattcatgatttgtaccaccagcttctgttaaccttgtattgtgccacgtggaagcctcataaccataggcatattcaactcctgttgttctaattgtctaagagaattaacaaaattaaaatcatgatagagccgcttgttgcttaattcttgcaaatatcttgccttctaagtcatggaataacatgcattttacatcatgaaaattctcagttattcattaccaaaccaatataatgatggcttgctactgttttcttgggagacaaaacaatgccagggcaattttagtttcaatatttctaaataccgtacggtctgattaatttatgataaatatgttgtcccagcagagaccaatgcatagaagttaatgctttttttacttttcggatgttgctttcctctggactaaatttctgagcctcactaatcacactaaatttgctattgcaaatgttccccttgtattgtactgattccattgtacttgttccgtttaattgcacatgctatgttgatatattactttaactagatgacaaaaataaaatgttaacatatggtgcggttctgaaagaaagacatttggaatagatgcaaggtttattgacaagtttctattttctgttgcctctgtatttaatcaattcttgaagcctctggggatgccacggaggcatttgaagatgtggggcacagcacatcagccatcagcatgatgaacaactacttgattggaagcatcaaggactatgtgcctcctagtgcatcagaggctacaaccattggcggcaatgatgtgccgccaaacttcagaaggatgccacagaagaaaggacctcctgctcccaacacctttctggacttcctgctccctctgtttgtgctcggccttgcctttgccgcttggtactacctgaccttcattgccaaggcctagtaaatttggtgaaggtttgaagtattgaacattttactatgccacgtctgcttcagcgacacatggagatatattctggtcagttctaagttttattatgaggtttctggctgtgaattagaaatgtcatcgtattattatttgttaccaaattgttggctttgcttcgaagttggtaccactcttacatgtaaatggcgatggctgcatcagtaaaatgtatggatggggcattttccctttcgctatcaatgtctctacgtatttgcaatgctgttctcaaagtccccagtgatccagttacttttgcctgtacactgaaatcacaaattctcaaggatgtactgactactgagtggctatctggataatcatgtctaacatggaaagaagtactaatgcaagtgaaaataagcaactttgatgaattttgagctgtaggatggtattactgtttttctatatttcaatgcatggattgctatttgaacatattatatatccaaaattttttgctagacaatatgtgaaagagcatctagcaatctataatacttgatttaaattttacaaagtcttgtaagggagatttgaaaagaaggtgagactcatttctctttcacctataaccagattggccataactatatcaaaccaagacatgaattcttccttagtacacaaccatcaaaaaattcataatctaagtagatattaagttttttttaacctatctatcatgttttcgtttgttagttggaacagtagtaactgcattcagaaacaaagaaacttattataaaattctccttgccatttgatttcataggtaccggctgatgactgattgttacttgatgtaccaacgttagagaacaaaactaaatgtccaaactccaaactaacaaaccaatcatctcatttcaacacaaaatcgcaatgcaatgaaattttccccagctgaccttgacacggtcatgtaagtttcttggtttataatacatcaagtggcagggttagctcaaaatataacaccaatgcttccattgcctattttctgttcttttcctaagtagctggatcctgaacgacaggaaaatgatattttataagtgaaccagattctccatgaatttcatgacaccataagcaatctattatcattccctccatatcattcaggtcaaccgtataaattagggagaaacagaacatataaaagatagacatcttatagaacatttgttgttcttttcattaattgcaaactttcaatcaaagtattttcagtaccttatacgctgtcaatgaactgtgctgcttaccttcaaatctagagctgtcaaaatcactattaaataactcgcacataattaaacaacaaactttacatggggatgacactattaaacaaaatcttcttttacataatgattataaaatcatgtactagtatatatgtttcaaataatttgcttgcttaatcttctaaactgggcattagccaatgaaatatatcttgatgtatcacacaatatatacctgaagtccttaaccacacccaaaatttcaagaaacccatttgatatcaaaaatggatgggctcgtccccttgatcttcaaggtgctcaagaagaagaaggccatgaggtactaccgctccctctgttggaattaatgaatgggccttagcccactcgaagattaattctttggaaaatcacaaaagcccacctcatgggatggcatgcatgtggagtttagtaccaccttgcttattctaggagagggggacctccttaaaaggaaggatgccctcctagccacttgaagcatgtgtggtggagagaagaggggaaacacgcgcgcgctcgctcgcctcgcctggccgggcaggcggcgcgcgcgtgcacgatgtacgcgtcgaatggtccgaaaaattggctcctcacccttgcgcagatgcagcctccttttgcagttttgttttgctgcaaattcggattcgtttttgttttggaaacgttccgaaaaatccggtgcgtgcaaacggcatggagtccggataagttacgcgcgacttatctggttcggttacgcgcagtagagatcgtgcgggcgccctgatcaagcgacccgtctctatataaaccgacctgccgtcttcacgcaacacatgcgaaatcaatctagggtttgcctcctactctgtactgcgccgtcgctcgtagactactccatcccgctcgccggcgtgcaccggcgatcgggagagcaggtctccggaacctctgccttcgacgtcctgcaccgggagaaggcggcaataaggtttttgggaagcgcttcgcgcgactgctccctgtttgttcgcgacggctcgccttcctcttcgctcgcgtgtttcgtgccttcgtagacacctgcgaaaagtttcgaccaagcagccggtctttccgtcacctcggtacgtgttcaatatgttgcgcatatttgatttgttcatgttatactgtgtagtttacatgtatagatctaatgatgcgttcatgctagttttcttctgtaatgtcatgatttatttatggaatagattaaatcattatatgtctataatctcaacaatccaaaaaccttattataggcactgtgattttactatggctg

SEQ ID NO: 19400 - DNA, 1089 bp, Oryza sativa
tgagtactggcaaacctgaagagttcttactgctgaacagcagaagcaattcgaggaagccactactctctttgtgggatgcattcttagcgttcttggcgatcgtctggtcgaggtgtatatgcatatgaccgacgctaaggagttgtgggatgcactgaatactaaattcggtgctactgatgctagcaatgatctgtatatcatggagcagtttcatgactacaagatggctgacaaccgttctgtagtcgaacaggctcatgagatacaaaccatggctaaggaactcgaactccttaagtgtgtcttacccgacaaatttgtggccgggtgtattattgcaaaactacctccatcttggagaagtttcggtactgcactcaaacacaagagacaggaatactccgttgaggggttgatagcgtctcttgatgttgaggagaaagctcgggaaaaagatgccgcgtctaagggcgatggtgggcagtccagtgccaatgttgtgcacaaggcccagaacaagagcaaggggaaatacaaagctcagcagaccaccaacttcaagaagcagaagaagaacaacatcaatcctaatcaggatgagaggacttgctttgtgtgtggccaagttggtcatctggctaggaagtgtctacagtgcaaggggatgaaggcacctgcagggcagacttctaagtctgctaatgtgaccattggcaacactggagatggaagcgggtatggtatttacctactgttttttcagttaatcaatctactaattggtgggttgatactggggccaatgtacatgtttgtgctgacatctcattgttttcttcttatcaggtcgcacggggttccaccgtcctaatggggaatgggtcacatgcttctgttcatggtgttggcacggtagatctgaagtttacttcgggaaagatcgtgcagctgaagaacgtgcagcatgtcccttctatcgataggaatcttgttagtggctcccgtctgactagagacggatttaagttggtttttgagtctaataaagtagtcgtgtctaaacatggatattttattggtaaa

SEQ ID NO: 19401 - DNA, 719 bp, Oryza sativa
aggttgtgcattaagtgcattagacttcagcggcaatatgattcaaggacagctaccaagatctttggttgcctgtaggaatctggagatccttgacatcggcaacaatcaaattagtgaccacttcccatgttggatgagtaaacttcctgaacttcaagtcttggtcctcaagtctaacaagttccatgggaaaataatggatcctttgtataccagagatggaaacaactgtcaattttccatgttgcggattgctgacatagcctcaaacaacttcagtggcacattgccagaagagttgtttaagatgctcaagtccatgatgaccaggtcagataacgagactttagtcatggaacatcagtattcccacggccagacataccagtttactgctgcactcacatacaaaggcaatgacataacaatttccaagatcttgagatcacttgtgctcattgatgtctcaaataatgaattcgatggtagcatcccttcaagcattggggaacttgcgttgcttcatggactcaacatgtctcataacatgcttacagggccaattccaactcagtttgacaatttgaacaaccttgagtcgttggacctctcctcaaataagctttctggtgagattccacaagagctagcatcgttgaacttccttgacattgaatttgtcctataatatgttggctggaagaataccacaatcg

SEQ ID NO: 19402 - DNA, 10244 bp, Oryza sativa
accaaaaatatgaagaatcattgcttagctcctagaaacaaccacatccgaagtgtataccttctggcttatctcgctctcaaaacaggaggctacagcgtcttcgagccataggtcaaaaagaaaaggaggccgaagatgtggagaataaaatatgtaataatttagagcctcgaacgacacctaagcgagtgtggagacctaaagaagtaaaaagtaagagatcggtgatttcccaaagtagggataaatccaatttgatgagagaagaatcatcggtcattagagataagtctccttcacatgatgcaatggatgttggtgcggtgttcgtcttgcctttgaaatcgtgcaatcaagaaagccgattttgcttggggggcaagacattatatgctcatgagggaaccaagagaagatgaatggcgatggatatgacatcacatctttgagccaccgtttgtcggatgctaaggcaaggtatgggtttattgtgttcaacattatattatatgcctatgccatgttagaacattgcttgctatctagcacatgtgtgttttgcttatcaaattgatattatacatacatgttgcaaatgccagttctaggtagtagaattggtaggttggcatataatttgtttgaagtatgatttggctcatgactctttgatatttatttaaagccaaatcatatgtgtttttatggatcaccatgtaagatatagatttcatatttattgcaccatgaaagttttgcttactcgtaattcggctaatgtcaatggtcaatgtgatgatttgctctagagtggttttctttaggaacattggcattgttaatattttacatacatgctcaagctgattacttacatttgtagtttattggaatctgtacatgtgacacatatgactttggtgattcattattgattatacttcaattggctaagtgttttgatgtcatgatgattattgtttcaaaagccaattgaattagtattcatctagacatattagttgaatgttataatttttcatatgtctagagagaagaagttttggtccaataatttgatgcaccaagcatctggctattatgtgaagaaaaattatatactaaaggccgatgcttgatttcaaaagtttggacgaaattggcaaagtcatagaccaggggtggtctgaccggcattgcacagcggtctgaccggtggtacctgcggtctgaccggctctgcatggccggtctgaccgggcagacagggtggtctgaccggcattgcgtggccggtctgaccaatcccgggcagagagctggggggcacgttacaattgatttaaagaccggattaattgtgaattcggatatttgtgcccataagtcagaaatagattggagaatccctttgaatagaatatttgaaaggtcctagtcttggggttgatcggaagattctgtggtaagcgttcaaatattatatcgccgaaatatagatggagtgctattgatgtgtttagacaatgatcaatctaaagttgctaggggagatgtgcatgaagggatttgtggagttcatcaatcggcccataagatgaattggttgcttagaagagtggaattctattggccgaaagtaattgatgattatttcaagtgctacagagggagtgaaacttgtcaatggatcggcaatgttcatttggcgcatgtcgctatattgaatcctatcatcaaaccatggccgttccgaggtagggctttggttttcattggtcagatttatccatcgttatcaaaagggcattggtttgtgctagttgcaatggattacttcactaagtgggccgaagccgtgccgctcgagaatattacttgtacgaagttgaggtaaatcttggctctcttcggtatttcaagcaagacgacttgtcggttggagattacaagaccttgatgggaattttgaagacgtcatcgacaagcgtttgaagactttgaaggaatgaagatgcttcaagatggtgttttcagagagcaattaatgggaaatacttgaagaaatacttcccgagcatttggcaaaatgcttaggaagtcctatggccggtaattggattatcgccctaagacaacatgttctatgcttttagaatcacgatgttcatcaaaaaggcaggggggcatgtgtttacacccaaatttggcacctatggacgaaatagaggaaaattgccaaagtttggaaagtgctgggtttccttcacagggtcggtcagaccgcaggtgtatgggcggtctgaccggctagtagggccggtctgaccgcaggttcgtcgggtctcgggtttcctttctcgggaaggcatgtttcgtgtttcctttggtttctatcctgagttggacgtggagaagggcctgtagagggcaagaccaacccctatttaagggacaaggccggttcattgtaaaaccccccgaatacaatctacttgaatcgttcttttactatgttttctattttaccctagttttagtccatctttgtcggtttgcgccgtaaaccgtccgccgccgctgcgagagtgcgacacctctttgtaggtttgtcctgaaaaccttccgttttgcccacgagacgggtagttatcctcatatcgatataaatcagcctagaggctgattttgatctctaaatcggctccgctagccgatttagcttttctttttgcaaaatccatcttgatttggccctttggctagatcggggtggttggcgactccatatcaccgcaaggcgtttaggtgttgcggtcgtgcttgtcgacttgtcaaaaaagttgccaacaccagcatctgaatctcatgagcttgttctactacagaacggtcatcgaccatcttgtagtcatagaactgctccatgacatacagctcactaccggcgtcagaaactccgaacttggcctcaagtgcatcccacatgtccttcccagaaggcatgtgcatgtacacgtccactatgttgtcagcgagtacactgatcaatgctccccggaacaggcaatccgaagcctcgaacttagcctcttcctcaggagaaagaggtggttcacttcgtttgccccgtgaaacatagaagcactgcatcgctgtcaaccacaatagtgcacgtgctttccatctcttatagttagaaccatcaaaagcatgtggtttcagtgcagcagcaaagccaactaccgaaaatggcctatcaggtttttggattgttggaaatatggtcatgaatcggcatattttaatccaaaatgttaagacaataatcatggcataagcagtgtagggtgatctagtgacaacatgtaacataaccagtagcatactaaagacatcatgcgcatcatgaatatcacgaacaagaacatagcagtaacgcaatagcatgctagaggcattattcatgaatatcaggaacaggaacatagcagtaaagcgctaacaacgggaacaggaacaggaacatagcagtaaagcgctaacaacgggaacaggaacaggaacatagcagtaaagcgctaacaacgggaacaggaacaggagaaggatataccccgagaatggccctccgctagattgtgaggcagaattgcctccgttggtgttgttgttcgcgccaccggctccagctcctggcgcaccacctccggctccagctcctggtggcgcaccacctccgccatctcctccagcagcagcagcggcgccggctccaggcgcagacatggtggggcgagaacgagcagtcgtgcggaagcactctgtaacataccgaaaattaaccattttctaattctgcatcatgctgagtcttatgttcttaataacttcctaaacctaggaaaatataattagagggaccttctaaaactaacttgcataaaatctctttctggtattaacttcttttgtgtttttcatttaaaatacatgtggttgaattgaggtatttcttgatttggtttaaaaccttcttttgactaaaatttctttattcaaaattagtttgaaaaccctttctatttttttttatggattatggtccaagaaaccttcctaatttttttcccttgaacctaaaccaaagtaattccaattttattggaattaattattagcccattctttgatcttaaacccatcctttgattctcgatacaaatatccaaattcttccttttgatctagccactgatttaattcctgtggcttcatttcctcttcggcacaagaatagtattattgcaaatattgtgaataattgctcttgtgctaagaaaataccaatttatattctttactcaactttccctattagccacaaataattcttcaaatacttctactatcaaatttaggattcaaatcctatttatctgcctctatttattacccctacctttcatttgagtgcatcaaatttcaatatattttatctccaaattattgcactcaaaataaattgggaaaaatatctcctttgttagctttctccaaatttaaattctcttcaaaccaaaccattcaaattcctttcaaaattgagaaaccaattctacttaaattgggccgaaattctttttctccttcggcccaagccggcccaacacccagccgagccgccaacttgcgccgccgctgacaccgtgccgtgttcgtccttctccgccgctgccgtgccttgccctcctcctccgccgttttctccttctctaagaaaccgtcgctgctgcccttccttcgccgccaagtcgcgccgacgccgtgccgtgtcctcccttcccagccgcccaactccctggcagccgacgtgtgtgcgcgccgccgtcgacatccaatcggagcacagagccgacgccgtcattttcttttccacggcgccgtcacgaagttctccttgatcttcccctctggaaccgccttgcgccaccgccttttgccacctataagtattcggcgaggctgccccttttcccctccacaccatcgagctctccgagctccttctctcctggccattaccggccaccaccatcattggccgatctccctcaccggagtaataccggccaatacctcgcgccatcgagctttcctcgatgagaggattccatttttcccctttcccctctcctttagccaccggcaccacccatcaccgccacccaccattgccggccgaagagagctcttgttgtcgccgttccggcatcctccctctccctctctgccagctaccgacttccctggatgcgcggtactcgggaacactacccgacaccggcgtcgccgtcttcaaactaccgaagagccggcgcccctcctccctctctcccttctgttacccggctggaaggaggagaaagaaaggaacgggaggaagaagaagaaggaaaagaaaaagaaaaagaaaggctgacaggtgggcccctgcacagtaactcttcgtattttctctatttaattcaaatcctaatctttagaagcctatatctcctaaaccgtagatccgattccagtcaaacttggacctaaattcatataaactcaaaatctatattttgataccaaatttgctattttaagattttatttgaatttccttaatttattcaaatactatttgaataaatatttgattaaatcttataattgaatttacaacttaaatttatatttgcttttcaaatattttcttttattccaaattacccctttagccactaaaaagccgccggtggaactttacgtcttccatggggacgttcgcggtttactatccccgacgtcggaccgttggttgtaaagcccggcaaaaaccaaacctaaggtcgaagtgctgctcctggcaccccacgccttgatgcgtatagtggtcggagcttcactattccctcgacctccacagcacgccgcacagttagctcttgggctctgtgtgatcctagccgctccgccgccactcacggttgtcggagtaacacttccgccccactaaacccacacaaacttcataccccactagccgttatgctatttgttgacaccggccagagaagataccaattctagtcgttatactgcccaactctagcaacgactagcaaacacccaaatcccagccgatattcatcctacctcgatatcagctgcttaatcaaatgaaaccccagccagcctactatccaaactccataccaaccatttacccttctactacccatagcctatgcatgaaatacgagccgatatgctatcctatttcagcatcgactcgagaacaactaaatcctagccattctcctaccaaagcccaacctcgaccaatgctagccacatatccacttaaccagttagattattcggtatatcccctattatccaagaaaccaaaaaccacacataaaatataagtgacaattgttacttaatcccctctagcctccaacccttcagaacatacacatattagcccagtaatccctacaccctataaaggagataggttataccctaaaccctagcccttttagttgtttatcgttttcttgttattttatggattttattgaaattggttcttcctctttcttagtagagtctattttattttggatggcaacctgtggtatttcgaggatcggataatcaggttgtctatcttggatttatttgcgttggagcaaggcaagttattattcctcccttgaacataattaccctatattctatatttctattctatgcattagccattcatgattttgaatgcataacctgaatatatagcaaaccagatatgctagcttttgcttagccctgcctagttagactgcataaaaatataatgaacttagattgggacagtacgtaaaatttggttgatttccgggtggctagtattgtctcagtcgatataagtttaccaaatacttatgtcaaacgaacgagtacgaccgcagcttctagaatagggacagacctagatattatgttaattaacaatgtgatacctctgtacagtggttccttttgtatgtcctcgcgtaggaggcaatcttatgccgagcagggcatcttatgatatttaccgaggcgcaggtaaatatactgattttcgctcatgagctatgtgtgtgattttatggaaacctggttgagatgacgtggggtctctcatccagttctctctaaaaaccccgagaacgccagaactcctctcgctgctgataacgttacgttcagagcgcatggggactagagttcatggaacaggtgccacaattattgataacctaatactgggccatgactaagctaatgaatattggcaagtcgtggactgcgggtaaagcgtacatctactgcagtagaatattcatgaaactattcgaatagccgtgctcacggaattgagtatcgggactcatatggtatttggttagaaacttaattccaaattttattaaatactgttgcatcaaacacattgcaggatttatccttctatattctctgcttactgcaagtaatcatagccctactgaaatactactaattcatacattcatattgaatataatagcttgccgagtacattgtactcacccttgcttcaaccccctttttcagagtccatttggatcgagttcttatcaaagccgggagttcaatcacataagttagttccctttaaacctagtcttgaaatctagtattgttagatggtttaactctatagcaaaacattagagttgatttattctatagtttctgctatattagttagccacaagtttgtaaatacccatgtattttataataatatctcccttggagccatgtcaaaatgtatgcaatgaagatccagattgttgaacatgtatcaatctactgatctagggcttgatacagtgtaaacatgtcggtttctgaatcgttaattttgggacccgacacactccccaaaaacttgatcacccgcctacccggtgcagatcgtgggaacgtggacgcgctgttgcggaggcagtcgtgggaacgtgggttagtggctgcaggtttctgaatcgttaattttgggacctgacacactccccaaaaacctgatcacccgcctactcggtgtagatcgtgggaacgtggacgcgctgttgtggaggcagtcgtgggaacgtgggttagtggctgcaaaagagtagcgacgtgacgcatgcacgcacgcccgcctcgacccccacctcaaccagtcaacagggagcctccaataattccctatttaggttgagatattcctcgcttaaatcctaaggtggttttattattcttaacacttattatgggcctttgagatttaataggataagttgggcctagcccaattattctaacatggccgacccggcgtcgcaggggccgctacccccgccgcaccttctaccagctcgtcgacgtcaacctaacttgctctgcctccgcaacaaccccaaactctgcccctccatgacagacgtcacccgagcactcgagcacgtacgtcgcctcccagtcccagccatgggaagacaagcaacgagccacgcctgattgattcagcccacctccttctgaggggcagacccacgatgattcatgggtattcaaatgaatacccaagatttttaaacaacaaatatatatatgaagttccatatgtatatatgaaaaaagaaaaaaagcctacctattcaaaagaagcttaaactaaaaacgtttcctatccctcccaccatttttctccccactatttcaggcccattggtccaataccaaaaaaaaaaaaaaaaaagcccaaacactagtctaagtttctaaccctagctctcaccaccatcccaactctcccggtccagccgcaaggcgccggggcggcagggcggggatgaggtcacattagccgacggtggtcatggtgacgcagaagcaggatttgcaatttcggtggttgctgaaaatttggtgatacccggactaaaattatttgaatttttaatatattttgattgaatttgaataaattttgaccaaatttacaaatatttgacaataaataaaaaattttggagaaatttgtgtttgccagtgggggccgaaattatagaatttcgaatcgaaatttcaaaccatgcttagaagtaaagggcgtcgaggcgcgattgatgcgggtgccgaacatgtggagagaaggaggccgctaatatgcaggacctacgtgggtcccacgcgccacgtctgcttagaccagagagtatactgcctaggatctgcggtgtagcagttttataagttaagggactcgttatatctagtatttcggttcagggatgaatttcagtctcggtgacaaatagagggatctaaagaaaacttgtcctagatccacgggctaacgttatccttagttcctacaatactacatccattttcattttcttttaaatagatggcaccgttgactattgattatgatatttgatggagtaattattgattttattacaaaattatataatactcctatattttaatgtgacctgctttatcattaaagaaattttagtatgaataatatactatgttttaaattagatgaatatggttaaatgttattttcaaaatacgggtgtagtacatgataccgaattattgattaagagaaaatgtttggttccttcgccaagttgtcgagagtgggttttttcttcattcaagcacattgtgacacatggataaaaatgcttccaaaatttaatcagctactgttagaactcggttcattaattagcgtacaaaatggatataaacaactagtaatattttttttatgaaatctggataaatctattttgcaatttgattattcataatatgcctccgatggtactaatttgactaatgaaaaaccatcgttagtaaccccatacaacatctcagagattagatattgtttgacacaacttcagtccaagatgttggaatttcgtattcctagctacatggatctattgatttggatgtgtgattagatggatgagtgtgcgtacattgtaagcgtctgcatttacattgtatttctagaaaaaaatgattgacaatatttagaagaattattttgttcattttttctgcgaggggaaggg

SEQ ID NO: 19403 - DNA, 2008 bp, Oryza sativa
  unsure (1)..(2008): unsure at all n locations
ttttgcaaatgtctaaaatttatccctgaactttaaaaccgaacaattactatctttaaacaacacttagtcatttttcattctttaaccagattcaaagtgattctggattacatggtattgcgatttaaggttgaaaaatcttttggttcttaaaaatcagtgcatgataaatccataaaattccttaaaagtataacttactttttacgacatgaataacatattttttttaaccatgtaaatataataatttggctgcacaaaatagttttgtaatatatttaaaatcaatttttttcttggaataatatttattttggaatggacataatttatttagatttaaagctagatnnatnaggtccattccaaatgaccaaatgaccggacaaatcacacacatagcaaatctgtcatcctagttcggattgttcttcttcttctttttcttgaagtcagtggtctgttgaactttgaagaatttttctttgttcttgttttgggctttgtgcatcacattagcactagactacctaccatcgcccttagacacaacgtcttttccttaagctttctcctcaacattaagagacattatactatcaagtatcaaccactcaatggagtactcctgtctcctatctcttgtgtttgagacattatactaaaatttctccatgaagaaggtagtttcacaataatgcatgcagccacaaaattgttgagtaaaacacacttggggagtttgagttccttctattaaaaaattataagcaatatgctcccgataagtgtcctgactctataggcaatgctccgaataagtcttatgttttctggaaaaaggtagttttgcaataatacacgcggccacaaatttattaggtaagacacacttgaggagtttggagtttgagttccctcaactgtctcttgtgttagagtgcacaaccgaagctgatttgttaggtaagacacaattgagaagtactagttttcttaactgtctcttgtgtttgagtgcagtaccgaaactttccatgaaaaagataagtttcgcaataatgcaagcagccacaaatttgtcaagtgaattcaagttcccttaactgtctcttgtattttagtgtagtactgaaactttttcatgaaaaaggtactttcgcaataatgcaagcagctaaatttatcaagtaagatacacttgaggagtccgagttcattctgttaaaaatctataggcatttgcttcggataaccatgcaaccacaaatttgttgggtaagacatacttgatgatgcggtggggagcgatgcagtgggaccggcgagcgagatgtgggacggcgcggatgcgggatgcattgtcgatcgaacggttttggaaaaactaatgacgtgggaagcaccaagaagcagagaatttctggtagtggggatgattgtatatgtatatatgatttgagttccttctattagaaatctgtgggcaatgcttcagacttcgcacaccgaattattctttctagttttctccgttacgcatgtctcaagtgactagctaggagatcactctttttttaaggagatcattctttcctaggatggacaaggtgattctaagcatctcatacatatgtcttccataagatagacttgtgtgtttttccaaaaaattaatctccaaataaaccttatctcatctattaattcgaacggatataacgaccaagcgtgtactactgaaaacttgctcgactactggccccagaaaattgacgtcctcgagtaaccaacattgtagaggtcaaactgcatgcgacaatatggatccacgaaattgacagagttggaggcggcagaaacaacagacgaaaatccaacaacatggaccaatttcacagatcgagagatattcagatggagtatatacctctcagtctcagagacggagatgtcaagctgttccagtcaagtctgcacctcatcatctatatattcatct

SEQ ID NO: 19404 - DNA, 1436 bp, Oryza sativa
tcctgcaccccgaaaacatatccactagtggctttgatctcatccacatcagagatccagttagaatcactataaccctccagtaccgcaggatacccagtatagtgaagccccaattccacagtacctttcagatagcgcattactcgctcaagcgcacgccagtgatcatctcccggattagaggtaaatcggctcaacttgctcacagcaaaggagatatcaggcctagttgcactagccaggtacatcaacgagccaatgatttgggagtattccagttgattcctagcaattctcttgttcttgcgaagcaacaagctaggatcataaggtgttggagaaggcttactatcaatgtagccaaaacgattcaagatcttctccacataatgggactgcaagagtgtaatcccattctcacctctaattagcttaatgtttaagataacatcagctactcccaaatccttcatatcaaaattttgagacaagaatgatttaacctcatttatcacctcaaggtttgtcccaaatatcagtatgtcgtcaacatacaagcacaaaataactccctcacccccaccatagcgatagtacacacatttatctgcctcattgactgcaaagcctgcagatgtcaatgttttgtcaaatttctcatgccattgcttaatagcttgtttcagaccatacaaagacttcaacaatttgcacactttgccttcttgaccttcaactacaaacccatcaggttgatacatatagatctcctcctccagctctccgtttaagaaagctgtcttaacgtccatctgatggacgagaagaccatgagaggctgccagagcaagtgcacacgaatcgtggtcaagcgagcaactggtgagtatatgtcaaagaagtcctcgccttccttttgggtataacccttgggcacaagccttgccttgtacttttcaattgtaccattaggcctaaactttttcttgaaaacccatttgcatcctatgggcttgcagccatatggacgctcaacgacttcccaactaccattagacataatcgggtccatttcactacgtactgcttccttccagtagtcagcgtcaggagatgaatatgcctcttctatggttcttggggtgtcatccacgagtgtcacgcccggaaattcactagtaatttccgaacttatttgtgcataaaaccctcgtccaggaatcagccgaggtacacaaactgactatttaatatacaaatccatcataataataacgttacatacttacaaaagaaaagaaaacagcagcggaataacggtctagcgatggcttctgctccactcccacaggcagctcaactggggtataagccaaacgtcttctcctcctgaatcctttttcttcaactgaggtttgatgattattgcaaga

SEQ ID NO: 19405 - DNA, 6389 bp, Oryza sativa
  unsure (1)..(6389): unsure at all n locations
ctgcaccccctggcttgtggttggcacgataaatgtttcacaacagtagctcgcgaaccggtccttaattgttatgagcacaaccatcaaaaccatatgctcacaacccaccttaaccaggttttaattatcaattaattaacaccacacgattaaccatcgtgagctaccattaattatagccataattaataataacaatataatataatgtatctttaatcccatttagttagctaatgtttctaagcatgactaagcaaacatacatatggcatttagctgaaccaatctaatatataaggtccaagctaatcaaattataacccataggaaaataaagtcatcttcggccattatttaattgggaaaggttcaccacccgatgacattcgaaaataatgcataagttgaaataaaacattagctttaaacgggttcaacatgctcaaagggttgtttgggatctgtgtgacttgccttgaacttccgcaaacgcttccgaaccttcctcaacgaaaacgctctcctccggaacgtcggaaactaaagcgaaagaacaaaattcaacaaaatagtgtaaatctagcataaacagtacatgtggatatttttaacatgtagatctcagttttagaaaaatttagcaacttgaaccactcgaatccgagctacggttatttagttatgattttccgaagtttaatcgatttcatctataaaaaacaactgaaaaagaggagatgatgacatcatgatgacgtcatcgatggcagccacggcacgggtggcgacctcgccggagctaggggggtcggccggacttttggaggacacctacgcgtagaggacaacattgcgaactcaatggtgctcaccgatacgacaaacgacgtcggacgacggacggcgacgagcttgtgcggcggcggtggctcggtcgacggcggcgacgggtctccggcgccgcgacagcggggagaggtcgcccaggcttctactccaccgtgcgcacctacggcggcaacgggaggcggcggcgacgacgcacgcggtggcgcgaggcggctgctcgtcggccggcgacggcggccgcttggacggcgtggcggcggcgctacggagcactagagaacacgggagatggggcaaacgaaagaggacngccaagggggatgctttatataggcatgggtggaggagatcggctcaggaacggatggatttggtgaaagaagttaggatttatccgagttcacccgaatataaacggccaaaattcgtgagatatataacgaatttgatgggggtttcttcgggattaggtagaggagatagagaggaatccgtttttgcaataaattttggaaggggatcaacggatgcgccggatttggtggagattggcgccggtatcgggatgaactcggcctctggacggctggctggtgcttgaagacccactgtagcgagagggacgtagattagactttaggctgggctgaggaagggagagagaagaggaaggaatgggccgaaaagggcccaagctgaggaggaggattttttattacttttccaaataaatcaatcaccaaaatgatctttgaattgttaaaaatacttccaatgctcaaataatttcaagaaaaatcctgaaaatacttggacactcaaagtattcaaaaaaattataatcagaccatttaatgattaatttaatatttgaataattgctgaactgctctttgtataattaaaattaagagttgagctctgaaaaatctgagaaaattccagagagtataattaaccatggagaatttaataaaaattaaatccatccatgctttatatttaggaaatttatttcccacatttaactttactggtaaattaatgaacatttaatataaattctaataataatttattaaataatttataaatcctaagacgaaaatcaggatgtgacaacgaggtatacaatgtagtcatctccaaaggattttgcaaccctttgtctcttactcttgcgagtatctacaatgttgtcctcctcaggatttttcttaggcgtttgatcattgtgttctatcggtgcaaagtgctcatggggcatgacagtttcttgactagaagtgctaggtgtatgtttcatgggaaattcattctcaaagaatatagcatctctggactcaaaaattgtaccaacatgcatgtcgggtactccagagtttactattaagaatctataacccacactgtgaatagcataaccaaggaacacacaatcaacagtatttggtccaagtttccgctttttggctataggtacatttaccttggccaaacagccccatgttcgtaggtatgagagatttaatttcttcctttcccattcctcgaatggtgttactttcttatgcttcatgggaattttattcaggacataacacgcagtcaaaactgcctcaccccaccattccttgcaaagccccgtagtgtctaacatagcattcactatctcagctagagtacggttctttctttcggccaccccatttgattggggtaaatagggaggcgttctctcatgaataattccaaactcttcgcaaaaggatgcaaactcattggaaaaatactccctacctctatcagacctcaaccgtttgattttcctttcaagttggttttctacctcagctttatagattttaaagtaatgcaatgcttcatcctttcttttcaatagatacacatagcaaaatctagtgcaatcatctgtcagtgtcatgaaatatttctttccccctttagtcaacacgctgttcatttcgcacaaatcggaatgaacaagttctagaggtgccaaattcctcgcctcagatgccttgtgaggcttacgaggttgtttcgattgaacacaagtatggcacttggaacctttgaccaaagtgaattttggaattaaactcatgttagctaagcgcgtcatacaaccgaaattcacatgacagagtcgcgaatgccacacattagactcatcattctcgctaatatggttcacagcattatgattattacacatgtcattcaaagcaaagcgaaacaagcctccgctgtcataaccttttccaacaaaagtctcatatttagatacgacacatttattggactcaaacacaagtctaaaaccttctctacacaatagagagccgctaacaagattcttctttatatatgaagggacatgctgcacgttcttcagctgcacggtatttcccgaagtaaacttcagatcgatcgtaccaacaccatgaacagccgcaagcgacccgtttcccatcaacaaggaggaacctctcccgacctgataagaagaaaacagagaaatgtcagcacatacatgaatattagcacagtatccacccaccaatcaggtgagtgaaaaacagagagaactgtaggtaatattttaccgtaccccgatgttcctccgccctcgctaatgaccatgttagcagacttcctgtctttgcgctcaggacaatccttggcccaatgcccagacttgccacacacaaagcagtctccctttgcctttcccttgcctttcttcttaaagttggttgcagccttgggtttgacatcaggcttgactttcttgttgttgtgggatgcttgagtgtcacgcccggaaattcacaagtaatttccgaacttatttgtgcataaaatcctcgtccaagaatcagccgaggtacacaaactgacaatttaatatacagattcatcaaattaactaaaccgataaatacttacttaagaggcacttagtcctcaccaagaagaaaactgcagcggaaagaaaaatctagcgaagctccggctccactcccacaggcagctcaactggggtataagccaaacgtcttctccttctggatcctttttcttcaactgaggttgattgattattgcaagaatgagcatatgacatactcaacaagccacacagcaaatatgcaagtgcacaaggattccaaaggatggcataatatagggttcatttgcgaaagcagcatttagcaaagatttaagataagtaaaacagtagagtaattaatcagaaattttaatcaacactgaacagcacacccatgctgcacaggcccaaccaaacctgaacaaccaaccccggtcgtacagatcaaacctccaaaccaggaattatccattccaaaccaggagtcaaattaattatcacattattaccattaatgagtagtgtgggactaatcacgaaaaacattgctcaactcgcccataaccgcgggcacggctattcgaatagttttactctggccagaggtgtaccactgtacccacaagacacgattccacacatgttgccatgccccgaagtaccaccatggcactgcaaaggaggaaatcgtgacaataccctttgcacaacacaactcaaaatagtgcaccgttcctggatcataatctccccctcaaaaccagaggaaatggactccccagcgacccccacggacttctcgccgcttcatagtctggcacaccataatgaatcatgctatacaaaaggtaaagccgttgcccacgctggcttgtggttggcacggttaatgtttcacaacagtagctcgcgaaccggtccttaattgtcatgagcacgactctcaaaaccatgtgctcacaacccaccattatcaagttttagttggcaagtaattaattaaccaatcacgattgaccatcgtgagctatcattaaatataaccataagtgatagtgaaacattagttatcccaattgtgtgctaatgtttctaagcatggctaagcaattatatctaatatctagttgaaccaatatataaagctcaactagtcaagttataataacccaaggtatcaaggaataaagtaatcaatgcaaacatgccataacaaaggaataggttcacaccacccagtgacattcgaaaataaatgcacagttgaaataaatagagaatttaaatgtaggatcaacatgctcaaaggattgtgtttaggatctgtgtgacttgccttgcaataatcggtcttcaattaatcttcttgaatacttccggcgcactcgcgaaccttcgcaacgacggaaacgacaagctaacacgcaaaacgaagaaaaagactaataaaaaccaaataaacaatacataaaaagtaaacaaacatgtaaatcataattttagatgaattatgagacttgaacggcctcattctgacttcaaatgaatttattatgaattttacaagattaaatctaattaaagcccatttaaaaagaattaaataaatttaattcaatttatggacaattttaatatgtagatctttattttacacaacttttgcaacttgaaccacattaaactgagttaagatgaattagttatgaatttttaaacattaaatcggattaaaacctttatatggattttaattaaattatgacgcaataatgaattatttttgaaaaggaaaagaaggattattgcgtcagcggctagggtttgcggtggaccgggtgcacggcggcggttcacgcgaacggacggccgagatcaaccctatccaaaacggacggccgagatcgatcggtccacgaccggctcacgggagagggcgacgatgacgtcagcgacgacgtcagcaccggcggcggctcggcggctcggcggctcggacggctcggacggcgcatgctcgccggcgaacggcggctctacggcacaaacggagggcaccaagacgtagatcacggcgcggcgaactcaccgatgaccaaaacgtcggcggaagaccaacggacggcggcggcgtcgaggaaaaggcggcggagaagatcaggtcgacggcggcgacggtgctccggcggtcttcggcggcggcgaagcggtggacggggacggcggtgaccttgcgaacccgatggtggcgacggcgaccgacgacggcggctgcaacggcggcgcggcgcggctgaaccgacggcaacgacggcggcgactagggctacgcggaggcggcgctagacacgacggcgggctaaggcaaaggtggcggcgggtagaagagacaccgggggtccttataaaggggctagcgagcggcgacggaggcccacggctgccggcgacgagaaggaaagattggggaaaaacgaatccgaatcaaactcgaatccgcctatttccaaaggaaattgaccggagtttctataagagaaaaggaagaggagatcgaggagattatttcccctcaatcgatttggccgcaaaggaaaggcgcggccggatttggaag

SEQ ID NO: 19406 - DNA, 1271 bp, Oryza sativa
atctttctactagcttccttgatgaagagctggatgaagagaacagtgtattgtactacacctcatactcactctcgcagctctcagagccaagcttggacaccttgctggcaaacctcaccaacctgcaggagcttcgtctgggcatggtggacatgtccagcaatggagcacggtggtgcgacgccattgcccggttttccccaaagcttcagatcattagcatgccttattgctcactttctggtccgatttgtcggtccttctctgccttgaaatcacttgttgtgatagagctgcactacaattatttgtccggtccgattcccgaattcttggccgatctgtccaaccttagtgttcttcagctttcaaacaacaacttcgaaggatggttccctccaatcatcttccagcacaagaaattaagaggtattgacctcagtaagaattttgggatctctggaaatctgcctaatttctctgcagatagtaacatacagagtatatctgtgagcaacaccaacttctccggcacaattccaagttctatcagcaatctcaaatctctgaaggagttggcacttggagctagtggtttctctggagaactgccttcttccattggtaagctgaaatctttagatttactagaagtgtctgggttggagctagtaggatccatgccgtcctggatctcaaacctgacttctcttactgttctcaacttcttccattgtggcttgtccggacgcttaccagcttccatagtgtacttaacaaaattgacaaaactggcattgtacaattgccacttttcaggagaggtagctaatctggtcttaaatttgactcaattagaaaccctcctgctccattcaaacaattttgtcggcaccgcggagctagcttcactcgcaaaactgcaaaatctgtctgtccttaatctctcaaacaataaattagttgtgatcgatggagaaaatagttcttcggaagcgacctaccccagtattagtttcttacgtctatcatcttgcagcatatctagcttccctaacatcttgaggcatctccctgagattactagtcttgacctttcatataaccagatcagaggtgcaatacctcaatgggtatggaagacctcaggctatttttccttgttgaacctatcacataataagtttacgagtactggatctgaccctttacttccacttaacattgaattcttcgacctcagtttcaacaaaattgaaggggtaata

SEQ ID NO: 19407 - DNA, 1508 bp, Oryza sativa
gtagcatcccttcaagcattggggaacttgcgttgcttcacgggctcaacatgtctcgcaacatgcttacagggccaattccaactcagtttggcaacttgaacaaccttgagtctttggacctctcctcaaataagctttccaatgagatcccagagaagctagcatcactgaactttcttgcaacattgaatctgtcctataatatgttggctggaagaataccacaatcgtcacacttctcgacattttccaatgcctcttttgagggaaatattgggctgtgcggagccccattgtctaaacaatgtagctatcgatctgaaccaaacatcatgccacatgcttccaagaaggaccccatagatgttctactttttctcttcactgggttgggatttggtgtctgctttggaattacaattctagtgatatggggaagcaacaaaaggaagcagcaagcttgagagggaaccatattatagaatggcagaatattttgttagtcactcttgatcactctagcaacattcagaaagactagtattaatagtgatgtatgaattaaataaaggataactatgtttataaacctttgattctacattattcatttcagtttaaaaaataaggagctaatgtttgttcaaaaaactatgctgataacagatagtggcatgaatgttaagtgatctattccctgtgagccgcatgtttagttgtttattgtaagaaaaattggtttcgtgatatccaaggatgctaacttcagaaatataccatccaacttctcaagtaccctttagtaccatctaaagtttcccacatatagataatgactatttctgtcaagtagagggcccctatgaagcacctgatgccaacaaggagaaaagatttgcatgtcgggactccatagcaacagaacaacttgcacaaagacatgaacaagaatattacagctgggggtaaaactgaaagaaccgctgcattaactgaagcaattactgggggtggcgaattgttgggcgttcgctgcatccttagttgctgtcacctggtgactaggacatgcactgagatgtccaccaatcttgacaggatacggatcacaacaaaggtgacgaaacgtgaaagcgagcaacgtgaggagattggaatggtagatatacgaaagcgtttagaactttcagatggtactaaagtgtactagagatttctagtggaatgtttctaaacatgggatcttcggatgtcacttaaccaattgtaccttttttgttcgaaatgctcaaattctaccgtgaagttctgctggaagcttgtacaatgaaatttatgatgattggttcataataggtacaattatttaaatatctgctccagcttctgtagcggcgctgctacaatagctggagcagatatgttcattagattcggcagaatacccctcacacgttgtaggcttggagcacatccaaacaattcatttgtggttaggactggaa

SEQ ID NO: 19408 - DNA, 2881 bp, Oryza sativa
aacttctacttaatggattaattacaaagatttctagttgcatacaaggaaggtggaaaaaaatgcgagacagaaagcaaagaagagaaggaatacgaataggatgatgaactgatgattacctggatggataaaaaatcgtcggcggaacacatgagtccatttgcggattagcaggtggggaaaggtggacaggttccggctgacgagggcgcgaagtcccccggcttctcatctcccgccgataatccgtcgccgtcgctgctgccgccgccgcggcgtgtccgcgaggggccgagggcatgttaagagcatcagcttcctaaaattttattcccagatttttgattatgtgaatcctaaccataaaggtgttaaaatttttctctctccaagagatgaggttaaattggaggtgaatagggatctgtcgtccgatcaaaatcttagcgtccgatttacgtgcaaaactactctaaactgatttttctcctaaattacttatccaaatcatgacccgattgcaccattaaattcgttgcaattaaatcttgaaaacaagaccacacttggatatattccggcgaaaaaaattagcttattattaaattatttttaaatattgcacgatgttccaccagttatttcggaattgtttcactgagtaaatcgaaaatgtttcactcgtttaaatcgagtgttgttttaccttatataaaaacaatgtttcagcaaatagcgaaagaatgttttagttcactgcaacattagatctatacatagtgaaacattgtgtgtacactaggtgaaactttttcggtggaacaaaaaataaaccaaattcccttaatagagggtttccaaaatatgtgggtcttttttttgttgcaatggaatgtttcgttcactgcaacattagatctatacatagtgaaacattgtgtgtacactaggtgaaacattttttatggaataaaaaataaaccaaattcccttaatagagagttttcaaaatatgtgggttttttttgttgcaaaagaaaattttaattcattgtgagtacactaggtgaaacatctttagtggaaaaagaggagtgagaagtgggtgggcccaacagatagcacgtgggggaggggcgtgcgggggagcgcccgatccagctcctcccgcgccggtcgccccggtacaagcattatcgggttaaattggtttcctagaaattgaaaagatgggccatgttaaaatctccaccggacaaatctattttgtgctccttcctcccgccagatcgtgtgcgatctcttctcacgcaagaagtgctgggagcccaggtgcatcctaaaaaagagaacgataatcctggtgtagggaatagagaatttttggaatgagattagagaatctgttagagcaaatttataaaaaaaaatcctcatatttttttatagggaatgatatacatatttctgtgggtgatactaggttgccgatcttcggcccagctcagtttgatgtactatgcatccacaacccattttttttcttttagatctaaggaataagttcacttagatccctccattttattgccaggtctgaaattcatcttgtacccagtttgatgtattcgttgtgatggctcgctaatcccagttaggttacagaccgtttgagatgagatgatctgtactagtaataccagatataacgaattttttaacttataaaatcggtgcaccgaaggtcccacgcagtatactcttcggttttagttggcgtggcgagtgggccccacttggccccacatatcagcggtctcctcctctccacatgtccgccgctcgcatctgctgcgccctaggtgaggcggcgcgtgtcttcagccacgccgtgcagagctctatacgcacgcgctgccgatcggagtagcagatgacggcggcggggcgggtggtagtgtggtaccataccatcaagttcagggtagcgcagctgtcggcggccacagacggcttccacgagtccaaccttgtcggcgacggtggcttcggcagggtctacatgggtcggcccattgcctctcattgccagaggcaagagcccccggcccgctgggctgggtcgcgcgtgtgacagtcgcgctcgaagccgccatggggttgcgctacctgcacgaggtggtgacacagcaggtgatctaccgcgatctcaaggcgtccaacgatatcgtgctcgacgcctcgacgacgacatccacgtgtccacgcgcgtcatgggcacctacggctactgtgcgcccgactacacaatgagcggcaagctcaacatctagtccgatgtctacagcttaatttggcgtgctcctcgagctcatcacgcacgcaaggccttcgacgctgcctcctctttgggcgcggccctacctcgtgcggcgaccacaagaggtgcttcgatcgcctggcctgttggaaatatggtcatgaatcggcatattttaatccaaaatgttaagacaataatcatggcataagcagtgtagagtgatctagtgacaacatgtaacataaccagtagcatactaaagacatcatgcgcatcatgaatatcaggaacaaaaacatagcagtaacgcaatagcatgctagaggcatcatgaatatcaggaataggaacatagcagtaaagtgctaacaacgggaacaagaacaggagaaggatataccccgagaatggccctccgctggattgtgaggcagaattgcctccgttggtgttgttgttcacgccaccggctccagctcctggcgcaccacctccggctccagctcctggtggcgcaccacctccaccatctcctccagcagcagcagcagcagc

SEQ ID NO: 19409 - DNA, 1775 bp, Oryza sativa
gcgatcagaacagatcggactcgcggcctccttatctatcaggagaaaggcagtcgtgggaacgtgggaacgtgtacgcgctgttgcggaggcagtcgtgggaacgtgggttagtggctgcaaaagagtagcgacgtgacgcacgcacgcacgcacgcccgccagccacacctcgccccggccaggcccgcgcgcgcgtgtggctttccgacccccacctcaaccagtcaacagggagcctccaataactccctatttaggttgagatattcctcgcttaaatcctgatgtggtattattatacttaacacttattatgggcctttgagatttaataggataagttgggcctagcccaattattctaacaatccccaccaaatttcaaggctcataagaaatgttctcaatgttgtgcctgtttgatataccagggttttggtggagactgttaagttgaacttccacctaggaaatgagctacatcagaccacaactgaacaatggactgtgccttgaattgtcagttttgtgtgatcaggtttcactcagaaccttgactggtactgggctgccgttcgcatcccctctgtttggagcatataagtcaaactccaggcctttcatgagtatctagagatcgcccaaacctcatagactgtgactagcagtcgaactcatataggtgtgttccttctgaaatgttctacaggtcaacatctctgcttggaaaagtcactcggatcacattaaggcatgagccatcctaccatgcaggaaagaagagaagtatatcatgaaaatgagcccttttcaagggtctcttctctcagtcacacaatagtttgtttcgccatccaaattcacgagatctccgatcacaatggacaggtttccactattgtgcaaccttaggtaggtatcatgcccatttccctcgatgcactatctatcacattacgtggtagccccttggtaaactgatctgccagatttctagccgtttggacatagtccaatgctatcactccggagtttttctactttctgacagatttcagtcttctcttgatatgcctagataacttcatgttgtcctttgaactgttcaatttaataatcactgtttgattatcacagttcattaggatagctggcactggtttttcaaccaccgacaaatccatcaggagttcacgaagccactcggcctcaactgtcgcagtatctagtgctgtaagttctacttccattgttgacctcgttaagatggtctgcttgcaagacttccaggaaacagcgccacctccaagtgtgaacacatatccacttgtgacttttatctcatcagcatcagatatccagtttgagtcactatacccttctagtacttttggatacccggtatagtgaattccatagctcatagtgccctttagatagcgcattactctttccagagcctgccaatgatcatctcccggatttgagacaaaccggctcagcttgcttacagcaaatgagatgtcaggcctcgttgcactagccaagtatatcaatgaaccaatgatttgagagtatctcagttgatcccttactattcttcggttttttcttaatagcacgctgggatcataaggagtaggagctggcttgcagtcactatatccaaagcgactcaaaaccttgtccacatagtgggattgcacaagtgtaatcccaccctcatctcctctttgtagtttgatgttaaggataacatcagcctctcccaa

SEQ ID NO: 19410 - DNA, 8202 bp, Oryza sativa
ctgcagcccaaatcaaacgggcgaggaggaaagggatgctgatggtaacaacttgcggatgatcttggtcagatgttgcaggacgccaaggaggattgagaaagtgaaaagggggcccataaattggacaagatgttagaggaccacagaatgtcgttgtacccaggttgcgagtaggggcacaaaaagttggataccactctggagttcttgcaatggaaggcaaaaaatggtgtcagtgacaagacatttggcgatttattgaaactcgtcaagagcattcttccggagggaaacaagttgcccgagacaacgtacgaggctaagaagatagtctgccctctaggactggaagttcagaagattcacgcatgtccgaatgattgtatcctatatcgcggtgaggagtacgaaaacctagaagcatgccctgtttgcaaagcactacgatacaagattagacgagatgatccaggagaagttgacaggcaactaacgaagaagagaattcctgctaaggtgatgtggtatttctctataataccacggctaaggtgtttgttcaggaacaaggggaatgctagaatgatgcgatggcacgctgaagagcgtcaacaggacgggatgctgagacaccccgccgatggttcgtagtggcgaaacatcgatagaaaatttaaagactttggaaaggacgcacgaaacatatggtttggtttaagtacggatggcatgaatccttttggagagatgagcagcggccatagcacttggcccgttacgatgtgtatctacaacctccccccatggctatgcatgaagaggaagtacataatgatgccgattataattcaaggccccaagcaacctggtaacgacatcaatgtgtacctaagaccattggtcgaagatcttaaactgttgtggaagaaggaaggtgtccccatgtgggatgaggacaaacaggaggagtttaacctacgagcgctgctgttcgtaaccatcaacgattggcctgtacttagcaacctatccgggcagtctaacaaggggtacaaggcttgcactcactgtatggatgaaatagaaagtacgtatcttaagcactgtaggaaggttgtgtacacgggtcatcgtcgatttcttgcagcaaatcacccgatacggaagaaaggcaagcactttgaacataaggcggaccaccgtatgaagcctaaacatcgcagcgggaaaacagtgtttgctatggttaaagatcttaaaatagtgtttggaaaggggcctagcagccagcctatagagagcgaagatggtcacgcggcgatgtggaaaaagaactctatatttgggagttaccctattgggaattcttggatgtccgccacgcaatcgacgtgatgcacctcactaagaatctttgcgtaaaccttcttggcttcctaggtgtatatggaaagtcaaaagatacactggaagcacgtaatgatctgaagcatatggaacaacgcggtgaccttcacccggaaccaaaggagaaaggaagccattacttgagtctagccagctacactcttagcaaggcagagaaggaaagtatgtttgaatgcttggagagcatcaaggtaccgtttggatactccacgaatataaagcgaataataagcacgaaggagaagaagttaacaaatctaaagtttcatgactgtcacgtgttgatgacacagctgctaccagttgtaataaggggtatcctcccagacaatgtccgggcaacaataacaaagctatgtgctttcatgaacgcaatttcgcagaaggtcatcgatcctgatagattagaagccctgcagaatgatgtggtgcaatgtcttgacagctttgagttgatatttccaccttcatttttcaatataatgacgcatctgctttgtcaccgtgtcaaagagatcggtactctcggtcctgtgtacctacacaacatgtttcctttcgagaggtacatgggcattctaaagaagtatgttcgtaactgtgctcgtccagaggcaagcatcaccaaggggtatagaacagaggaggtcattgaattctgcgtaaaatttatcgaagacctttgcctaatcggggtacctgaattacgccatgaagggagactacggggaaaggagactctcggaaggaaagcaataatgacagtagacaacaatttattccgtaaagcccatttcatggtgctgcaacaatcttcattggtggctccctacatcgaggagtacttggctctagttcgcgccagaaacatcggtaagtccgatgcatggattacaaggcatcacattaatactttctccacatggctgcgacaacatctcatgggtaacgagacgattaaccaacaactggccttcctggcgaggggaccatctggctcgatcgcgacattctagggatatgaaatcaatgggtacacattctacacgagggcccaagacatgaagagcacgaatcagaatagtgctgttcgtatcgatgccatgggacacgatggtacaactggcacgtattacggtgccatcgaggacatatgggaacttgactatggacctctcaaggtccctctgttccggtgccaatgggttaggttgactggtggaggcgtaacgattgatgacagtgggatgacaacggttgaccttaacaaggttggatactcggacgaaccttttgtccttgccaatgatgtaacccaagttttttacgtcaaggacatgtctagcaaaggaaaaaagggcaaagggcctgacgagccgaagcgccacgtggttctcccaggaaaaagaaaaatcgtcggagtagaggacaagactgacgaggattacaatcagtttgatgggcaaccccctttcacggtgacgattgaccctagcatcctcctatcaaatgaagacaccccttactcacgtagcgatcacaaggaaggaacaatagtgaggagaaagtacgtgcggtcaaccgtcaccgccgatgtattgccataattgttctgtacacgatgtaaactatgttggatgtactgaatatccatacaaatcaattgttgtatggcatatattaaatatgtatgattattagaatttttatcaaattgaaatcatccatatgctagttatatatgattattatattttttttaattatgtatgattattagaattttaatcaaattgaaatcatccatatgctagttatatatgattattatattttttttaattatgtatgattattagaatttttaaaggttttaaatcatgcacgtggcatttacatatgttaatcataattttcaacaatttaatatcatgatatgctagttatatatgattattagattttttattaaaatcatgcatgtggtatttacatatgttaattagaattttcaacaatttaatatcatgatatgctaattatatatgattattagattttgtattaattttaaatcatgcatgtgctatttacatatgttaattagaattttcaacaatttaatatcatgcatatgctaattatatatgattattagaatttttaacaattttaaatcattcatgtgcttattatatattatccacgtattctactacgtacaacaataacttttcgaaggttttatcattaattgttcgactttaaataattgtaatgcattaattactatcttagaaacacatatgcaatgaaattcaagacacagctgctattatctttagtcccagttcctaaccctaacctggtttaaaaagaatttggaaatagcgaaaaaagatctttagtcccggttggtgtcaccaaccgggacttaaagatccgggggtatatatattcccggtggccctcgtcttctccaccaacacttagacgtttttcgatcttggcttctccttcgccgccaccgtgcctagggcaaccccgcgccgacaccgccgtcgtctctcgccgtcgcttggcggtcctcgccgcctccgccgcagacgccgccgccgcatcacttgggtgagagccgccgctgactctctctctctctcgatctcgacctcgatctctctctctctctccacggccgatgaccgacttcgacgcggccgccgccgccgacgacgccgtcgccactaccacgaacgccgcccccgcctcgagctcgccacgccgccgggccgctacgccacgccgccgcgacgccacgccgtcgcccctgccactccgccgccaccgcctcgagctcgccacgccgccgcggccgccgcgtgccgccgccgcgcccccacgccgccgggccccaacaccgccgccgctcccgcacgccgccgggccccgatgccgccgcacccccacgccgccgggccccctcgccgccgccgccgcacccggaggccaccaggccggcccacggcgccctgacgccaccgccgcaccgccacgccactgccgcgcgcgcccaacattgccgaacgtgattgaaacgtgaccgaacgcgaacgaacgtgaacgatacgtggacgacctttgaacgaacgctgaacgaacgtaacgaaacgttaacgaacgtggacgaaacgttaacgaacgcgaacgaacgtgcacgaaacgttaacgaacacgaacgaacataacgaaacgttaacgaacgcgaacgaacgtgcacaaaacgttaacgaatgcgaacgaacgtgaacgaaatgttaacgaacacgaacgagcgtgaacgaaacgcttacgaacgtgaatgaaacgcttacgaatgcgaacgagcgtgaacgaaaagattacgaaacgtgaacgaacgtgcacgaaacgcttacgaacgtgaatgcacttgtactaaaagtgtgagaacgaacgcgtttatactaatacgatttactggtaatatatatatgattatatatgtaacttggcccgtctagactaatacattttcctggtaatgttgcagagaagacgtcgtcgtcgtccctcaagacgaagtggtagctagccatcgaaggaattcgcgcaggcaagtgatgtaaagaagtgattgttagatatttaatatatgattgttagacttagcatatatgattattacaattttaatataagattgttatcgatttaatataagattagtagcgatttaatataagattgttatacttagcatatatgactattacaattttaatataagattattagagattaaatataagatttttagagatttaatataagattgttagacttagcatatatatgtatgattattacaattttaatatgaaattagtagccatttaatataagattattagacttagcatatatgactattacaattttaatataagattattagagattaaatataagattgttagagatttaatataagattgttagacttagcatatatatatgattattacaattttaatatgagattagtagccatttaatataagattattagacttagcatatatatatatatatatatatatatatatatatatatatatatatatgattattacaattttaatataagattagtagcgatttaatatgagattagtagagatttaatataagattagtagcgatttaatataagattgttatacttagcatacatatatgattattacaattttaatatgagattagtagcgatttaatataagattgttagacttagcatatatgattattacaattttaatataagattattagagattaaatataagattgttagagatttaatataacattattagacttagcatatatatatgattattacaattttaatatgagattagtagccatttaatataagattattagagatttaatataagattagcagagttttaatattacggtacgcaaatacatcctatatacctaacaaatattttttgtatgcacagatggctgatcgcgatgaggaacagatactatacgatacaatcgcagagggaagcagccagtactggaatgaaggagaggggaacgaggatccaaaccagtacttgaacgaggaggggaacgtggagagggatgcggagggaacgaggaggggaacgatgaggaggagactagtggaagtcatccctccgctagacagaagagggcacgtggacaacaaggtgccgcgaagaagacagagggtcggcacatcataactgaggtggacgaagacggccgacctagtgccccggcagaagcagccaagaattttgtacgccacagcggttgggttgtgagggacaacgtgcctgttagcacggtgtactggcgcagaacaagggcacgcggggataatgacagctttggtcccgcgactcagagtaaatgagcatgttgtggaccacaatggctcgagacgttcacgctacccgcgggtacggagaacatagtgaaacagtggactatgaagaaaatggcagaacagttccagagcttcaagggagatctctacaagaaatacatcctgaagggactaacactgaacttcgacgtattcccaaagctaagggatcattgggacgagttcgctgcttacaagacagggcaacaagggcaagcgatgatggccagaaacaaagacaatgccgccaagaagaagtaccatcaccacttggggtcaggcggatatagcgtcgcaatgccaaagtgggaggagatggaggcaagtttgattgagaggggtatcgaaccggccaccgctaaatggccggatagatcgaagttttggtactatgctcacggtggaacgcttaacccagttgatggctcccttgtcttcagcgatcagatacgcgaggctgccagtcgactaacggacgcagtggtagcctcttctcagggtacattctgacccgacagagagaaggatgagctgtcactcgccctacagactcccgagcatccaggatgaacacgagggaaaggcgtgattccctggaagattggatttaaggaggacatccacacgtacaggagtcggatgaggagcaagagagataccgaggcgaagattgcagatcttgagtacagggtatcgagctacgagctcagcatgcaagaggaggtgtcaaggaaggtggatgaacgtatggccgcacatcggtcccaggatccccagccgtaaattcatcctgcaatggtcagcccatcaggcaatcgtagcagctgcgcctcaacggggcaggtcggatcacagagcatggacgccatgcaaacccatgacgaaaccacctaccccgttgatgagatcatgcagcggacaccatgtgagctgcatatttccttcaagaacttatcaatcaaggtatgctcgtagtttgatgatttttgacttgtacattccgcaagttgctgcttaggttgattactaatagataacctctcatcacgtgaaggtggcgtcgggaatggccatcccaacggacccttccgggacttaccactgcaggccgattccagcaggatactcgagggtcgaagttgagctggtggaagccgcgtacgaggacctcgagttggactacccaggaggagacggtgagacgtatctacgagacacaagccacgccatcatactatggcgcaagcggtacatcatccttcctgggagacaagcggcgtctcgtgcaccatctcctctggctccgccatctcctcctgcaccatctcctccgattcctccaccacgtcctcctgcaccatctcctccggctcctctggctcctccgcctcctccgcctccaccgtgtctgcctgcacctcccaagacaaggtctcgccaagctccaccacctgctcgcacaagggcaacgaaaaaggcgaaagttgacgccaccaaaaacaaggagccaccgtacgattgcagtcaagagagcttgatgcttatgtggcaggagaggtgaagaggcaactcaagcctcggagtcctgaaaagaagatacctattgacccgagcgtgaagaacttcttcaagggaatgtccacaacaaacaaggaggcgttacagatatcggactatgaccgaacacttcagagagcctatcacaagaagtccaaaccagtccctcagcttggagaacaaccaaaccaagaggtcgagccgttggtgaccggcgaaga

SEQ ID NO: 19411 - DNA, 1427 bp, Oryza sativa
taatcatagcttgcaactgcatatgtagggcttgggatcggttccgtcaattggtccgcggaacttggaaagaaaaacttggacggaggtttcattttccagtgagtacatgcatgatccaaaattatattgaattgaatctctaattacagttaatataaagagtatattaaatctttcatcgtttctcatgtagtgtgcaaagcaggaccagggaactaacttatgcggctactacgtatgcgagtatgcctactgcctatcaaaccaaatatgcacaacacgagagctcgatgtacgtatacataaaccattcaaaagttcattgcgtatcgatttgttaagttgtttattaatttcatatattgatacgtcattatttttcgaatgatagcgtattcacatgagtgataatctcccacacaaggattttatcacggcttttcaagaataactgatgggattcatcaacgaaggagtctttaatcccgacggtgaattctactacgacggatcgacaattcataacgtcggtccttcctcttctgacataatgccggcgtcgaagtcgtagctatatatagctaccgagcaaaagaattgtactatatacgcatgtatatatatatttatatatgtacacatttacttttgtgttaatatatattttggtaacatatatatatgcacataaaatgttaagtgatttaaattatacatatgtgtgtgtaatatttgatttacacacacacacacacacacacacacacatatatatatatatatatatatataaaaccaaccatgcagcaaacagggccatgcaaaaaaaaatggtgcaccgatctttagtcccgattggtaacacaaaccgggactaaagatggtttggccggccacgtggctgatcgatctttagtcccggttatttcacccgggactaaagatagctatctttagtcccggattcgtagtcccggttggataaccgggactaaaggggggttaccaaccgggactacaaacggtttctccaccagtgatagttggagaaatagagatatgaaggggttgtgattagttgagaagtggagctaggtgggaaaagtgaatgacggagggttgtgattggttgatggagaaattgttatattttggaacaaattctaagtgctaaaagttattatattttgggatggagggagtattagctaaacttttttttgaaaatagatcaatatgatctttttaagtaacttttgtatagggaagtgagttgggcactcttgctaccgaactcagcctaaatgcggtgataatggctttatcctcaaccggtcagtactcaactaattccgcgtgaacaaagtcggtgatcgtcatgtttataagaattatcttcaacaacgtgaacaaaatgaggtagc

SEQ ID NO: 19412 - DNA, 2778 bp, Oryza sativa
tgtacatatatataccgttttaattcgcattgaaaaaagcaggtgtccttagcttgcaaatcatatatatagctcgccacaccaaacacttgtgcgcgcatgctccaaacttgtgggcaacccaaacagctactagtaatatatctttagtctttacacgccgacgccgatgataatatacgctcggaattaaacacatatatgaatggaccagtaataactcattaatatttaattacttaagagaactgctgtgaggtcgagaaggtctggccgaacgtccagcccgccggggcgacgtcgaggaaggtgagcgtctgccgtcgctgctggtgaccttgaacgacaggctctggccgtcgaggtaggcgttggactgccagttgacgccccaattcctggacatggccatccacccggtcctcgaccccttgatcgacaccgactggatggagccgacgccgccgacgttggaacgagcaccagctcgaagtagtccctgccgttgatggtgaacctcaccccgccctgcttggcgcacggcacccgctggtacatcaccggcacgatgccgccgacgtagacgccgatcttgagccacgccggtcggccatgtcgaagtgctgccgcggcgggttgcaccacccgccggcgtcgttggggagcgcgtagttcggcgggcagaggttggtcgccgtgatggtcaccgacgtgccggagatgcagaaccgcctgtccgcctggtagtcgcacatgatccggtagcactgcccgcacgacgccccgtcgttgaacagcaccgtgctcagcgccgccgtgttcgtcccgtaccccgtcgagtacaggtccccgtacccacacgccccacctgcacacacacacgacgacacgcatgcacatgaaccaacgtcaccgattgcacgatggatccattcctagctacagtagctagctagctacgaacttacccatcgttcctgaagcgtcactgccgccgtagaaggtggcgaacgccttgttccagccggacgccgtgaacgatgcggcctcgttccagaggaggcatgtcgccagcaatgccaggaaccgagcacacgacgttgcggctgacgagccggccatgtgtgcgcgcgtgtgctgccggtgaatgtgctgctaatggccaaactcagaaggcaggtagtgtcgcttaaataggcaggagagctgtagataacacatgcacgcaagtagtagctagttatttggttcggtgtgaggtgtgctgcatgtgggcagcttctcgggagctgacacggacacgagcgaggggtgcgtccagatcggtcggcgcatgggagattctatccagtcggggaggcgccatgttcgcgtcaataaactgttggtggcgcctctgacgtgtgtcgtctaggggtcgcgcgcgcgcgggtcgggtcgatcgatgatgctgcgttgcaggttccaaactgtcggcgctcgctcgattgatcgatctggtcccggtgtagatctggccacgcgcggtagtacactgtgtttttgctgttcggcatagtgaaattcggctgcttctgatcgagtgttttcttttttttcttttggcggtgattgtgcgtacgtaacgcaacaaaagtgctcctttgggagtatacgtgatgtgcaggtaatatatgttccgaccacgtcccggtatataaatgcgacggctaaataactgatactggataatatagttagctcaaattatctcgagaagaaatttatatgttgtcatgttggcatggctaggagatatataaacatgttacatgtcgttctgttaaaacatgtcaagtagtatttctctaatttgtctgtggagaacctattacgatttttatctaaattattgcacatgtgtggttttgtttttgtgtaacgatcaatgttaaaacttcgctctcccatggcccacaaggcttccatttagttgtgtcggtcacatatatgataagatccggttcttccaatccagatgaacttcatcattgggagcttgggtcatggagctttcgcaggagtttgatgctacatcaatcaacaagtacaagatttaacccagtcaaattaatacgatagaaaaatggattactgtgttaaaaaatggaaaatgaccatctttcagccttaatttcatgctgcgtggtcatctttatcctgtaattatggaatattccaaagttttcattttaatcctttgaaaaaatatcccttcaaaatattgttttaaataatggaagaggaactctaataccaacatggcatccccaactgtagttgagttagaacactatgggtctgtcgaatttaaatgcctaaaaaggtctaaaatatcagcttataaactaactaggaattcaaattatgaacttataaaaagctagccaatccatgaaaaatcaactttccagacgataacgatgactgaaaaacaagcttggctatttaattaattgtcgttatcattccatctcatctttcactatctttcgcaggttacccaaccgccataacaatcttccccattcatttccctctcactctactgcagccacgctttttttggatatttaactatatagttgtcactcttacaaaagctaactcttcaaataagtttagtcctacaaatttgccaccagagagaagccattttttccactgtgaagtgatatgtatgcttgctaacaagctggattttttacattttgatattttttttacaaacagacttct

SEQ ID NO: 19413 - DNA, 1659 bp, Oryza sativa
atggacagacacaagaagagaaaccggggaaaactacttaggaccgagaattactttaacttttattgatcttaagtgagtttcgttattacaaactgaagactctcacaccactaaactcaccaactacctaacactcgaaagcaaacaaacgcacgcacttacatcccaccactgatgtaaatcacatgcgagacccacacaaccaaacttaaacaaacaagctaacacaacgatctaagataacggcttgacaaggcactctaggtcttccgggcatcggagttgatgaaggctcgttcggctcgtcttcatcatcttgagttgctccccactcgatcttggaataggtgcgcttcgattcttctcctttatcatcacttacattgacgaccggaggatccgctagggctggggtaacttctttctccaccacacggacctttggcgccaattggtaacgagggacaaatagagctctcttccttgcggtaaggcgaaccctggcctttagcggtggggcttctcccttcaacgcggctagttccttctccaaacgatccaccttgtcttctagcttgcaaatcttaccacgattccggtcttcacgatcttgagccgctaacacagtctccgcacaggtttcatccatagcccacagcatctcaaccaaatgccttgtggtagcatcattctcaattccttcagtctcaaggtagctgccacggtcactcccctgtggttggcgaggatggtagcgatactcagtgtcggccaactgatcactatagcgatcgcggagctctcctatggcgattcttgccacctcctgacatgcatgaatgtagtttcttcctccagcttcgaacatcaccgaggggatatcttcactattactattcaaggtgactttgactcggcacttttcttcgtgacgatcatgaggaatctgggcataaaaaggggcagtcctaaatcctatggcaaaggacatcgtacgcaactcctggacaaatccctcaacaccaaacaagtactcaggcttgtagcgcggcatctaaaggcaagtgaaaggagggagttaagacatttatccaattaatagcacaagtttttggattaatttgaataaagttagaaaatcaaagtaaaaggtaagtaaataaagtaaaccaatcttgcaagataagttgaaatagttggaaacaaggtcataaattctgtacttttgaacaacaggttctaaaagaaataaaagaaagttataaaatcaacatgctaaatttatttccttgcagcaagattaaataaaaccatattgtagaacttttgctggtaaatgtgccattagtacagtaatagatgtatagtactaacaacgctaaaataaattttgaacgggaaccactaaaaaaaatattaggaaatgcatgtgccattagtttggtttaattaaaagagaaggagaggagaacagttctacttttccaatatttttagagggcttctatgggtaaccatttggcataacctaaggtcaaaggggctctgataccaacttgtcacgcccggaatttctatccaaaattccaaacgcttacatgtgtgtgaaccctcgtccaggaatcagccgaggcacacaataacaaattgataata

SEQ ID NO: 19414 - DNA, 2117 bp, Oryza sativa
gacggccgagatcgatcctatccaaaacggacggcggagatcgatcggtccacgtccggctcacagcagacggccacgatgacgtcagtggtgacgtcatcgccggcggcggcagcggctcggcggcttggcggctcgggcgcgcaagcttgccggcgaacgacggtgcggcggcgcgaacggagagcacccacgggtagcggacggcgcggcgaactcaccggtgaccaaagaaacggcggaggagcagcggacggtgacggcgacgaggttgaagcggcggagaccttcggcttgacgacggcgacggtgctccggcggtcttcagcgacggcgaaggggcggacgaggacggcgacgcgacggcgaccacgaaggcgacctccccgagcgacggcagcaactggagcgacggcggcgcacggctggagcggcggcaacgacggcggcgcgaggtcccacggcgctagggctcttccgacggcgagagacgaaggcgagggtggcgacgggtagaggagacaccggggatccttttaaaggggctaggaggcggtggcgaaggcccacggcgaccggcggcgggatggaaagctcgggctcggagaaagagagagaccgatccgaatcgacctcgaatcaaacactttccaagtgattttagccgatgattccataagagaaaaggtagagaagatcccgaagattgtttcccctcaatcgatttcaccggatcgggaaaggagcggccggatttggaaggaaacggcggcggcgcggcactagggtttcgggcggcagcgacgcgaggaagacgatcggtctgacagatgggccccacctgtcagcgaccgagcacgcgcgcggctgcggactgggccgtcttgagccggggggagagagagagagggttttgggccgactttcggcccaaagccaaaagagacttttaaaaacctttttcaattaaaattattcatgaaatgcaattccatttattaaaaatacttccttagctcaaataaatcccagaaaaatctaggaattatagaattaagcaaagtatttaatgaaattttatctggccccattttatattggaatttattaattaaaattagatcttctcttctaggcttttaaaataaattctaataattccaattaaacaacaatttatatatttaggatttttagggtgtgacaagacatcggacggacgagggcagattcaaggtacaagggttgggttaggcagccttcagtacctttgtttaggacaggaaataacatatacctttatttaggggaaaaagtacgaattatactctcgaactatcgcggtcgaccgaattaccccccaaactcgaaaaccagacatagctcaccctaaactttcaatattgcacgaattacccccctcaacccaatccaaagctaggacaatttagtcgggggtggcgtgcacctggaactaccatcagcttattttttttatggtggggcggagggatcctgcactcttttaccctcttcctcctcttccctctctcttggcgttctcgccttctcagcaaagcagcgcgcggcggcggacgatgggcggcgccgtgggatgcggaggcggcggcggcgtgggatgcggagccggcggctgcgtcgctttctcctcttcccctctctctctgtctctctctctggcatcgttgggcgcgggtggcgggtgcggctgggcgagcgacgatgagctgcgggcgcggctgggcgagcggaggcagctgcgggttccccggacgccgcagcagcttcaggagatcagcgacgacgcaccgcgcattcttggtgatcggcgtagagaatgccctgcacctgacgcccgacgcggcaaagacgaagcatgtcgctgcagaagcaggagcaggcatggttgccatcgatctcgccgaaccattcggagctgtgtcgagcaaagcaagtgatcgataatagatggctaccaaaaggtagaaagcagttaagcagaagattgctcaaatgctgttcacggcttgagcataacacacgggcagtaggtattagtagctagtcgtgtgtccctcggctcggtcttcgttttt

SEQ ID NO: 19415 - DNA, 10629 bp, Oryza sativa
gtccgttcagctggcgaggcctttgtgccacctatatatgccatgttccttgtattaggagattggtttttagttttcctctgtgttgtgccgccgccaccgcctaggtcaggaaggagatggcgattccatacgttttgccaccatcatttctgtgatggttaatttggtcctaggcatgttctgatttctgacgaagtcttcttgctctgatcggctatcattcttgctgcatgggtggagtttatgtacatgtttcgctagtttattcattataaactgaatcatctatctatcttaaatttggtgctactggagctattcagttcagtttatctggagtaaacgatcttatgtgtgcgaccctatatactttgctggacgagatctatatcttaatattgatgctgctcttgattcaactagagattagggtgtacatatatatatattctcgctgcattagaaaggacacatttatcccataccaagttgtacactcaacatagttatgtttacatcccaattttaagagatcaaaagcatttcaagaacaattgatagaacgtagacctccaatataaccaaagaaacagaaaggatggctggagttcagacaaaatttgggctaaatttaaacaaaatttgttgaatccaaagcccaatataaattgaagaaatcatttgaattttttttgcttaaagttcaataactattcttaagaacacgaatttcttaaagtttagaactccaaaacgaagatttgatatgtattaaaaatgacatttcataggaaccaacttcatttttgcgacataatactttcctataattaaagatttcatgtttgtaagtaattttagtttagaatttatgtgttgcaaggataattagcattcaaaatattcacaaacaaaatattgacaaaaaaacaggttgccaatagaatcaggaacaatcacgcatatacaaacattatattcacatgtgtagagtaatatttcaagcacattaaattagatgcccgcgcatatgcgcgggcttcctttttagttgttctaattttagaaaaactatagtggcatccatccgatttcatgaatagtaatattatttttgcaatgcgttgtatttgcagtggcattgatccaattaatttttttattacctatcattgattaattaattaattaattacctatattgattaattaattaattaacatacttttttaagaaaacaacgaattaattaactgagccgaccctatccaagcgagccgaattaaaaaaagaaaaaaaaagaacaaaaaagaacatacgctgatcctatatccatccgccctctcgctctctggtccgcctcgaccgcgcgggtgcctcgattcttccgcctcatcttatctcccctcctccgttcacatttccaccccctcaccctccttttcacactcgccagcgtcaccctccatcctcagctcctcccctccccccacaaaactctcactctccccacctctccttcgatctgccccgtctcgcctccctcgccggcagtggctccctacatcccgtctcgcctccctcgccccctcctcctctccctctcacctccctcccatggtggatacggctgcggtggtggcgggttggcggcagccaccagcggatccggcagtggtggcggcgggtagatcgggcggcggatccctcccgcgccagatccggcggcggcggctccctccgcccctcttgtctccctcctgtggcagatctagcagcgtcagccacagccacgagtagatctagcggcggcggccgcgggtggatcgggcgacggtggcagctgctgagggcagatccggtggcagtccgcggcacgggtggatctggtggcgccggcggcagccgcgggcggatctagcggcagcggctccctccaccccatcccgctttcctcccgcggctgatccagtggcggtggcggcgtcggcgtcgtccgcgttggatccgttaattatggcggcaaccgtgggcggatccggcagcggcggctccctcctccgccttttttctctttctggtggcggtggtagcgtcggcggtggctacggatggatggtggtggccgcgaatggatgcggtggcgacggccgagggcggatccggcggcaggcgagtgaagttttgtgatgtaatatattgttatttttcttggatgtttattttgtgatcttgtgattgtgattgattttttggggacagtgatttgttgtgccgattttgggaagattccatgtatccgattctgagagtgattgggattcgggggtaggggctgcgaaggcagaccgctgacggatgaaggccgccttcgttcgtcttgtgacgaatggaaaaatacgaatcttttaattagttaagataacagtagagaagagatatagattaaaaccaaaatataaaattaaaaccgactcaaatacggatgacgaaccgcagaaacatcttcaatttttataaccaactcaaacacagatgacggaccgcggaaacatcttcagtttttataatagtaacataaaattaaaatcgactcaaacacggatgacgaaccgcggaaacatcttcaatttttataaccgactcaaacacggatgacggaccgcggaaacatcttcaatttttataatagtagagattgagttcaacatgctcaagggtgaatgtttaacttgcctttctttttcaaaaaatctcccgaactcttttcctcacgatagcgatcttccgaaatggcggaatctacaacatggcacacaaaacgagaaaaaacaccaaaaaaaatcaaataaatagtacataaaaagtaaaaaaacatctagggctcaattttagattaattttgtaggttgaacggctcaatttggagtttgtatgaattagttatgaattttaaaagtattgagccatttaaatcaatttctggaattaaaatcgattttctaaagggaaaaggaaagtgctgacgtcatgaaaggggcgaccagtgctcacacgggggccccacatgtcagcaggtcaatgggagggcagtttgtcatgacggagcgtctgatactaaaaaggtctaatactacaattatcccatcaactgagctagtggtaattaagcatggctaagcatatagttctaaatgggtcacataagtaacacgagctagtcgatttattacccaaggttgacaaagggccgatatcaagtaaacatggcacaagcgagtagataggtaatacccggatcccatgtaattagcaaaacaatgcatgtttatttgtaaacgataaaacatttgtaaattaggatcaaaatgctcaaggagattgtgtgacttgccttgtttcttcacttgtatcttctgaactcttatccttgcgaccgcggacttccgaaacaacggattctacacgctggcacgcaagacgagaaaaaactctaataaacaagaaaacagtatataaaaagtaaacaaacatatagagctcaattttagatgaattttgcaagttaaatggctcaatttggagtttgtatgaattagatatgaattttagaagttttgagcgatttaaatgaatttctataattaatatcgatttattgcgcaatttaaacgaattatgacgtcgccgaggggagttggtggcgccggcaagtgggccccacctgtcggtggctcaaagggcgggcgcacggtggaccgagtccacgcgcgcgctgcccgcgggcgcaccacgtggcagccacgtgacggccacggcgaacaacgggctgtggtggcaaaggcgtggcgccgaggtggcgccgatgcgggacgacaccagggcggccacatggacggcctggattcatccacgcgcatgagcgggcggcccgggcacgggcgtgactcaagccgactcggccgagccatggtgcggcggcggcacgcgaccggacgaccgccggcgatggcggcgcgacgcagcggcgaacacgggaagtggcagagggggaaaaaggaggggtagggaattctcactgagcgccaaaagggcgagggacgatgggcggcggtggcgcccttgcaggttggcggtgacggcgacggtccggtggcagccggcaaacacggagctgcggacacggatggccacaacctggggatggcggcaatgaggttaggagaacacaagatggcagagaacagcggggaaggacggccagaggaggaagaagagagagtgagctcaccttgcgcggggagaacggagtctcggtagcgattggcgagggtggggggcggccgggcatcatcaaggccctgcgaagctggaggtggagatgtgctggccagacgcggcgtccattgccggcagcgagcggctcggagtgacaaaggcgaaggttgctcagttttgcggtggaggcaaggtttcggtggtggaagggggaaatggggtggaggccgggcttggcctcgagacgatgaggccgatggaggtggtcgcgtggcacgacgatggctaggacggcggcgaggtacggctggaggcagcaaatggcagtgatagctcaggtgcacggtggaagaggagttccggtggtggtttgtggaaacggagtggtggccggtgtacggcgcgaagcggcgaagctgatggtggtggcggctcggtgcagagacggctagggcggtggtggtggccggctggacagcgccggcgagcggtggagctcgagcacgcgtggggagcacgggagagggcgcgaggagctcaggaggaaggggaaaacggaagaggagagcacggggaggctttttatagcgcgagggagcaacggggaggccgggtagtggcgaatttggagcggcaacggccggtgacgtggagctcaacgtgggcagagtgggggctcgatttggtgccaaaaactggggaaaagtgggggatttggtggaggaggtggaggggaaccgatcccacgtgtttgggcgcgagggcgcgagcgggagagaccggaattgggggcgacgtggggcggcaaaggcgccgcatggcgcggttgggggcggctggaggtaggagatggccccgataggtggggcccacctgtcggcggctcgaggagaggagggaggaggggggaggcgagctgggctggcggcctaagaaaggagaggggaggaggcggaagggccaggaagggaaaggggaggcttgggccgagcccatgagggaggggaggggattttaaattgttttctttttatttaaattgattaaatgaactttgtattattaaaattatttcctgagctccgaaaattcgcgggaaatttcagagagttcattagggcgcaaagaacattacaaaatattctcggccatgatttttaagtggaaaattttaattctcccaatatttcacttgattaaattgctttaacttttatttaatttctagaaaatgatttatttaatgatttttaatcccaaacaaaaatcggggcgttacacctacctctatagttccgtggcatattgcaccacttaatgatattcaataatctaaacatcatgcttacattactaaatattcctagaagcaatcatacgaatgaacattaagccaataccattgcatatctctggtaagctagccatataatgaatacgagacaagtataaaccaaagttggtactcgtatagttatgcaaataaagtaaaggaccacaacaatataaagaataatatttcattatagaataaagtcttgtaggagggatataaattattagaaccatacctgaattctccggaagacttgaagaactaggaaactattcaaattctaacttcactagcactagaacaaagtaaataaactatggagagcttcttctcgattccttcttggtgtgtgttggaggagaagatgagagggctacttataggccaagtgatgccttaggaatgtggagatgctaagcatcaaaagagtatcttcactcttgagctaccaagtgtcctctacggtggtttattccgatagaaacggttgcaaccgccttggatagtcggtaactaccgacatgtgaaatttgagggtcagattggccaggcctgggtcggccgacccaacccctggctagccccactggcccaatccttcatcctgggttctgcttggtgggtacttggtccagtggtgtgtcggttgggcccatttgcagtgcttccattaggtttgtgggcccttccatacattcatttgccacttgtctacctttgacagattgaacgagtgttttctaccatttctcctccatttatatggtgatcttctgtaagcaaatacaatgccaagtacgacaaagtggaaataggttatttctaactaagtatgcatgcaagcattgctagttctcaattatttttggaagtattgatgatcgaaatctatttataatgaccgtcaacacccacaccacctcccacgttgcgagctaaagctccactgcccaccgccgatctccggccaaccaccgtcatcgttctagaccagccgcactacgcctaggccgcctccagcttcgcctcgtcgctccacacctcagccgccacttccccgccgccaggaccaaccaaaaaattcatgtcctcatcacccagtgagcccctccgcgatctccatctccggcaacctcttcctgccgcttcgtgccactcctccctctcctaaccactctctcatcttccccaggttgtgccgctcctcgggcgcccctctaccgacgtcgctcgccgccggagctccgtccacggcatcaacccacgaggcgccgccaccaaatcctcgccaccgccaccttcccagcgcgcctcttttccgggtgtgcccagtaagctccccctctctctctccctcgccttgtctgctcctttctgttatttcctatgcctgtgggcctagacatacgaaggtaattaactaggagtctttcaaggccccaggaatcggaggaccacttctctaagttcgatctacccaacagttagccatggtgtgcatatacatattacattgggattggtatttatgatcctagaaattaatcaagtacatctttcttttgttctttgtttactttgtatacttagttatactgacaagcatgcctatatatctctctaaagagatatcctcatgtgttattttctgtcctaaataaggaaaaagtacgaattacacccctgaactatcgtggtcgaccgaattacccccataaactcgaaaaccagacatcactcaccctaaactttcaataccggatgaattacccccctcaacccaatccagagcggttttatcttacgtggtgtacacgtggcactccagtcagcattttcttatttttttaatggtggggcccacctatcatgtactctctcacctcctccttctcttccctttctcttggcgttctcgccttctcagcaaagcagcgcgcggcggcggacggtgggcggcgccgtgggatgcggaggcggcggcggcgtgggatgcggagccggcggctgcatcgctttctcctcttcccctctctctctctctctctcgggcatcgttgggtgcgggtggcgggcgcggctgggcgagcggaggcggctgtgggttccccggacgcagcagtagcttcaggggatcagcgacgacgcaccgcacgttcttgatgatcggcgtagagaatgccctgcacctgatcgacgcccgacgcggcaaagacgaagcatgtcgctgcaggagcaggagcaggcatggttgccatcgatctcgccgaaccattcagagctgtatcgagcaaagcaagtgatcgataatagatggctaccaaaaggtagaaagcagttaagcagaagattgtcaaatgctgttcacagcttgagcataacacacgggcagtaggtattagtagctagtcgtgtgtccctcggctcggtcttcgttttttctcgtttgatcatagccatgattttttaggcggtggcgcgtgttggtatgcatgccagttcagtgaacctccctccattgtatgcagaaaagacacgagatagaggtttcgtctagcaagcagccacaaatgatacatgcgaaaacagaatcggcagatctcgaacggtagaacacaccaaacacgtaaatttctcacaattttttcagcttctaaatgagtatacaagccggccatcttattgtacgtgtttgctttgttctgaaatgtgtagaaactactccatcttgcagcgaacgcgcggcgcactcatcggcgcgtgtggttctacacgaacgccgccctgacacgagcttacgttggctagctcaaacgctggacttgcccagccgcgcccgacacccgcgcccgagagagagagagagagagtgagtgagaggggaggaggagaaagccacgctgccgccggctccgcgtcccacgtcgccgccgcgcgcggctttgctgagaaggcaagaacgccgagagaggggggggggggggcaaggaggagtaggaggtgaaagagtatatatgacaggtggatcccaccattaaaaaaaagaagaaaaatgctgactggagtaccacgtgtacgccacgcaagacaaaatcgtcctggattgggttgagggggtccggtattgaaagtttagggtgagctatgtctggttttcgagtttagaggaataattcagtcgaccgcgatagttcggaagtgtaattcgtactttttccataaatatgtggtctttcaacaacacttttgcaaatatatgtgttgaaatacatagtttccacataccacggctcacaagatcacaaaaaaatatattgtttgaatgcaacaagagcaacagataaaacaagaaaaaaaaaacaactactcatcatcgctgtcaacttcaagtagagcatctccatcttcctcgctgcagtactcttccaatgtgtcatcgaaaacttcatctccatcttcacattcactttgacatacaagggttggcctttctttcctcaaacgagaaatctcagaagcttcaaacatttgtcctggttcatcatctctatttaaaggcatctcagttgttggttcatcaactactgttcggataataccctcctcttgatcatcacagcaatattcctcttgatatgcaggaccattaaatggtacagaagttttcactgacattgtatagatgtctatggtcaaatgtttggacaacttgccaattgttaccgaatcttgtatctggcaaataaaacacttttctagcctgagtagctagaattaaagaatcatctttgtaccatagacttcccacattgatgcttttatagaacccatcatctttcagagcattcctcccatccagtttataccaatcacatttgaacaacacaactgacctatcatcaccattataatctatctggatgatctcttttatgtttccataaaactcaatgagctcggagttatgtgtgcctagtgaaattactccactattctgagtcttcttattcttatcacggtccaaagtgttaaaccgcaccccattaactatacatgacttgtatttcttgattcttaaatcaggaccacatgccaaggaaaagatgtcatcatctaccatttcctcatctgtattctttctcagcatctggcataccacatagaacaataaacattattagaatgcatagcacaatgtgtatgataatttgtaaaagatgcttaatgaaatctaaccaggttcctaaaccatgtctggaatccttgtcgaattgttttttcaatgttagacacctcttccctttctaattcatccctgaacattctgtaaaaacaaaaaagtgtcaaaaaaatggcccatatgaacaagaggaagggagcatataacacactacataactgaaaacatacttgatatattcctcaacttgactacagttgttcagcacataccacaccatttgatctaatccaccatcatcatatactaattctgctgctgaagtaaatctcactccatgcccgaacacatctgcaccataggcttcttcattagaaaacccaacatttctcgcttctctattaaatcttgtttcaacatcgtccatgtacttggagcaaaatgttaggcattcatctgcaatatatgcctctgcaatggaaccttctggtcttgccccattcctcacataacgctttaaagtgtacagccgcctttcaatagggtacatccacccatactgcacaggacctcggagcagcgcctcctcaaccaaatgtacaggaaggtgcatcatcacatcaaaaagagccgggggaaaaattttctcaagcttgcacaataatacaataatttcttcattcatttgaataacacatccttgttcagagttttgctacacaatcgcttaaaaaagtttcccaactcagctactgcttcatatatatccttgtcaacaaagcctcgtacagcagcaggtaagattgtttgcaaaagaatatgacaatcatg

SEQ ID NO: 19416 - DNA, 4924 bp, Oryza sativa
atgtattgatgagaattatctagtgcaagggcatattatgaagcatggagtagatggatctttgatttactttttccccagttgtacaaatgaaataccattgccaaatacggggtatcatttgtacaactgccacgaactaaccattcccctgcagaccatagaagaattttttgcaggtggagcatacagggagacgcgcaacatgacaatgaatgaacgagagagttcatcatcctcaacacccttgatatgtagacgggggagatccagtacaacctcacggaacacatagctcaaatgcaagaatggcaacaatctactgatgctcaatattccaacttcaacaacatgatgcagcaacaacacgatgaccttcatgcgtacttccgttttcaggggttcaatccttatcaaggaccctgagcgaaagccaagcttggagggagacatttctccccccactgagataacttgtatcacattgcatatttccctttccaattgcatatttgctttccaattgcatcttataaaacttgaaaacaacataaaaatttgcaaaatagaaaataccaaaaagataggataggtttgagtcatgctaggtaatacaagctagttctctgttttataccacatacacattttgcacaatcttgatcttaagtatgtttagtcatctgctttagtctaagtttttgacctagtaataaatgtgaatgcaagtatgccatgtttgatccctaccgagctccacatatcaaacctgagagtaggaataaaaaaggcaaaactggtgaggaattcaaattgatacacttggagagactgagtgaatcatttgaggaacttggttttctttttcaaaattatttgaaaacttctggaataagagttgaatgaagattgggtgattggtgctctaattgctgttctgtctttcaactgcccaaggcaaggagaagcagtgtctcataggaatcaggagtaagggtaagccaccgtgccaaatattatttaatctgagagagagtacatataccttggacctgtatctttgagatatgcagcatagtagcaactcctgagggggttttgttgacggtcgttatcgatcagtttcaaccgtcaatattactaaaatagaggagaactagtgatacttgcaatgcatgtatatgccagaataataagattacactagtattaggtatactaaccttttgcagagaatgacaataaagtggaggagaatcgacatcaactcagacgaaaaatcaatcggacggtgtcgagaaccagacttatgtatgaatgggctaagaactcagaaataacacgacacattgggccaaaattcacaagtctacagaggaggacaacaaaggaggccgctagccgaagatgggctgggttgggccagcccatggttcccgtggcgccgatggatgcaggatttggatggacagctggtattgatccccaatgacggttggagggtattaccgaccattccaaccgtcacaaccgtcattacctgcctataaaaggagctcctcttctcacttcacaaacacaactcaagcaatagctctctcatttctctcaagtttagtttagtagtatctagctggtggaataggaatagagtagaaatcaggagcccggaagccttcagaagagttcgggtatggctcttgtagctttcctcttctcttttgtaagctttgtacttttattagaatactcttctatatacatttatggtattgaaatactttccgagtatatgaatgtctactttacaatatgttcatgttatactgaatatacggctagcttatctgggagatgctttggtgcgggtataatgtttacatatacaattactctatgtcatgacgatgatattagagtagtatctggtagattaggcttggtgtctagattacgggatatcattatttgagattatatattgcggatgacaggcgggctgttgatggtgacagctcagtacgggtattcctccgcgtcggtatataatcctaagttaattccctggggagggtattcctccgtattttgccccggttgtatggtcatgacgggctgtcgtaaggaacttggcagtcagggatggcttctcgaagtaccaggagggcatcggatagagggtattatctagtatatcggttaactagaatgtatgtatactatgtatattagaagtataagaatatattttctttctcttttctttctacttagcttagatattatattatgagaatgagtagctaatgcttgtgtgtcactctacccttggattatcttaacctctgcttagaatatgattatcacaagtaatatataacttattagtcaagttctctctacatgatcttcccacgggataaaataaatacgatacccttggaatactctcgggtgaaatgctacaatggtatatccgtacgcttgcggatgaactttgtaaccataatataccagatttctgcgtcattgctgggaattatatttctagtaatgtcgttaagaaataccaacagcgtccgccagcgaaaatcacgttttccatggcggcaggtgagagtccgctacaaaaaaaattgaggtgaataaaatccaccacccgcccaccgcccagtccgtccttgtccctttccccttctcccttcccaccgcccagtccgcctatctcccttctccgtctctcctccctcccttctccacctccgccagctcgtcgcctccccaccaccgccggcttccgtcgccgcggctccaccgccgcatacgaccgccgctccggcccctttctcttcctcttccaactccctctctccctccacggagtgcgtggtggcgagctcgggcgcgggcggtagcgctcgggagcaggcggcgaatctcgagagcgggcgctggcggagctcgggcgtgggcgcggcggcgactctcgagtgcgggcgcggcggtgctcggaagcggcgacggctctcgggcgcgggcgtgggcggagctttggcgcgggcgcgggcagagcttggacacacggggagggcagatccactgccatcggaccacggggagggcggcaccgatctcgacgccgttgaccgtgctgcccagctccctcctctccgacctcaatgccgtcaaccatgctcccgcggctccctcctccgacagagctgctagatttgatattttttcttttttttgcatgttgttccagatgttgcatatgttttgatctgtgtaaatgatgtttgatctatgctgatgatgattttatatttcgtgtttgaatttggaaatgagcaacgaatctagatgtggatttgaattttgaaattaatgaatcaatgggcggctgcatgggtattttcgctggcggttgtgcagctgcatgggtatttctttctggcccaaaatatattttcactgatggctgatttaacacagtcgctagcgaaaatggatttttgctggcgataaataaccgctagcgaagatcttgattttcgctggccattgttttgtggcggctgcaaattccgccaggaaaaatccaaaatggccgccacgaaaaatggttttcgtagtagtgactactactttgatgaagttaaggctcttcactccggatgttaatgggggcaaataagtacttgttggaaagatctcatctctactttcatatgcgttcgacctcatcatcagattcgatcgaagctactcagaatgaccaaaacgatatccacatcagaaacttgggcttgggacttatatttagtagagcccattagtgctcagaatgactagggtttgctcccacctcacctcctggtcattcctccacccatcagcagcagtagtttagacatcagcagtaaccaataacacttgggttttgtttagatgaaaaagtttagcttcagccacttcgttgtaattgcatgtgttggctagaccacccgaatacttgtattcagaaccccaactctgtatgtatcagtttcatcgtttggtaagtgttgtaaactattgtcttatcaacttggtcttgcttattttaatgagaattatacttctcgaagtaagatgggtggcttgtttgaattttcccaactcacatttctcgtttttcacgcgcacgcttcccaaactgctaaataatttgtgtttttttaaaaaaaatctatacatgtgttacttaaaaatcatattaatttatttttaaaatagctaatatttaattaatcaaacactaatggattgctccgttttgcgtgtttgaactttgaagggagaggttccaactcgaacaagaaaaaaaacacagcctcaggaattttgaaggaaggaagtggttttcttgataacgaataaatttctgatgaagtccgcggtctgtagacaaagtctattaggactatggtctcgtaatttatttctgcttcgtccatataaaacctggcacgtaggggtagttaaaaaaaaaaagttgccttgccgggttctttataatcggaaaactccgtgcaaagaccgagaagttgcgactgaaacgacttggtgccacaccggaatgtagtcttgtggaatagtatgcacaattgcactgtcctcgtcaaggtcaagttagtcgtatggctttctttcccactagtccctaattgcattccactagaaaatggaacaggtcccagtcgtttggtacgtctctctcatcaggaaaaacggaaaaaagatcaaaattgttggagatggtgctctgctagtctgctctggcctggtccggcttcttcacaccgtaatttcattaaacctatatttttctcatcttgtgaatgtggcaatagtttctcaccgaaagcgatgggctgcagga

SEQ ID NO: 19417 - DNA, 13087 bp, Oryza sativa
gtggtattgaggcacatggtgacatgatgtggggttgtgtcttgtgggtactgtggtacacctcttatcagagtaaaactattcgaatagccgtgcccgcggttatgggcgggtctaacaatgtctttcgtgattagtctcacccttctcaccatattagaagatgctataactggtaataatttgattagctcctggtttggaatggtatattcctggtttggagatagatctgtacagctgggtttggttgttcagaatggttgggcctatacaacagggtatgttgtatagtgttggattaatattgtttaattattactcaacggttttattaaattctcaaatgtttgctaaatgctgcttttgcaaatgaaaacctattatgccatcctttgttatcttgagcacttgcatatttgctgcgtggcttgctgagtatgtcatatactcaccttgcaatcattcatcagaggaagagttctacaatgatgctgatggtgtggaggattaggtgtagccttggtcaagctgcttgtggagtggagccgtctgcgccgtttattttattttccgctgcttagatctttattgattgagaggaactatctacctctgtaatgactttttattcgcttcttaattagagtaataattgtactctattatcaatttgttattgtgtgcttcggctgattcctggacgagggttcacacacatgtaagcgtttggaattttggatagaaattccgggcgtgacactccttgaccctaggacgagtcttagatcccaatccttagcaatattttcgaaataaaaaaaacctttcttacttgtgaaaatcctttagtctccctctgtcctgctgcttcatttattgtcaaaagctgatctttaaaatgttgcttttctcttttgctattgtttgtagatggccgacaccctcaaccgtcgtggtctggacttgactggctttgttttagagctgcggggcttgtgcgttgtcctggggtatccgcatggagtggactaccagggcaagaagcttccggagcaggatggtgacgatgcagagccccgcgccgcttgggaggtcaccgcggtgatcctcaccggctctcccgagaggacttctttggcaatcatgtcacgcccggaatttctatccaaaattccaaacgcttacatgtgtgtgaaccctcgtccaggaatcagccgaggcacacaataacaaattgataatagagtacaattattactctaattaataagcgaataaaatgtcattacagaggtagatagttcctctcaatcaataaagatctaagcagcggaaaaataagataaatggcgcagacgactccactccacaggcagcttgaccagggctacacctaatcctccacaccatcagcatcactgtagaactcctcctctgatgaatgattgcgaggtgagtatatggcatactcagcaagccacacagcaaatatgcaagtgcacaggataccaaaggatggcgtagtatggtttcatttgcataaatagcatttaataaacatttcagaatttaataaaacagttaagtaataattaaacaatattaatccaacgctatataacataccctgttgcataggcccaaccattctgaacaaccatcccggctgcacagttctatctccaaaccaggaattaaccattccaaaccaggagctaatcaaattattaccagttatagcatcttttattatggtgaaaagtgtgagactaatcacgaaagacattgttagacccgcccataaccgcgggcacggctattcgaatagttttactctggccagaggtgtaccactgtacccacaagacacagccccacaacatgtcaccatgtgcctcaataccaccacggtacctcagaaaagagctgtgacagtacctctcgcacaacataatccaccacagtgcaccactcccggatcatagtcacccccttataaacaaggtatggactccccagcgaacccccgtgggcttatctccgccacttctcagtctggtgctccgcaatgaaccatgctatacaaaaggtaaagccgttgcccacgctggcttgtggttggcacggtaaatgtttcacaaccgaaactcgtgaaccggtccttaattgtcatgagcacgaccatcaaaaccatctgctcacaacccaccattatcaagttttagttggcacattaattaattaaccaatcacgattgaccatcgtgagctatcagtaagagatcatgaaataatagtgagtcataagttatcccaatagtgtgctaatgtttctaagcatggctaagcaatcacatctaatatctagctgaaccaatatataaagctcaactagatcaagttataataacccaaggtatcaaggaataaagtaatcaagaacgaaagggctataacaaagaataggttaattccacccaatgacattcgaaaataaatgcaatagttaaatagaaacaatagctttaaataggatcaacatgctcaaagggttgtttgggatctgtgtgacttgccttgctggccttggaactcttcaaactcttctccggcgaaaacggactctccggaaacgacgaaatctaaacagaaagaagcaaaatcaccaaaacaacacataagcaagcatgaacagtacatgtggatatttttaacatgtagatctcaattttagaaaaatttagagacttgaaccaactaaatcggagctaagatgaattagttatgaatttttgaagatttaatcggattaaaacacttatatagattttaattgaattatgacgcaataatgaattatttttgaaaaggaaaagaaggtttattgcgtcagcggctagggtttcggtggaccgggcgcacgggcgacggttcacgcgaacggacggccgagatcgacttgatccaaaatggacggccgagatcgaacggtccacgaccggctcacggcagacggccacgatgacgtcagcggtgacgtcgtcaatgacgtcagcatcggcggcggctcggcggctcgggcgcgcaaactcgccggcgaacggcggcgcttcggcacgaacgaagggcaccaacgggtagcggacggcacggcgaacccaccggtgaccaaagaaacggcggaggagcaacggacggcgacggcgacgaggaagaagcggcggcgaccttcggcttgacgacggcggcggtgctccggcggtcttcggcggtggcgaaggagcggacgaggacggcgacgacttggcgaccacgatggcgatcttcccgagcgacgacgacgaccggaacggcgccggcgcacggctggagcgacggcggcgacggcggctcgaggttacacggcgctagggcgctacggacgacgagagtcgaaggcgagggtggcgacgggtagaggagacaccggggaaccttttaaaggggctaggaggcggcggcaaaggcccacggcggccggcgacgagatggaagtttagggttcggaggagagagacgaatccgattcgaactcgaatccatcgatttccaaaccgatttagccaaagattccaaaagagaaaaggtagaggagatcccgaagatcatttcccctctatcaattcggccggagaaggaaaggatcggccgaatttggaaggagacgacggcggcgcggcgctagggttcgggcggcggcggccggaggtagacgacaggcctgacaggtgggccccacctgtcagcgagcgcgggcggctacggactgggccggactgggccgaagagagagagagaagggttttgggccgactttcggcccaaagccaaaagagacttttaaaaacctttttcaatttaaattattcatgaaatgcaattccatttattaaaaatacttccttagctcaaataaatcccagaaaaatctaggaattatagaattaagcaaagtatttaatgaaattttatctggccccattttatattggaatttattaattaaaattagatcttctcttctaggctgttaaaatcatttctaaaaaattccaattaaacaacaatttatatattttgaatttttagggcgtgacaaatcaccacggatggagattctttccccgccgcttgccagaacgccgcgctcctcgccatcggcactcttcaccagcgctatccggacgagctgtagcactcgccctaccgctaccaccctcgtcgaggaggagcccgcgattacgccaccttcagggatgctagctcggaggatgacgctaccatcatgtacctggcgcgcatggtggaggagtacgacgcggcccgtatcgacttccatcatatggtgcgccgcgggttggtcgagaacaacatgaagatcctggagctgcgtcaggagaatttgcagctgaagaaggacttggacgcggtggaggcacagttgtgtcagctcaagatcgcccagggagaggtctgtcgccccaagcgtcgccgcgtctgccgcagcctgaagatcactgcccacaagagtacctccaggcctgagctggttcgtcagtccttggcatggacttgcttcgtggagacccctcgcgcggagcccgcgcccttggttcctcaggaggaggaagcctctggcgttggtagcacggaggatgtgctgttgctcaccttccgctctggcccgtcgcagaagtagacgagcagctagtaggctcgcgcgtgtgttcttctcgtttgtttttctgcttgagtcgtgtggggcatggttataccggtgtgtggtataactgtgtcggagcctgtctttattttatttgcataagcaacttgaaccttaatgaaccaatttaatagcagaaataaattcaagaattatggtagtcgtgggtggttagtttcaatagtcagctctctctgtttgctagttctgtgtgggattttcagatggtgacaaccaggagaagcgctgctactggtgactggtgagggcagtcatcctgaaggcagcaaccacaacaaccatggcagcccacctccacctcctccccagccaccaccaccgccacaagacaccaaccccatcctcacccaaatcctcgcccagcaagccaacatgatggttgctttcctccaccacatccagaatccgccgcaacacaatgctccacccccaccaccacccccgcagcattctaagcttgccgagttcctccgcatccgcccgcctaccttctctagctcccataaccctgttgatgctttggattggttgcatgccgtagggaaaaacttagacaccgtacagtgcaatgatgaggagaaagtcatcttcgccgctcaccaactgcaggggcccgcatctctatggtgggaccacttccaggctacgcagccagagggacagcctatcatttgggcccgtttcgccgccgccttccggaggacccatgtgcccgccggagtcatggcccttaagaagagggaatttcgggagttgaaacaaggcaactgctccgtgatggagtatttgcacgagttcaataatttggcccggtacgccccagaggatgttcgtgaagatgaggagaagcaggagaaatccctagcagggatggaccctgagctgtctatgcgtctggtctccggggactatcctgatttccagcgcctagtagacaagagcattcgcctggaagccaagcacaaggaattggagtcgcacaagcgtcgcttggcgaatttccgcaaccaacagggggctaaccaaaggatccgctacaccaatccctatccagggggatcctcctcgcagcagcagtagcaacaacctcgctccgcgccccgacctcaattcgtggtgcgcgtcctacagccacagcagcaacagaatcagcaagggacccgtgcaccccaccctcctgcaccagccgtgcagcctggacaaggccgcagggatgctcaaggtcaacagcgtctgtgcttcaactgcttcgagcacgggcactttgcggataaatgcccaaagccgaggcgccaacaaggtcaagcgcctccccgccccaacaacggtggtaaggatgtcactcggggccgtgtgaaccacgtgactgccgaggatatgctgacaactccagacgtcatcgttggtacgttcctcattcattccatccctgctaccattttgttcgactctggagcttcccactcatttatatctgtgccattcgtggggagaaatcagctgggggtagaaaggcttaggaaccctctgctcatcaccacccctggaggggttatgacagcaaagtattatagccctgccgttcctatagaaatccagggaattcctttcccctcggatttgattcttctagacaccaagaacttggatgtgatcctcgggatgaattggttggctcaattccaaggagtagtggattgcgcaaggcgcactgtcactctgtatcggggccctgatcaaccggttgttttctttgcacccccaacttccgccggcagttcagtacttcatcagctaggattgccagaaatacccatcgtcagtgagttcggagatgtgtttccggaagaactacccggtatgccgcccaagcgagagattgagttccggatagatcttgctccaggaaccactcctctgtacaagcgaccctaccatatggcagcaaatgaactggccgaagttaagagacagttggaagagttgaaagaaaaggggtatatacggccgagcacttccccctggggtgctcccgtgatttttgtggagaagaaagacaagacaaagagaatgtgtgttgactacagagctctcaatgaagttactatcaaaaacaagtaccctcttccccggatcgatgatctgttcgatcagcttaaaggtgccactgtattctccaagattgatcttcgttccggatatcaccagttgcgcatccgtgaagaagatatcccgaagaccgcattcaccacgcgatacggactgtatgaattcatggtaatgtcattcggtctaaccaatgctcctgccttcttcatgaacttaatgaacaaagtgttcatggaatacctggataagtttgttgtggtctttattgacgacatactggtgtactcacaatcagaggcagaccatcagcagcatctccgtttagtgttgggaaagctccgggagcaccaattgtatgccaagctcagcaagtgtgagttctgattgtccgaagtcaagttcttagggcacgtgatatctgctaaaggagttgctgtggatcccgaaacggtgaccgccgtcactgattggaagcaacccaagacagtcactcaggttcgcagctttttgggtttggcaggatactaccaaagattcatcgagaatttctccaaaattgccagacccatgacgcagttgctgaagaaggaagaaaaatttgtgtggagccctcaatgcgagaaagcattccaaactctcaaagaaaagctggtttcctcgccagtgttaatcttaccggatactcgcaaggaattcctggtgtactgtgacgcttcacgccaaggattggggtgcgtgttaatgcaggaaggtcatgtggtagcctatgcctcacgccagctacggccccatgaaggcaactaccctacccatgatttggagttggccgctgtggttcatgctctaaaaatctggcggcattatctcattggaaatcgctgcgaaatatataccgatcataagagtttgaaatacatcttcactcagtcggatctgaatcttcggcagagaagatggttagagctcatcaaggattatgatgtgggaatccactatcacccttgtaaggccaacgtggtcgcagacgcgctgagtcgaaaaagccgttgcaacactcttggcgtccgtggcattccacctgagcttaatcaatagttggaagccctgaacctaagcatcgttagccatggattcttggctacactggaagccaagcctaccttgctcgatcaaatccgcgaggctcagaagaatgatccagatatgcatgggatcctcaagaatatgaaacagggtaaagccgttggtttcatagaagatgaacacggaaccctatggaacggaaatcgtgtatgcgttccaaacgacaaggaacttaaacagttgatacttcaggaagctcacgaaagtccttattccatccaccctggcagcacgaagatgtacttagacttgaaagagaaatactggtgggttagtatgaagcgggaaattgcagagttcgtggccctttgtgatgtgtgccagcgtgtcaaagcaaagcaccaacgaccggccggacttctccaacctctccaagtaccagaatggaaatgggatgaaattgggatggatttcatcaccggagttccaaaaagccaagatggatatgattctatatgggtagtcgtggatcgactaaccaaggtggctcggtttattcctgtgaagaccacctatggagggaacaaattaactgaagtctacttcgctaggatcgtgagtctccatggcgtccctaagaaaattgtatctgataggggaagtcaattcacctctcacttctggaagaagctccaagaagagttgggtacccgattaaatttcagcaccgcgtatcacccgcaaaccgatggacagaccgagcgtctaaatcagatcctagaagatatgctccgtgcctgtgttctagattttgggaagacctgggataagagtctcccctatgccgagttctcctacaataacagctaccaatccagcatacaaatggcaccttatgaagcgttgtatggccgcaaatgccggacaccactattgtgggaccaagttggggaaagccaagtgttcgggacggatatcctgagagaagttgaagctaaagtcagaaccattcgggataatctaaaggtggcacagtcccggcagaagagttatgcagataaccgacgccgtaacctggaattcgcagtggatgattttgtgtaccttcgggtcacgccattgcggggtgtacacaggttccagacgaaagggaacctcgcacctaggtttgtgggtcctttccgcatcattgctcgacgcggagaagtcgcttaccagttggagctgcccgcatccttgggcaatgtgcatgatgtgttccatgtgtcgcaactcaagaaatgtcttcgagtgccgtccgagcaggccgattcagagcaaattgaagttcgcgaagacttgacctatgtagagaagccggtgaaggttctggacaccatggagcgcaggactaggaaccgggtaatccgtttttgcaaggtccaatggagcaaccacgccgaggaagaagctacctgggaacgtgaagacaagctgaaggcagcctatcccgatctcttcgccagttcttccgaatctcagggtcgagattccgtttaagggggtaagtttgtcacgtcccaaaacgaccctaaaatatatcctttaaattatgcctagaataattaaaatcctcgagaaagcctccaaaaattaaaatgtgcaaagtaaaagtcaaacaaggcttagaggatttttttatatttcctaaaagcctaaaatgtgtaaataaattttagtggaattttcagagcacaaataataattattaagaaataaacaaagttgaaaaggttttataaaaagaaaaaccctaaagaccctccctccctctcttgggccggcttggcccacttccctccccctctctcctcttccctcgcggcccactcggcctctcttcgcgcgcgcgccgctgacgggcgggcccgcccgccaccctcgctgacgggtggggcccaccagtcatctctttcctcccgccgctcctgccgcctcgcccgcgcctagcgccgccaccaccgcgaatcccgccgcctcccgtcgtccctgcgtgaaatcaatagggggcaattactccccatgatcccctctccctttccccccatttttccctctctctcgcattcaaacggccagatttgctcccgcaaatctcgccggcgccattgatggcggccggacctcccggccggtttccttccttccccggccgccctctcccccttccaaccctatttaaaccctcctcgcgcctccctcgcccgtttccgccccttgccgcaccgtctcctcaccggaatcgagctcgcgccatcgccctctctctcctccgtcgccgacgacctccggccggccttctccgctcgccaggaccgtttcccgccccagcgtcgcctcctctggcttcgccgcaccgtcgccgtccccgtccaccccctcgtcgagctcgccgaccgccggagcgccgccgtccccgtcgatccgagccgcgccgctgccttccaccgctccggccgcctttttcgtcgtcgccgtcgacctagggtgagccgtggaccgccgcctcgtttccccctttccctcccctctctcggctgccgctccgccgtgcctatggccgccgccggcgaccataggggcgcgggcgcgccgcctcctgccggccgcgccgacgtggccgccttcgggcgcgccgagcggctgccgcgtggggcccggtcgtcagccgcccgcgccctcgggtgtggctgacgcgtggggcccacggcgccggccggtgtgagcccgggtgcacccggtccaccgtggaccgtgaggctgccgcgtgggccccactcccgtgaacccggtccgcgcgccctctcccctcggctgacgcaataaatccttcttaaattaaaatttaaatgaagaaattcgcaaatattcacttaaagagcatataaacttcaaatggccataggttggtcatttgaactcggaattggaccgttcaagtctctaattttttcttaagaagtcaagaacccatttttgtgctttgtccctgcttgttatatggagtttattagagtaaaagcctttttcctttccgttggtcgtgtagacgctgcagcttcggaagatccgctctacgtggaggttgaagccgacgtttgggaaagtgagcaaggcaagtcacatcatccttgaacatattgaatccccgtttataaaattgttttgatttaaattattgcattatcgctttatttaaattaccgcgttatcactattttgtttagccatgcctatttacctttgttatgaccttataattgttatcattattattaccttgttcaccctagaataaacaaaaccccaactagtgggtactctattcatggtaccactagtatgaatttaggtagatgcttcgctgtttaattaggcaacattaggtggttttacaactctagactttgggaatattcatgtcacctagacactatggaatggttggattattgtggaatcggattcacacctccccctctattcaaaatcctcaaaatggttttaggctgggctcggggtgcatggttttgatagtagcacctcggccacataaggaccggtcttcgggcctctgttgaaaagcactaccgtacttccacatgtctagtgggtaaggcttagtttgtggctcagtctggttataaacaaaagtacacggatggagatggacgaagtcgggggtcgatggacatttctagggcaaatgaaggctacacgagctgcggcccggtagtcgagatgtcatggcacagggctggtgtcctgctgctaggggctcagtcctgcctacctgtcccggaggttccggccgtaggtagggttgggtcggtactcttgtctatggctaggatgggttggaaactatgtcatgtcttccgttcgtatgccgtggtggtatgtggcacgtggttacacgtgaggaagacatgtcttgtgggtaaagatgtacacctctgatcagagtataacctattcgaacagccgcgccctcggttatgggcaagccgagcaatgtacccaagttagtgttttaattcttaaaacctgcttaacaactaaaatgtggaatggttggcctgggttggcttgggacgagctgggacccagggtcgggttgccagttcggtccaaatcatcgtaggccttgggttaaggtaggttcgtgttggttcacggccttgattaataatattgcatagctctaggatcgtgtttacaaagtagctttgagcaactaagtgacttttaatgctgtttactgcaaaccctaaccccctatattatagctcccttgtactcccttgcatttattctgcacttattggtgtgtcttgttgagtacggtggttgtactcagtcttgctcaatttttcccaatcctagaagaggagttcctagaagatgaaggctttggtgtctagctcgtgcctgccatcaagcgcctgtggtcgtcgccctagtcttccgttgtttttcgtttgtcttcgtgtgtgctgggccctcgccgcccatgtaataaaataactatttacgcttccacttgttaaactctgtattgtatcaacttttggtgtacctcgcctcctgggacaaggaataatacacgcacgtaaggaacgcccgttgggttatttctagtcgtgacaggctgatcctgcagaacgactccagaaccgtcaacgaggcatgcacaccgtccaagagacggaattacttgttgccaagctggacctcctcatgaaatgattggatgaccacgagaaacggccacaagacactgtcaaggccttggactctcacgtcacgtgtgaggtctacggcggcacaggtcattctaggaatgactgcccgaaaacctgtgaggaggcgatgtacatgggcaacaacaacgggtaccgtccacaaggaggtcaggggtggagccaaccacgcccatattatcaaggaggtaacaacattggtaacttttctaaccagccctccttgaaggatgtagtttctgcgcaggctaaaaccactgatgcgctaagcaaaaagcttgttgccaatgacaagatcggggtgcag

SEQ ID NO: 19418 - DNA, 707 bp, Oryza sativa
gcaggagtattacgacacacaattgctgctgtttccttaacgaatgaggaaaccgtcagtggacgagcaattcgctcgttttgttgaagtaatccagaagatccacatcaatgtcccgttgttggacactatgcaagtgccaacatacgcccattatctcaaagacatactcaacaacaagcgaccactcccaacaacggaggtggtcaagctgacggtgtaatgcagcaacgtgatactccacaagctcccggagaagaagaaaaatccggggtgtcctacgatcacctgctcgatcggggcacaacagttcgaccaggccttgtgcgaccttggagccagtgtcagcgtcatgccaaaagacgtcttcgacaaggtcaacttcacggtgttggcaccaacaccgatgcgccttcaattgactgactcgtcagtccgttacccggcagggatagcggaggatgttccagccaagatacgggatttcttcatccctgttgactttgtggtgctggacatggacacgggaaatgagacgctgctcatcctagggcaaccgttcctttgcaccgcaggagccaacattgacgtgggaacgaggagtatctattccacatcaacgggaaggaagagaagtttgagtttcaaccaaggacggaacaatgctccgtggtcaggataaagtatggccgaacccacagaatatt

SEQ ID NO: 19419 - DNA, 713 bp, Oryza sativa
tcctgcagcccgatcagttggttcgaggcgcaccaatcccgaggcgaagtgacatacaagtttgaactcggtaaaccgcttgtcaaacctaaaaaactgcagtccctaccgacacagatgtacaaattccatgaacggtgcatggaaatgagcgccaaatgtagagagatgttcggagcgaggtcagaaaccccgacatcttgcaaggagaagatgttctctggatccatttcaaggatctcttcgatctataccagttggacgccctcgacgtctctcttttgagcgcatggattttgtgagtatctttgagttcgatttgattcgttaataattagctcctggcatatatgtaagcaataatactttcctttcatcgttgtagaatggagattcaaagggcccgacagaggagggtctacgatactaggttcatcgaccctcggaaaatcaacatcgaaatgatcgacaagtacgagaaagacacagaggacaatcttgtccatctcctaacgcagcagcatttcaagacgtacatactactgccgtacaacacagagtgagtttttattgtcgttcgaacaaatttcgttcccatacatatagcatgtacattttcgatcatatatatctcatctcacgcatattccagattccactgggtcctgttattctttgacttggacgcatgcagagtcactgtgtatgactca

SEQ ID NO: 19420 - DNA, 1746 bp, Oryza sativa
attatgtctaacctttaaatttttccagtactccaaatcccacagacaaactctcctactccaaattttcacatttgcagttttgtcactatccaaggcagaacgcttccttttcctgctctccttttgcttgatcccaggtttgacatgtctaaccttctctaattctgctagtagctctgcttttgtaaatttacctggtggatcattggttccatgaaggccactgtattcattgttcctcctcaaacgatgtccccttggcaggaaacggtagtgtccaatatatgcaattttattccttagtgcataagacagaggatttttgtcacagtgaatacaagcaaaatagccttttgtggtacgcccagacaaagtagccagagctgggtaatcatgaatgcaccataacactgctgcacgaagtttgaactctttgtcaataatggcatcataagtatgcacacccttccaaagctcaatcaattcttcaacaagaggctgtagaaataaatcaaagtctttcccaggtgaacatggacctggaatcaacagagccatcattagattggattgatccatgcatgcccaaggtggaaggttgtatggcacaacaaatacaggccacatgctgtacttcgtgttaaaattgccaaagggattgaatccatcagtagctagcccaagtctgaggtttctagcttctttagcaaaatctggatattccctgtcaaaatcttgccaagcctcaccatcaactggatgactcatttccttctcactaggctgcctctttaacttgtgccattgtgcttgttctgaaccctccttggttacaaatagcctctgtagcctaggcaccaatggaaaatgccgcaatactttctgcggaatcttcttcctctgtgggtctttccatcttgacaaaccacaaactgggcaattatcaagatcagaataatcctttcgaaacaaaatgcagttgttgtagcaaacatggatcgattcatatccaagtcctaattccttatatcattttctttgcttcatcgtatgatgttggtagtgtattaaactctggcaatgcttcagctagtatcttcaagattgcagaaaatgcagtgttggtaatcctataaaatgacttcatatgaagtatctttaccacaaaggagaactttgaaaatttggcacacccaggataaagctgacgcttagcctccttcaccagaagtttaagaaaagaggtttgactgtttccatcattgttcccattttcaggttcagagtcatgactaccatgtcctcttgcagtttgaaggtcactaagcaaactatctaaccgatcaccaacattgttgtcagtctgagccataccaatggaaccctcatcagtgtcaaaaacagaaacagaagcagggacttcattaacatgtacactaatgtcctctccatgatgtacccaccgagtatatgtacagtccataccattcatcaaaatgtgtttcttcacagtgggctgatgcaggtacttctgattaaggcatctagtacatgggcatagaatctcatcatcctcagcatatttttctttaatgaaatccataaattcattgacaccattgacatattgagtagaaaatagtgtgctgtgcacccaacttctatccatctgaacatgcattggggaaacacacaatttaattaataaacgtgcacagtacaagaaaatcagagagaagatgg

SEQ ID NO: 19421 - DNA, 9218 bp, Oryza sativa
aaattctagcacaacatgtggcgtagtgcagtggtaaagcgcgccacttgtgacgtggagttcttaggttcaactctcaagcgctgcactgtttttttgaatcagacatttatcaaagaaatggctcgtggccacgtcagcatgccacgctggcacccaatatcgcaatggcacatcatgacgaaactaaaaacgtcacggatttggttcagctgcgcaattgtgacgggttcttgaatttcgtcacagaacctaggcccaattttgggcttcaagagacccatgtctggtttaggtaatccgtgacaaaaaaaaatctatcactaaaaactgtcacagatcaaccaaattcttgtagtggatggataggggccacatcccagttggttttttctttttttttttttgctgcttgtatatattatcccacccaaatccacacaaatcatccacaaaaaaattatccacaaatcatgcacaacaaaattatccgcaatacatacacatccacaatccacaaatcaatcacaaaatcatccccaaatcaacaaaaaaaaatctccaacaaaatatacaaatcattcactacaaataattcaaaaaataaaaaaaaatacatagtcgccagcagccgccgcccggccgtaggacgacggtcgccttccgcccggccgccgcctggccgtgtgccaccttgcggctagccatcgccgccggggcggccctccacgcacgatggccgccgccctccgcgctggcctccgccgctgccgcccggccgcctcccctcccgaatttggcggaagggaggccgccaccaccgcccgattgcctatcgccgccgaatgccgggaggtgcggcccgccggaggggaggagaggggtgagaggaggagagttaagaaatgagaggtgagaaggaggagaagagagaagagataaggttggggaccgcgctcgggcaatgttttttttcccgattgttaattatgactaatggactagtggagaaccagactaaaaaccggtttaaacggggattattgtgtattttgggcaacggaccaaaagatgatttctcaagcaagggcgggctgccttcctatttaaggttgaattggcgaggtgggattattctagctacagtaccgcgatggtattgagggctgctgctgctttgcgcgctctctctcgctgctctgcttgctgcactgctgcttgcatgcttggctggtttttgctattgggccggctagctactgggctgcataggctgggctgcatacctagctttgctctttttttttctctctctcttctttctctttttctttttctctaattattgcggcgcgttatagttaccaacaccatctaccgaacacacccttagtcgagttggcattgcagttggtcgagatgctcgtcgagcaggaagccgcacgtggcggtgaggttgccattgggtggagctcatccttcggtcccatttagcgcgcctcatgattcgggttctaagggatttgggtagctaatctcgtacttatgtcatcatcggtgtacggggattttcttcctttatatgtgtgtgcgctaagaggatgaggggcgagtccatagcgtggacagcaagtccgatcattgcgtgtaggaaaggatcgtgagtgtggccagcctcacagtactatggaaagtatcattggtgtcagttgagaatcccatataggggccagattttccaaccgacagcagtcagatggcactaaggactaaggaggtgcctaactagtgccggttttataaccagcaccacctatagggtgcaaccttttttcatttttacagacttgaaaaaatccaaaaaaatatttattattttactgggcatctatacacagttccactttggattaaattttggatactcgtggcacacttttcaaactgctaaacggtgcgtttcgtacgaaaactttctatatgaaagttgttctaaaatatcggattaatctattttttcaagtttggaataattaaaactcaattaatcacacattattacgacatcgttttgcgtgaaacacttaatcttcatcttcatcttcatctttaggacattcaaacaccacctttgtttccaacagctcccaagataaaatatttgctattttactagcatctatacacagccccactttgtttccaacaactcacaagatgtttgcaccattttcacaagaatatgagttgaagctagggttcaaacccgcaacctctcttcagccgaagtctgcttaccttgtcacctaaaaattattttctttaaagcaaatacttttcttttgttactactcttatccaaaacttataatccatatttaacgtcatagataagcccaaataaaatttttgttaataacaaagttataaatacaactttcctatacattttgttcacatccaagatagtttagaaattttaaaaattcacttctccaaatagatctgagaagttataacatatttttagacatccaaataacctcaaatcaaaacgtgatcaactacaaggttgtagatatcgtcaagttctacaaatttaatataagtttattttcgtatgacttcatatgaaaaaagttatatacaaaacacatatatgagtagtgtcattattggtgccgtttttattccaatttttattgagaaccggcacatgtgaaaactagatatgtcgttttagataaaaaaatcatttactattgtgccacactcataggtgccggtttattacgagaaccagaacctatatgatgtccattggtgcagctttattataagaatcggcaactgtaactattggtgccggttttttatggacctacacaaatgagtggttttgggtgtcagtttttatttatagatgtatggaaaggtgaggaaagtctcatatctatcggttttttactttatttctacgtagcagcacctatgatgctgtctcctttcagggtttcttgagtagtttcgtcgataagtgcgcattggcatggggtgggccaagctcatgtgtgtttgtctggttcagcggccagagatcaatctaacacatgtttctcctatctcctctttcaaatagataatcagttattctttgtcctaattatgttatgtagtgtgtatttcaaaggaataggggtgaatgtgtgtttatgtgtgcctacatttatactatgtttccaaatgaaattttattgtggactagaaaatccaaatacaagttttgaaatttactatctaggtttcaaactttacaatgtaaattaatgtaaccgtattccttttattttaatgagaaatattacaccacaaatataactagctagtacagtaggcgaaggcagttattggatatgacaaccaactttcgggctttattagtacttttctaatactcccactatcttaaggcatatttcatttttttaattttccaaatgagataggcatatttatcttaatattccttggttgcatacgtgcatgcatataatggatgagttaattgttccttgatcttggtaacaaaagaaaaatatgtctcagatttttaagatgaagagagtaatgcacttacctaatctaaaaaataatttagattggggaaagtccaaaacacccctgaactattgggtgagtatgaaatactccttcagacgcgaaaaacaagatatctttcatcatcaacaatcaatactggatgaacccccctccccagcagctttgcaagtggttttgatcttacgtggcagtccagtcaagaataattttattaaaaaaactgatggagcccacctgccatatctctctcctccctatctatttcccgtctcacacctgtcactctcgcgtgcgcgcatcaaatgctgaggaggagccccgcacggtggcggtggcatcggcggttgagttgtgccccaagaggaagcagcagcaattcacatcgtcgtggcacactgcgtagtagctctagttggaggcgatagccagcgcggggaatttggcagcaatgtatggggcggtgatgttcatcatgaactccacgccggcgagaggtagcatgcagcagcaggccgacctgtgcttcgggttctcgtcgacatcatccgcgctcaccgctgtctccccggtgcacatgtccaccaccgcgctgctgtagaaggcacgcggatgggcgtgacgcagagctgcctccgtcatcctgtcgtcctcggctccccctccatcgtccccacactgcctccgtcgtccctgcccaccaccaccactccgagttgcctccctcgtccccgctcgccgtcgccgtcctcggttccccctccgccatcccgcctgtcaccgccgctccaagccacctcccccgccgctgcccgctgccgccgtcctcggctccctctccgtcgtcgccgctacgagttgcctcacccgctgctgcccgccgccgccgtcctcgactatccctctgtcatccctgccaccaccgccgctccgagtcgtgtctcccgccgccaccatcctcgacaacctttctgtcggttgctcggtgtagagagagaggggggagccgagaagagaagagatatatgattgggaaagagacagagatagaaaggtgaggggaaagagatatagaggatgagactgatgggtggaacccattgatttaaaaagaagaattgctgactggactgtcacgtaggaccaaaaccactccagtttgagtcggtggggtttttcatctagtattgataattgaaggtgaaagatatatgcttttcgggtctgaggggtaatttgtacttacccaatagaggaaagagatatagaggatgagactgaggggaaagagatatagaggatgagactgatgggtggaacccatcgatttaaaaagaagaattgctgactggactatcacgtaggaccaaaaccactccggtttgagtcggtggggtttttcatctggtattgataattgaaggtgaaagatatatgcttttcgggtctgagggtgtaatttgtacttacccaatagttcagcggtgtaatgcggacttttcctttttagattaggtgaaactctacaagttgagaaacgaggaatgcaattttcttaataatctgtcgctataagtatatctaataaattcgtgatgctctagaacatttaataaaattaatttgaagtgcaataattacttctactaagcctatgatcattcggtgattttctgaaagggaaagcatttaaacccgttttctgtctgtgggtcaaatccggcccactctaacatttccctttgtccttccctgcatggtcgctctggtagtctggtttgcctaggaacaaccatggttgtctgagtagagataaatgggaattgttatttcaacaaagtttagagcaataatttttatgtcaattacaaagatataaaaaacatattatcgaagcagtacaattattaccgagaagaaataagtgaaagaagagggagccaagaaggtactactccctctttcacattgaaagtcgttctgaatttgtccggtgccaaaaaatgtataagaatacaaaaataaatggcaaaacgaaaccaaaaggataacgtgttttatgggggaacaagaccaaagaggctatataaccaatttcagtggacaatgtggttcattggtacaagttccattttgaaagcagagaaggtacttcaaaacatcacaagagctatcagctacaaacattttacttcgatccatgcatagccattacagtggctccatttcagcagcagtggtcgaatcactggcgtagacagggtggagcatgtgcccggcaacaggatcaacatgaacccattttctgccagtcagcttgttgcgctcaaaacgcacgtgtccttatttgagacagaagagagtacgatcctttcccattccaacataggccgtgtttaattgttctggcaaaaaaaaaattgatgtatacggacatacatacatttgaattattaaacgtagactaataacaaaataaattatagattccgtctgtaaacagcgagacgaatctattaagcctaattaatccatcattaacaaatgtttattgtagtaccatattatcaagtcatggcgtaattaggctaaaaagattcgtctcgcaatttacatgcaaactgtgcaattgttttttcgtccacatttaatgctctatgtatgtgtccaaatatttgatgcgacggaaaagttggaagttcgaagggaactaaacacagccatagttcccaggatggaagcgggttcctcattggcggacgatgatatttcctggctccactttctgaaatagttcatgaaaatatcagattatattccacgtctttcgcataactagcaaaatgtccgtatgctttgttatgggaaaaaaacttatataataatagggataagtccattgacacccctcaactattggtttaaattacaccccccaactctaaaaccagatatcctaacaccctccaacttttaaaaccgtgcaataagccccttaaggtggttttgtgttgacgagatgatccagatgatccacatgttagggaacacctcttacctctcttctctctcagcctcgtctcttcctcggccaccgccaccattgccagactagagcgccccagagctccaatgcctagttgagctcgtgctctgtctttcctaagctccgcgtctcgaccaccgccacctcatagagcggcggtagagaactagcgccacgaccccacctgaccctcacccccatcaccagcgaaagacaccccaccacctcacccccatcacctacaaaggactagaccaacgaccgccaagaagagcaggagaccggtgaccagaagggtgcctgcctacaatatcctccagcacaaaacggatgaagaaatcaagctcaagctcacttgctcaccaccgacctccacgccgcccacaccaatctcccccaatccaatctttctcctcctcctggctagcagtcgagctctagcttcgctacctccaccaatatcttgcctcagtagtcgctagcgccgagctcagccactaacaccacgtctttccacatcaagctcgaggatgagggactcggtctcaagcacacctcgagcctcctgaccgggcagcgacgacggaaggatgtgctctaggggcacccacctccccgtcctcataccctgagtgcctcgtcagatctaggcagtatcgaagggactccggtgagctcctctttgaggtggtcgatgcgagatccccaaccactccacttatagctctgcgaggggaggagggagtgagaacagtggatgctgagatggagaccgggacggagggagtttgccagcaacctcacctcctccattgagcttatcaagcagggagggaggggagagggagatagaggggaaggaagaagaagacaggtggaagtgagtagtgggactccttccctcttgctgacgtggatttttaaagtagaggtggcatctgacgtggcatccagttgtaccaaaaccagcctaaaattgctaactggggtaaagtatctggttttgatatttggggtgttagatacccagctttacagtttgagggtgtgttttagacaaactgaagagttaaagggtgtaaaatggacttatcacataataatatgtcattgataaaatatatttatatatgctagtattgcttgtttacttatttgaatatatagaaaatctaataaatgccattgcaagcgtcgaattccaagaaatgtcatcgacaagtacaagctccataaaatgccatcatacaagtaactttgttttagaaatgccactacactggccaaggtcacctgtgatgggcccaaaccctcatctttgacggcttcacgcatggtcagtgatcagtggtcactggtgagtccagtcacctttgacgggtggccggccgtcacaggtgacacccatctctgacgggcaagttactagaaggccgtcagaggtgttggtctcctgtagcctagggcgagttgggactcgtcacaggtgactcatctctgacggccctttaaataaaggccgtcagaggttatggtcttcgtagttagaagctgtcataggtgatctacatgtgacggccccaaaagtaaaggcccgtcacaggtaggtcacctctgacaggcctttatttgctagtccgtcacaggtgaggtttcctttgacgaatttttgttccgagccgtcactgatgagttaattccagaaaaaaaataaatgctaaatattggctagcctcaggatttgctagccatgccctctgaaacacagatacatcacagatatattttagtcaccccccaatataacatcacagatccatttcaaacatcacagatccctaacaacacagatccatataaaaattgacatcattcacatatgcagttcaaatgccacaattttgcacagcaaattcacaccccttgaaagccacaatttcggtcgttgctcatagaaccgcatatatacttaccaaatggattaaagctgtaatgtcctcgacctccacaacctgtcaataaggaataaaaaggagaaaacaattgaatagtacaacgtaaatcgtagttgatcaaatttgatgacaatttagtaaactaccataaatattgcacatatgaaagtaaattacattgcactccataaaaacatatttttttacatcacaagaaattataaaaacatcttttttacatcacaataaattatctagccaagttcatgagtctatttgacgtgaaaacgtcctttcttgttcattatttctgcaagaatgaaggcgcacactgcgcctctgataggggggggtggttgatgggtgagatcttgaagccagctctacctttctgtttaataaataagaggttaacacgttttgaatagcaatgttggtattgaaatgagcttattcgccattagcaacaacctcagggtcgaaatctttcacctctcttagaagtgttgacatgttgtggcacacgtggaaaccacattggtctcggatctgttgtgcgcatgcgaacttggtgccatgataaagctcgtcctttccct

SEQ ID NO: 19422 - DNA, 8150 bp, Oryza sativa
ttgatacaattcagagtttaacaagcggaagcgtaaatagttaatttattacatgggcagcgaaggcccagcacacacaaagacaaacgagaaacagcggaagactagggcgacgaccacaggcacttgacggcaggcacgagctagacaccgaagccttcatcctccaggaactcctcttctgggtttgggaaaaattgagcaagactgagtacaaccaccgtactcaacaagacacacccacaagtgcagaataaatgcaaaggagtacaaaggagttacactataaagggttagggttgcagtaaacagcatttaaagacattagttgctcagagctattttgcaaacacgattctagtactatacaatattatttatcaaggccgtgaacccacacgaaccaaccttaacccaaggcctacgatgattcagaccgaactggcaacccgaccctgggtcccagctcgtcccaagccaacccaggccaaccattccacattttagttgttaagcaagttttaagaattaaaacactaacttgggtacattgctcggcttgcccataaccgagggcgcggctattcgaatagattatactctgatcagaggtgtacatctttacccacaagacacatcttcctcacgtgtaaccacgtgccacataccaccacggtatacagacggaagacgtgacatagtttccaacccatcctagccatagacaagagtaccgacccaatcccacctacggccggaacacccgggacaggcaggcaggactgagcccctagcagcaggacaccggccctgtgccatgacatctcgactaccgggccgcagctcgtgtagccttcatttgtcctagagatgtccatcgacccccgacttcttccatctccatccgtgtacttttgtttataactagactgagccacaaactaagccttacccactagacatgtggaagtacggtagtgctttgcaacagaggcccgaagaccggtccttatatggccgaggtgctactatcaaaaccatgcaccccgagcccagcctaaaaccatttttggggattttgaatagaaggagcggtgtgaagccaattccacaataaccaaaccattccacagtgtccaggtgatatgaatattcccaaagtctagagttgttaaaccgcctaatgttacctaattaaaagcgaagcatctacctaaaatcatactagtgataccatgagtagagtgtccactagttggggttttgtttattctagggtgaacaaggaaataataacaataacaataataataaggtcataacaaaggtaaataggcatggctaaataaaacaatgataacgcgggaatttaaataaagcgataatgcaataagttaaatcaacataattttacaaactgggattcaatatgttcaaagatgatgtgacttgccttgctcgctttcccaaacgtcggcttcaacttccacgaagagcgggtcttccgaagctgcagcgtctacacgaccaacggaaaagaaacggcttttactctactaaactccatataacaagcagaaacaaagcacaaaaatgggttcttgacttcttaaggaaaaattagagacttgaacggtccaattccgagttcaaatggccaagttatggccatttgaagtctatatgctctttaaatggatatttacgaatttcttcatttaaattttaatttaaaatcggatttattgcgtcagccgaggggaggggcgcgcggaccgggtccacgggagtggggcccacgcggcagcctcacggtccacggtggaccgggtgcacgcggcttacgccggccggcgccgtgggtcccacgcgtcagccgcacccgagggcgcgggcggctgacggctgggccccacatggcagccgcggggcgcgcccgaaggcggcctcgccggcacagccgacgggaggcgacgcacccgcgccccgatggtcaccgccggcgaccaccggcgcggcggagcggcgcccgagagaggggagggaagggggaagtgaaacggcggtccacggctcaccccgggtcgatggcgacgacgggaacggcgaccggagcggaggaaggcggcggcgcggttcgggtcgatgaggacggcggcgttccggcggtcggcgggcgaaacggaggggtggacgaggtcggcgaggttgggcgaacccgaagaaggcgacgccgaaacgggagagggtccggggcgacgacggcggcggaccggagctcggcggcgacggcggagagagagagcgacggcgcgagctcgattccgacggggagagagagcggcgagggtcggaaacgggggagggaggcacggggagcgtttatatagggttgggagggggagagaacggccggatgagggggaatcggccgcggaagatccggccgccattgatgcgccggcgaagttagggggaaactttccgaacgaatccgagggagagagagagggaaaagtggggggaaagagggagggaatcacggggagtaatttccccctctttattgcgcgcggggacggcgggattcgcggcggcggcggcgctagggcacgggcgaggcggcgggagcggcgggaggaaggggatgacgggtgggccccacccgtcagcgagggtggcgggcgggcccgcccgtcagcggcacgcgtgcgcggggagggggccggatgggccgcgggggagaggagagagagggagggaggtgggccgagccggcccaagagggagagggggagggaaaagaaactttttagggtttttcttttttataaaacctttttaactttgtttatttcttcttaattattatttgtgctctgaaaattccactaaaatttatttacgcattttaggcttttaggaaatatacaaaaatcctccaagccttatttgacttttaactttgcacattttaattgttggaggctttcacatggattttacttattctatgcatagttttgaggatgtattttagagtcgttttgggacgcgacaacgactcttgatccaacacaaccttaaaacatttatgtattagaactaatttaattaggagatattgtccaattatatcacaagtatagaaggtatgcacttacaaggagtagcattttagaagaccagtgtccaacttccggatcctaaaaaggtcgaagaggtcatcaaagcctatagttatataggcaggcgacgataggaacggctagtggtcgtgatgtccaactatcgatgattccctcattttccgcttggcattgcttagcttcatgtattgcttatgtagctctcggcaagcaatacccatcacggctaacacattgtcctccaccaatggcatgcctagctcaaattgggctggtgccctcacgaccttccccgctttgttcagcatcgacgtcgcagccttgcccctttttggctccggcgccaactccctgaccttccccttgctgcgttcacgcttctggcccttgacaagtggtggggagctatcggcctttcttgtggtctttattggagccaagctttgagctatatctgccaagtccatatcagctccaccaggagaatgaggtagtgacaatgccgatccacggggagcctcaattgatagcttagacttgggaggtgtaagctccgtcggtcgacttggacgaggagtcatcttcacaactatgtcttctttgggccattgtatgaacgtcttgcgcgcatcgcccaaagtcatgatttcatcattgggggcacaggcagcggatagcctgaccaggtgtcctttactgtatcgatggacaccttggcatacctagctagcaggtctgcgccatggaccttgtctgcaaccgagggcttgaaagccatgccctcagcgattttgggagcgaaagttgggtggaccctcgccagtaggacacactgtgctacgccctgcatatgtgaaagtttgaatttaatattggaacgtgtaaaggtttttttattagatacggatcggataacatcaattacctctatgtggtccactgcacctctgtggatgcacaattactcctatgctatgacggactcacgtcgtgttgtgcacgaggagttggatgcacagtaggtgttgtgcctcggggtatattcatgtcggcgaggaccttattaaccctttcttccaccctagcgttcgtgctagcttctagttcttgaatgacctcaaccttaagttcagccttcaaacgagcgttcctctcttccttggagactttccgtttcctgtattgggagctgtactgcgggagtccatgcttccagggcacatcgctaccaattcccctagttcggccaggatgttctttggttccgagcacctttgtgaggatgtcatcttcgcgcctcttcggcgcggactcaacctcgctttgtgaagcttgttcagcaaccaagcctaactagaaaaaaaagagtcatttatacgaacttctactttatacgaacggaaattagttaggttaagtagtgaactcaccagttcctgatagacgacagcatcacttttgttctcaaatgtgacagagccgtccgggttgaccttaccccttgcccgtgcccagttgcgagctctttgttcagggatgtctgaaaacggggcagggacatttgctgctgcagcggctacatcttcttgggcccatattgcctccttgccgatgtactctgcggtgcccagccgatgcgggtgctcattccgctgttgcagtaggcgatgtgcctcgcttgattccctagactcttgggtgttcttgagagagcagaattcctcccacaccacttcggttatttgagggtattcatcaaacggcgtatgattgccgggcgggttgacaatctcggtgaagagcttcaacttccaattcttccaagctttgcccatcttctggaatgccttccgcttgagcctatcctttgcttcagccgggaatgtgaaccatttctccattgccgtccaagctcgctctttctcggcttctgtgaccttgccgatatctttatggaggatcccgaagttctcacgtgccgccagcccgcagcagttagaccatcttccaatgacagtcctgggcgctgtgggcctaccactagcgtcaacctctcttataacttgcactgtggttggccatatattttgtgaccggggatttctacttgacctacttgcacttgtcccgcccgacatcgacatatgttgttcctgcggcaattctgcagcacaaacagaaggcaacatatgctaaggggtgctagctaaaatttatgtggtcatgtggtgaaaatttatcctataaattaccatgaatttcgggttgttcgaccgccgttgtcgagggatgaccttcggcaactgtctccgtggctgggtttacttcttcctggatcctcgcaggtgttggggagggcgggttttcactgggcgttgtcatggtctaattttcgcgaaaaagcttataaatttcctaccattatactaaatagcattagatccaatgtaatacggggtatactatgaaacatatggcctcagttttgctcagaaattatgcatcaattaccatcatttccatgaagggaaaaaaagaggaaattagctactaggagggaaaccaacccaaagtaaagcgtaaaaaagaaccaagtgtagatagtctcctcttatcaatccaaaaaaaaagaacaagtgaacatgaaaaaaagaacaagtgtagataatatgttcttatgcattaaaaagaacacacattctataacagcagcagcagcagcaacatcaattcattttatgacaatcatcaaaattcatcaaaatcaggcaatcaggggcaattcttatgcataaaaaaagaacaagtgtagataatctgttcttatgcagaaaaaaagaacaagtgtagataatctgttcttatgcattaaaaaaagaacaagtgtagataatctatgcacaaaaaaaaatgaataaggggcacaggggcaataggggtagcagcagcaacaacaattcatcaaaaaagaacaagtgtacataaaaaaaagtgtagaaaatctgttcttatgcattaaaaaaagatcaagtttagaggtatttctgttcttgagcattcatcactttgagcattcatcactggccatttaacataaggcaaccataggcagcagcacacaattaatttatcaagcaggggcaagtgtagataataaaacagcccacaataatttatgtggcagcagcagcaagggtatataaatcatgtatataaacaacaattcatgcaactcacctattcatagacagcaagggtatataaatcatgtatataaacaaaaattcatgcaattcacctattcatagatagcaagggtatataaatcaacaagtgtagataatctgttcttatccataaagaaaagaacatccactgcagcaaaattcatgctaagatcctctaataccaatagaataatttctctaatactgcattcatccaaaatctagcccctacattcatccaaaacatccacagacaacaaatcacatttaattcatctatacagcagcaccaacaatcgaaataacaaatcacatttcattcatctaaacaatgcaattcatccatcgaaaaaaggaggaatgggggagggtggcggcgtacttggagaagcggcgtacttggagaaggcggcgcaggccgtagtcgtcctagatcccggtggcggcgaacacgagggcggggaggcagcggcgaagaggtcgaggtggtcggcggtgcaggccggtgtcatcaatccaggcgttggcgaggtcgggaaagccgatggcggcggagagggtggcggtgtagaggtcgaggtggcagtggtggtggcgatggcgacagaaagggcggcggtggtcggggatcccagcgtcgtggatcccggtgtcggggaggtcggggtcggggaggtcggggaagtcgatggacggacggcggagaggacgagcgtccgtgagggcggcggtggagaggtcaaggcggcggtggagagggcggcggagagggcggagatggcggcggagagggtggcggagatggcggcggagagggcgacagggagtcgaggcggcgacggtggagatggcggcggagaggacggtggcggtcgagagagtgagtgagtgagagtgggtgccagatctggatcgatctataagaggtccaaccctaggtcaaccctagtcaaactcacctgtgacgggcgccaacgatggggccgtcacaggtgatgtcaccagtgatgggcgccaactgtggagccatcacaggtggcctcacctgtgatgggcccaacattctgggccgtcataggtaaggtcacctgtgacggccccgtaataagagcccgtcacaggtgagtttgcctacagtaattttattttattttatttcacttagttcttttattttccttaacatatttccacatacactacatatttttgttatacttaattattttatttcactaacggtagaaattgcacttcattattttactaattttattattttatttccaatggttatacttgcttaattattttatttcacttctagtgggtgcttcacttaattattttatttgactatttcataagcaatatactattgatcattccgaacatattagtcatacagataacagacatgtagacataaactacgtacataaattacaaaaataatccttcctcatggtcgacgcgtgcatattgaacgttatcttcttcttcctcctcttctagaggtatttcttgacctatgccgtggacgtgctggttgtaatcatcctcttcaatattgtccaatccaacaattccccttttcccttcacgaacaacatgtagtttcttgttacacgggtcaactatgtagaacacttgaacaacttgtttggcgagaacgaacggttcatccttgtacacgttgttagccaagttgacagtggtgaaaccttcattgtcaacttttacattacgaagatcgacccatgggctgcaggaa

SEQ ID NO: 19423 - DNA, 1562 bp, Oryza sativa
acctagcaattcggttcttcagccactcgttgaaagaagacatgtgcttatttctgacccaactctctaatcggcctgggttctcctgtcggagaactgcaatgtgttcgtcaacgtacgacaccacctcagtcatatgctgcagtaccgtgaaatgagctttatcgtacaccttcccatccaacctaacagtctttctttcaacagtaccaacaccatcaagcatccctttgtgatgagatcgtggtaatccaattgaagatgtttctgacatgtagtccacacaaaaattgatgacctcttcgatagtgtaactctcgatgatactcccctcggggtgtgaacggttccgtacataacccttaaggatccccaggtacctttcgcaaggatacatctgcgtcaataatgctggaccgcagcactttgtttgcctcacaaggtgcacaggaagatgttccattatgtcaaagaaagtttgaggaaagtacatctcaagatgacatagggttctcacaagttctgcctgtagttcatctagtccctcgggatcaatgatcttctggccgattgcatggaagaaggaacacaaccgctggatcgtgtgtcacaccttaggaggcaaaatattccttattgcaacgggcaacagctgtgtgataagaacgtggcaatcatggaactttattcctaccaacttaagatcttgcagtgaaacgagcctactgattcttgatagtaaccagatggaacctttataccactcaaacatgttagcaaatcaatcttttcttctttcgagagagtgtagcagactagaggaaggtaaaccctgccggattccgtagttatgggatatagttccgagcgaacaaccatttcttccggatctcgtcgagcgttgacaccatcctttgtagtacctgggttaagcagtaatcccattaaactctcgcatacattcttctcaacatgcatcaaatctatgcagtggcgaacttcaagatccttccagtatggtagtctccaaaatattgacttctttttccacatgctcctctcttttgtcttttgttttttcacatgctcctctgttttttccttcgacatgctcttctcttttgtctttccaactttcctcttttttccaaactcgttggttattcccatcactaagttgtgcacctctgtccctgttagctctgccgggggtccggctgtatctctgtgtccattgaaattctttttcatattcctatacgggtgataccttgggagaaatctcctgtgacccatgtagaccgtcttgtgtgaatgcttcaaccatttgctttttgtttcctccatacactccgaatacgcccatttctctttcacagtttgcccagaaaggttgccaagggctggataatcgttgatggtacaaagcagcatcgcatggaggttgaaatactcttgtgcatatgcgtcccatgttcgtgtgccctcattccatagcctttcgaagtcatcgattatcggttcaaggaacacatcgatatcgttgccaggttgtctcggtc

SEQ ID NO: 19424 - DNA, 13905 bp, Oryza sativa
tttactgctgtcatttccttcctacgaaattcctcatcaaacaattgccaccaaaattcaatctggcaatcttttctttcaggccatgtgctgtgcatagaactggaaatgtataaaattttcaattatcaaagaagaaacctatgttcactactactactacagagcacctaatcgaggacggcatcatacgttttgttttatctattccaaccgaggcattttctcttcgaatataaaagagtacagaactcgttttatggtaaagcgttaaaggtacaacatttaattagcattgcctcttgttgacaattatatatgaggtgatacgtggtcacacgaataacaagcagtgaagcgtgcacaaatatgtaaacttaccctttttctttcccaaaatcatttttgtacaacgtactaaatttttcgaccaattagatctgacaagcactaaaccgcgtgtaaatataaagaactaaagtcccccaagaaacaaattaaaaaaatactaaaactacttgcgaatgtatatgtatatatatatatactccatccatactcgtaaagaaaatcgtttatgacaatatttaagtcaaatcttaggaatataaatcatgaatagctctcaagtttgtcgagtttgaaaatgtaaaaatttatatgaatagatttgtcttgaaaaatactatcataaaagtatacatatattatttttcaataaatatctttatagaaacaagaagtcaaattgtattttgaagaccgtgtcgctatccaaaacgacttcctttccaatccgagtacggagggagtaattcagtacttattcccctaaaattcagtaattactaaacattcctacgagcagtttcatccaaagtacttagcatcttcacaccaaaagtcctgttggtaataaatattcaacacggctataactttcgttcttcgttaaataaacccataatttcaccaccaaacacatccatgtgcattggaaacttcatggctaaaggcgtgaagcatcttcggaatcttcaccaaacgagaacgaaactctcttggattgccataacacgaccgcgaaagaccaaaatcattttagtcattgcccaatgaaaaacatcaacttgaccaagcgctcacttatcattgacgtacagcatctatgtcagtcaccagcgacctcattaccagaagtcccccagcacgcattgcacaagttaattaatgtgtggaccagtaagtaaaccactaggcactagctccaaaaaaaaaaaaagctttagaaaacgacctgatctcacaccaaacgcatgtcaatccgtctatataagtagccgttgctagaagctgccatgtatatagtcctaaccaacagtcaggaacagcaacaaaagtaagccaagaatctctctgcctcccaccaacaaccacacacactcacagctttggtcatggaggtcacccccaaccacacgcagaccgtctccggctgggccgccatggacgagtccggcaagatcgtgcccttcgtcttcaagagaaggtataaagaaatgagcaagaagtgattgatatttggatagatttagatgtagcttgttgttgagaatgagatttattgcatgggtggttgcagggagaacggggtggacgacgtgacgatcaaggtgaagtactgcgggatgtgccacacggacctgcacttcatccacaacgactgggggatcaccatgtacccggtggtgccggggcacgagatcaccggcgtggtgaccaaggtgggcaccaacgtggccgggttcaaggtgggcgaccgcgtgggcgtggggtgcatcgcggcgtcgtgcctcgactgcgagcactgccggcggtcggaggagaactactgcgacaaggtggcgctcacctacaacggcatcttctgggacggcagcatcacctacggcggctactccggcatgctggtggcgcacaagcggttcgtcgtgcggatcccggacaccctcccgctggacgccgcggcgccgctgctgtgcgcgggcatcacggtgtacagccccatgaagcagcacggcatgctgcaggccgacgcggccggccggcggctcggcgtggtcggcctcggcggcctcggccacgtcgccgtcaagttcggcaaggcgttcggcctccacgtcaccgtcatcagcacgtctccggccaaggagcgcgaggccagggagaacctcaaggccgacaacttcgtcgtcagcaccgaccagaagcagatgcaggtaattacatacgaatatacgattgaactccaaggcaacctcatcatgtgcacgcataagattaattagttttttttaaaaaaaaacgaaccgatcgcaaacgtgtcaatttcattggaaataataggagtaaaagttatcaatacaagtatgaaaaaaacctactatatgagaagtaagaacactacgacagcataataagcgagatgtgctttgcccctgctatcgctcaagttctgccttccttaatctctgctcctaacgatgtgaaaaaaagaaaaaggctctttgcgctgaaaactccccggggttatccgctctccttccaaacctctcacgcgaggattagtgtgtggaattcttttttcggaagttctttagccgtcattcaagattagtggagtactaatttaattaagcactgaactagttaattacttaatttactgcaataaattaggctatgacgaggagccttgactacatcattgacacggtcgcggcgacgcactctctgggtccgatcctggagctgctcaaggtcaacggcaagctggtgctcgtgggcgcgccggagaagcccgtcgagctcccttccttccctctcatcttcggtgagcatttgagcaatcacccatcaagttaatttaattactactacgctacttagtagtatctgccaactaatcaatcaattaattcgtgggttgcgtgcaggtaagaggacggtgagtgggagcatgacgggtgggatgaaggagacgcaggagatgatggacatttgcggggagcacaacatcacctgcgacatcgagatcgtgtccacggacaggatcaacgatgcgctcgccaggttggcgcgcaacgacgtccgctaccgcttcgtcatcaacgttgggggcgactccaagctctagactcatgctactatcatattgctacctagtaccaacctccatgcctttcttaatttaatttattggaggctctgcacgcagaatgggacagttcgagctgtcgttttctcgttggccacgtgaagtaactgtacgcactttgtacttattcgagaaatgatcagtgataaatcatcaatggccttattttattcttaattagagcaagtttaataatatagccaactactaatttcaaatcatctagagtcaatgtaatagctaattcatacaatagttacttactatactattaatacctggtccaacctatcatacacacgttacgtcttgaagtccatgctgcagctggctacatatttttagtccgttgctcttcttttttttcctttatctttttaaaatatatttataaatggcttagagccttgctattgtacctgctcttaataagctatgttttgatctctgaaacgagccatgaactgaacatatgttggtcctatgttacgatccaacacctgccatagtaatgcgtgtgcacggcggtaatgatgagaaatcgagctgagctattgagtaaggggattggccgattgggtgtagctagctagccgtctagaggaattacaggtagaagagagaagggaaaagtacaaattaccctatgaactatcacggtcggccaaatttcccacatgaactcgaaaaccggacattactcaccctaaactttcaataccgaacgaattacctccctcgacccaatccagagcagttttgtcctacgtgacgtacgcgtggcaacctagtcagcattttctttttttaaatatggtggggcccacctgtcattctctcctatcttctccttttcctcttcccctcttcccccctctctctctctcgcgacgtcaggcgtggtcggcacgcgagggccgcgatgggcggcagcgggttgtcaagcgtggacgcgcgcgggcggtcggcacgcgagggcagcggtgggcagcagcgcgtcgtcaagcgtggccgcgcaggcgatcggtgcgcacggcgccgctcgagggcaggtggtgggccgagaagatcgatccggatcctctccagcggccccgtctttttcgttcttggtcatcaggagagatcgatctccttggttttgtcattgtcaagcagcagcaacggcacctcgctagctaggtcaggggcgaagcccaatagaggcccgtgggtgcagatgaacaccccttaaaaaaaaatttagttattacccccatatctctgccctaacaacagtccagttaacgttgtaaacccatgaggagagtcaaatccagatcaatcttttctcttctcgacttctcgtatgccgcgtcccgtcgctgctaatcttgacgactctgcctcgcgtctgtttggcttccacgccgctgctctgcaatcagccaatcccagtctcccagacagcacttgcccatctcggcaccacgacgcgctgccgtcggccatcgccctcggcagctcgccgtcgccgtagcccctgcttgcttagcgcctgcattgcttgctccagccgcaggagccgggaaggcaggaagccggtcgccaggcaaccagctaaccaggagcaagcgtcagaccacactttcacaagccatgaagccaacaacgacatcatccatctccatcaactgatcagcacacagccacattgtgcattagtagagacaaggtaagaaagcatgcttcatctatttcttttttaatcaatttgatttattagatacaaaggcctaaaatttttattggttgtttttttttacattgtagaattaggaggccagtagggttcaatttggaatccttcagaattggaataaaattgcagattgggggaaaatttgagaatttgagttgaaggtgctatttggatgtaagtcatatcaattttcaatctacttctgtacttgaacgaatgataaaatcagtatatatttacatcctcctgaatcatctaatgataggttaattgatggaatgattttacaaaaggaaagtgccaaagccgaatagtgctaacaatgcatgtaattcatgtttggatgatataaactgggaagatgagattaaatatgatccaagattaagaaaacaaattgatgagtaccatcataatctcagagagagggtgagaaggaaatacttagagaatggcccttgttaacctcgcacatttgcttttcctatgacaggttcaagaaggtttgtcccggaatggtttgatgagtttggaagttggcttgaatacagtgagtccaaaaatcgagcatatattgttttttctgtttcttgtttagagaaaagaaggatggtggatatgaagcatttgttaaaaatggttagaatggttttcatagaaaagaaaggttgaaattgcatgtaggtgatgtcggtggttcacactatcaagcaatgaagaagtgtgatgatttattacaaaaaagacagcacattgatgtagcttttcatagtgtgagagaaactggtaagagggactatcttactcgattgaatgggtccattgatgttgctaggatgctagtaaagctaggattgcctttccgaggtcacgatgagtcaaaggagtcctacaacagaggcaacttcagggaatttcgtgattacacagcggagcaaaatccatccttaagaaaggcaataggtacaaaaaaatcaaataacagtcttttggttgctcctgaaatacagagggatatcgtgaaatgttttgcaaaggaagtgctacatgctattctagaagaaattgggcatgatgttttttgcttgctagttgatgaatcaagagatgtttcttgcaaagaacaaatggtagtggtcttgagatatgttgataaatagggaattgtgagagagagatttattggtcttgtccatgtgactgaaacaacttctgcctatctcaagttttctattgatgctctatttgcagaactaaagctaagtctaaagcaagttagagggcaaggatatgacggtgctagcaatatgcgaggtgagttcaatggtttgcaatcattgatcatgagggaatatagttcagcttattatgttcactgttttgctcaccaactccaattggttcttgtggatattgtgagaaaacataaagacgttagtgatttttttactaagatttccatcttactgaatgtggtgggtggatcatctaagagaagggatttgattagagatattaatgttaaagaaatgagtaaggcattgggttctgggcaacttcaaactggaaccaggttgaatcaagagcaatgtcttcagagacctggggatactcgatggagttcccactataaaactctcaaaagtttggttggcatgtttgctacaatagtcaaagtgctagaaattgtggaaaaagacaaaaatgattggaaaattagagatcaaggatcgaatcttttggagtacttccaatcttttgattttgtcttctatttgcacctcatgttgactatattaacaatcacaaacagcttgtcactagcattgcaacggaaggatcaagacatagtgaatgctatgaaatgtgtaaagtcaactaggctcaatttggatgagcttagaagagaaaagtgggagaaagttctagatgaagtctctgacttttgtgacaactatgatattgtcaaattggaaatagaagatacatatattgatcccaagaagcgtaggcacaaatctggaattacaaacaagcattactatcaagtggattgttttaatgatgttattgattggatacttcaagagcttgacaatcgcttcagtgagacaagctctcaattgcttatttgctcatcggcttttagtccaagagactcatttcatgatttcaatctagagaatttgatgagtttagcaaaattgtatcctagtgattttaattctggaaatttgagggaccttagccaccaacttggtctctacatcgctgatgtgagggatgatggtagattctccaacatacaaactattgccgagctttctcaaataatggtggagacaagaaaacatctttgttatccattggtttatcaacttttaaaacttgtacttgtattgcccgtcgctactgccacagttgagaggtgcttttcagctatgaagaatgtaaaaacatatttgcgcaataaaattggtgatgagtacttaagtgatagccttatttgttatgtggagaaagaagaaatgaagaaagtcaccaatgaggccgttgttcgtcgcttcatgaaaatgtaaggatgcagatttgatgatgattgaaggtaatgattgtatctaagtgcgctggattctactttttatttgaaaaatgagaactgattttgatgttaacttgttttaggttatcaaatcatcgtcgaggatgttgagataatgaaatagaacggtgtttgcttatgtttgcatatgcagatcatcttttgctcatgggttagtaaccaattctcaattatcaatgttattagtggatttcttaattttgtaaaacaatgtttgtcactttttttattttattgatgcatgtgtgtctctacagttgatgtaaaaaaattattaatcaacggttctatcgaaaatgtagcttgaagttatatatattgatatacttgtggcaaaatctcgaacccccctccattttgctctagcttcgccaccgagctaggtcatcgtcgacggaatctgctccgccccctgcgcaccgaccgtcttcgccgcgaccgcggtcgaccttggggcctccagcccagacctcctccttctccggtcgtcgcgttctcctggaccacgccgtcggccggctctccctcgctggcgttcgttggtccgccaccgccgtcgaccggcccaagccacagtgtcctctgcgatgagccagcgctggcgactggctagggtgctcgttgctgccgtcaggacttggccgcttcctccatcggcaccgcctcctggattttgcggcgcaatcagagccgcctgccacgctcgcgtcgtgcacctagtcgcgctcgctgtctggagcccatcgccgcgcatgcctgttgattttgcaaattggccggggaagacaatgagaatccaaatgtctcgccatctcgatcacacccatgttacatccatcgatcgcatcgtcatatactacatcattaatgctaatcatctcttcaattctatcaatgtccgttgtcatcgtcgtcatcaattgtctattctgtaaccgtgtcctagctatagctaaagacaaaagacacaatcatcccctgacgacgcgctgccgcccatcgccgcccccgcaggtgctggggagcttccggccgacccccgcctcactgccatggccgccgccgtgcgcaaagctcgctcctctcgacctccccttccacctccatttcctccccttccccatccacctccgctcccccctcccccatcctctcaacctccccgcgcgccaccgggtgcaccgacggtcgggccgcccgcgtgcgccactgcacaccgcccgtccctcgccgatgccgtgcgcgtgacggccggcccgcccccgcgcaccgttggccaccggcgttgcccaccgcccctctccgcattgcgtcgtgcgtgccgtcgcccgttgaccatgtatgaacagaggaagagggggtatgacatatgggtcccaccattttttttagaaaaaaaagctgaccgggttgccacgtatacgccacgtagaacaaaactgctctgcattgggtcgaggggggtaattcgtctggtattgaatgttttgggtgagtaatgtctggtttttgggtcaggggggatttcagctgaccgcgatagttaggggggtaattcgtactttttccaagagagaaacagagtggtgggcgaagaggatttgacaaacaggaaatatgcatgacatttaacttttcgtaacttttaagatgtggcaattaattatttccaaatcatatagaattgttatatgaacataaatacatgcagaataatgagatattcaaatccatttaatctagtctaataacatgccaaatcatagaattgtggtatgaacgtaaatacatgatacggcatagatgcagcgatactttatgtaaaaatcaacaaaatgatatgataaataaatatttagaataagagtatttgcatctcactctcaagacatgtcacgcccggaatttctatccaaaattccaaacgcttacatgtgtgtgaaccctcgtccaggaatcagccgaggcacacaataacaaattgataaatgtgtgtgaaccctcgtccaggaatcagccgaggcacacaataacaaattgataatagagtacaattattactctaattaataagcgaataaaatgtcattacagaggtagatagttcctctcaatcaataaagatctaagcagcggaaaataagataaacggcgcagacgactccactccacaggcagcttgaccagggctacacctaatcctccacaccatcagcttcactgtagaactcctcctctgatgaatgattgcaaggtgagtatatgacatactcagcaagccacgtagcaaatatacaagtgcacaaggataccaaaggatggcatagtagggtttcatttgcaaaagcagcatttagcaaacatttaagattttaataaaacagttaagtaataattaatcaatattaatccaacgctatacaacataccctgttgcataggcccaaccattctgaacaaccatcccggctgcacagttctatctccaaaccaggaatataccattccaaaccaggagctaaacaaattattaccagttaaagcatcttttattatgatgagaggtgtgagactaatcacgaaaaacattgttagacccgcccataaccgcgggcacggctattcgaatagttttactctgatcagaggtgtactactgcacccacaagacacagccccacatcatgtcaccatgtgccccaataccactacggtacctcggaaaggagctgtgacaatacccctcgcacaacacaatccactacagcgcacctttcctggatcataatcacccccttataaacaaggcatggactccccagcgacccccgtgggcttatctccgccacttctcagtctggtgccccgcaatgaaccatgctatacaaaaggtaaagccgttgcccacgctggtttgtggttggcacggttaatgtttcacaacagaagctcgcgaaccggtccttaattgccatgagcacgactctcaaaaccatgtgctcacaacccaccattatcaagttttagttggcacataaattaattaaccaatcacgattgaccatcgtgagctatcattaagccatcattaaataattaatagtaaatcataagttatcccaatagtgtgctaatgtttctaggcatggctaagcaatcacatctaatatctagtcgaaccaatatatatatagcccaactagtcaagttaaaataacccaaggtatcaaggaataaagtaatcaatgcaaacaggccataacaaaggaatagtttcacaccacccagtgacattcgaaaataaatccacagttgaattaaatagagaatttaaatataggatcaacatgctcaaaggattgtatttatgatctgtgtgacttgccttgctggccttggaactcttcaaattcttctcctgcgagaacggactctccggaaacgtcggaatctaaacagaaaagagcaaaaacaccaaaacagcacataaacaagcatggacagtatatgtagatatttttaacatgtagatctcaattttagaaaaaattagagacttgaaccaactaaaaccgagctaagatgaattagttatgaatttttaaagattaaatcgatttaaatcacttttatggattttaattgaattatgacgcaataatgaattatttttgaaaaggaaaaaagagatttattgcgtcagcggctagggtttgcggtggaccgggcgcacgacagcggttcacgggaacggacggccgagatcgatcctatccaaaacggacggccgagatcgatcggtccacgtccggctcacagcagacggccacgatgacgtcagtggtgacgtcatcgccggcggcggcagcggctcggcggcttggcggctcgggcgcgcaagcttgccggcgaacgacggtgcggcggcgcgaacggagagcacccacgggtagcggacggcgcggcgaactcaccggtgaccaaagaaacggcggaggagcagcggacggtgacggcgacgaggttgaagcggcggagaccttcggcttgacgacggcgacggtgctccggcggtcttcagtgacggcgaaggggcggacgaggacggcgacgcgacggcgaccacgaaggcgacctccgcgagcgacggcggcgcacggctggagcggcggcaacgacggcggcgcgaggtcccacggcgctagggctcttccgacggcgagagacgaaggcgagggtggcgacgggtagaggagacaccggggatccttttaaaggggctaggaggcggcggcgaaggcccacggcgacccgcggcgggatggaaagctcgggctcagagagagagagaccgatccgaatcgacctcgaatcaaaaggtagaggagatcccgaagattgtttcccctcaatcgatttcaccggatcgggaaaggagcggccggatttggaaggaaacggcggcggcgcggcactagggtttcgggcggcggcgacgcgaggaagacgacgggtccgacagatgggccccacctgtcagcgaccgggcacgcgcgcggctgcggactgggccgacttgggccgggggaagagagagagagggttttgggccgactttcggcccaaagccaaaagagacttttaaaaacctttttcaattaaaattattcatgaaatgcaattccatttattaaaaatacttccttagctcaaataaatcccagaaaaatctaggaattatagaattaagcaaagtatttaatgaaattttatctggccccattttatattggaatttattaattaaaattagatcttctcttctaggcttttaaaataaattctaataattccaattaaacaacaatttatatatttaggatttttagggtgtgacaaacctaccccccttaaacagaatctcgtcctcgagattcggaagaactggcgaacagatgcggatgagctgacttcaattcatcttctcgttcccaagttgattcttcttccgaatgattactccattggactttgcaaaaacggataactcgatttctggttcttctctcatctatttccaagatacggattggtctctcaacataggtcagatcctcttggacttctatttgttcaagattagcttcttcggtaggtacccttaaacactttttcaattgcgacatggaacacattatggactcctgccaaagattgaggtaactctaactgataagcaacctctcctcttctactaacaatcttataaggtcccacaaaacgcggtgccaactttcctttagtgtgaaaacgatgaactcctcgaagaggcgtgacacgaagatacacataatctccgtcgtcaaaactcaaatctctgcggcgattgtcggcataactcttatgacgagactgggccacacgcaatctttctcgaatgattttcaccttttcttctgcttccctcaggatatccgtcccgaaaacctgacgttctcccgtttgatcccacaaaagcggagtgcggcacttccgaccatacaatgcttcgtaaggagccatctgaagactagcttgataactgttgttgtacgaaaattctgcataaggtagattcttatcccaacttccaccgaaatctaaagcacaagctctcaacatgtcttccaaaatctggttcaccctttcggtttgtccgtctgtctacggatgataagcagtactaaagttcagcttagaacccatctcttcctgaagcttcttccaaaaatttgaagtaaactgactgcctcgatcagacactattttcttagggacgccatgcaaacacacaatccttgccatgtacaattccgccaaccgacttccagaataagttgtctttactgggatgaaatgagccactttggtaagtctgtcgactatcacccaaatagagtcatggcctgatgacgttctgggtagaccagtgatgaaatccataccgatttcctcccatttccattcaggaatcttcaaaggctgcaacaaaccggcgggtttctgatgttctgccttgactcgctgacaaacatcacatactgctacgtattctgcgatttcacgcttcatacttgcccaccaaaacctttccttgagatcctggtacattttggtactaccagggtgaatggagtataaagtatcatgagcttcttttagaattgcatcttttaaatctttgttgtcgggaacgcagattctctcgcccaaccatacagttccttgctcatcttccaagaaaccgatagcctttcctcttctcatattcttctgggctgcagg

SEQ ID NO: 19425 - DNA, 2299 bp, Oryza sativa
tcacacaacacaatccaccacagcgcaccgttcctggatcataatcacccccttataaacaaggcatggactccccagcgacccccgtgggcttatctccgccacttctcagtctggtgctccgcaatgaaccatgctatacaaaaggtaaagccgttgcccacgctggcttgtggttggcacggttaatgtttcacaaccgaaactcgtgaaccgatccttaattgtcatgagcatggccatcaaaaccatgtgctcacaacccaccattatcaggttttagttggcaatttaattaattaaccaatcatgattaaccatcatgagttatcattaagccatcattaaataatagtgagtcataagttatcccaatagtgtgctaatgtttctaagcatggctaagtaatcatatttaatatctagctaaaccaatatataaagcccaactagtcaagttataataactcaacgtatcaaggaataaagtaatcaagaacaaaagggctttaacaaacaataggttaattccacccaatgacattcgaaaataaatgcaatagttgaatagaaacaatagctttaaacgggatcaacatgctcaaagggttatttgcgatctacgtgacttgccttgctggccttggaactcttcaaattcttctactgcgaaaacggactctctggaaatgtcggaatctaaacagaaaagggcaaaatcaccaaacaacacataaacaagcatgaacagtacatgtgaatatttttaacatgtagatctcaattttagaaaaatttagagacttgaaccaactaaatccgagcaaagatgaattagttatgaattttcaaagattaaatcggattaaatcatttatttagattttaattgaattatgacgcaataatgaattatttttgaaaaggaaaagggaattattgcgtcagcggctagggttcgcggtgaaccgggtgcacggcggcggctcacggaaacgaacggccgagatcgattcatccaaaacagacggccaagatccatcggtccatgaccgggccacggggaacgacgacgatgacgtcagcggtgatgtcaccaccggcggcggctcgggcgtgcatgctcgccggcgaacgacggcactacagcgcgaacggagggaaccaacacgtagagggcgacgcggcaaactcaccggtgaccaaaacaacggcggaagatcaacggacggcgacggcgtcgaggaagaagcggcggcgaccttcggcttgacaacggcgatggtgttccggcggtcgacagcgacggcggaggggcggacgaggtcggcgacggcttggcgatcacgatggtgacctccccgagcgacgacgacgaccggagtggcggcggcgcacggctggacgaacggcggcgacggcggcgctaggctacacggcgctagggctctaccggcgacgagaggctaaggcgagggtggcggcgggtagcggcgggcttgggggtcaatttataggggttaagaggcggcggcgaaggcccacagcgaccggcgacgcgaaggaaagtctagggttcggaggagagagatcgatccgaatcaaactcgaatccacggattttcaaacgattttagccgacgattccaaaagagaaaaggtagaggagatcccgaagatcatttcccctctattgatttcaccggaaaaggaaaggggcggccgaatttagaaggagacggcggcggcgcggcgctagggctcgggcggcgggcggccgaaggtagactacgacctgacaggcgggccccacctgtcagcgtccgagggcgcgcgcacgcggctgctgcgggcggactttgccggcttgggccggggagagagagagagaaggttttgggttgactttcggcccaaagccaaaagaggattttaaaaacctttttcaatttaaactattcattaaatgcaattccatttattaaaaatacttccttagctcaaataaatcccagaaaaatctaggaattatagaattaagcaaagtatttaatgaaattttatctggccctattttatattggaatttattaattaaaactagatcttctcttctaggcttttaaaataaattctaataattccaatttagacaacaatttatatatttgggatttttagggtgtgacaagaaggaggctctgtaccaacttgtcacgaccggaaataacccaacgggcgttccttacgtgcgtgtattattccttgtcccaggaggcaaggtacaccaaaagttgat

SEQ ID NO: 19426 - DNA, 12667 bp, Oryza sativa
cacgtgccacataccaccacggtatacagacggaagacgtgacatagtttccaacccatcctagccatagacaagagtaccgacccaatcccacctacggccggaacacccgggacaggcaggcaggactgagcccctagcagcaggacaccagccctgtgccatgacatctcgactaccaggccgcagctcgtgtagccttcatttgccctagaaatgtccatcgacccccgacttcgtccatctccatccgtgtacttttgtttataaccagactgagccacaaactaagccttacccactagacatgtggtagtacggtagtgcttttcaacagaggcccgaagaccggtccttatgtggccgaggtgctactatcaaaaccatgcaccccgagcccagcctaaaaccattttgaggattttgaatagagggggaggtgtgaatccgattccacaataatccaaccattccatagtgtccaggtgacatgaatattcccaaagtctagagttcaatatgttcaaggatgatgtgacttgccttgctcgctttcccaaacgtcggcttcaacctccacgtagagcggatcttccgaagctgcagcgtctacacgaccaatgaaaaggaaaaaggcttttactctaataaactccatataacaagtaggaacaaagcacaaaaatgggttcttgacttcttaagaaaaaattagagacttgaacggtccaattccgagttcaaatgaccaacttagggccatttgaagtttatatgctctttaagtgaatatttgcgaatttcttcatttaaattttaatttagaaaggatttattgcgtcagccgaggggagagggcgcgcggaccggtccacgggagtggggcccacgcggcagcctcacggtccacggtggaccgggtgcacccgggctcagaccggccggcgccgtgggccccacgcatcagccacacccaagggcgcgggcggctgacggccgggccccacgcggcagccgctcggcgtgcccgaaggcggccacgtcggcgcgaccggtgggagggaaagggggacacgaggcggcggtccacggctcaccctaggtcgacggcgatgacgaaaaaggcggacggagcggaggaaggcggcggtacggctcgggtcgacggggagggcggcgctctggcggtcagcgagctcgacgagggggtgcacggggacggcgacggtgcggcgaagccggaggaggcgacgccggggtgggaaacggtcccggcgagcggagaaggccggccggaggtcgtcggcgacggaggagagagagggcgacggcgcgagctcgattccggcgaggagacggtgtggcaaggggcggaaacgggcgagggaggcgcggggagggtttaaatagggttggaagggggagagggcggccggggaaggaaggaaaccggctgggaggtccggccgccatcaatggcgccggcgagatttgcaggagcaaatccggccgtttgaatgcaagagagagagggaaaaatggggggaaagggagaggggatcacggggagtaattcccccctattgatttcacgcggggatgacgggaggcggtgggattcgcggcggcggcggcgctaggcgtgggcgaggcggcgggacgaaggagatgacgggtgggccccacccgtcagcgagggtggcgggcgggcccgcccgtcagcgacgcgcgcgcggggagaggccgagtgggctgcgggggaagaggagagagggggagggaagtgggccgagccggcccaagagagggagagagggtttttagggtttttctttttataaaaccttttcaactttgtttatttcttaataattattatttgtgctctgaaaattccactaaaatttatttacacattttaggcttttaggaaatatacaaaaatcctctaagccttatttgacttttacttcgcacattttaatttttggaggctttctcgaggattttaattattctaggcataatttaaaggatatattttagggtcgttttgggacgtgacacagccaatcgtccatcccatgatgaggacaggcggctatgtactcctgcagtcgttcctatgcttctggaatagattcgtcccttgtttgctggaaacttgaagtccttccacgaagggcattggtttttcccatcgggaagaatttcgagaggaatgtcgtagagcatttgtcccaggtattgacagcagcacggttggcacagaaatactgcttcgctctcccgaggaaggagaatggaaacagccgcagcctgacagcgtctggactgacgcccttgatggtgtacgtgctacagatctccaggaactgttgtagatgagcattgacatcctcattagtcttgccacagaatgggctagcctgtgccatcgtgatgaggctggacttcaagtcgaaatccacgtctcccatgttgatctgcggcccaatggccacattgtcagcagagggagcagcaaactcgcggagagacttgttagccatagtcttctgcggagcaacgactcacggcctgacgctccggaagaaagctttgtacgactggtttctttgtcggtagagttttctgcggagcaacgactcgcggcctgacgctccggaagaaagcttctggattttctttgaagttttccggcaagttgaaaccagtcatgatctaccctgatttcacaacaaaaagtgaaaacaaacaaggatagcctgcaaaggaaaatgattatatagaggtaaatataaagtattagttcaggaaatctatattatgaatcttccccggcaacggcgccagaaatgcttgttggtatttcttaacgacattactagaaatataatttccagcaatgacgcataaatacttctggtatattatggttacagagttcatccgcaagcgcacggatataccattgtagcatttcacccgagagtattccaagggtatcatattaattttatcccgtgggaagatcatgtagagagaacttgactaataatttatatattacttgtgataatcatattctaagcaggggttaagataatccaagggtagagtgacacacaagcattagctactcattcccataatatattatctgagctaagtggaaagaaaagaaaaagaaaatctattcctatacttgtaatatacacagtatacatacattttagttaaccgatatactagctaataccctctatctgataccctcctgctacttcgagaagccacccctgactaccgagttccttatgacagcccatcatgaccatacaaccggggttaaatacggaggaataccctccccagggaattaacttaggatgatataccggcgcggaggaatacacgtactgagctgtcaccatcaccagcccgcctgtcatccgcaatatataatctcaaataatgatatcccgtaatctagacaccacgcctaaactaccagatactactctaatatcatcgtcatgacatagagtaattgtatatgtaaacattatacccgcaccaaagcatctcccagataagctagccgtatattcagtataacatgaacataatgtaaagtaggcattcatatactcggaaagtattttaataccataaatgtatatagaagagtattctaataaaagtacaaagcttacaaaagagaagaggaaagctactagagccatacccgaactcttccgaaggcttccggactcctgatttctactctattcctattccaccagctagatactactaaactaaacttgagagaaatgagagagctattgcttgaggtgtgtgtgtgaagtgagaagagaagctccttttataggcaggtaatgatggttgtaacggttggaatggtcggtaataccctccaaccgttattggggatcaatcccagccgtccatccaaaccctgcatccatcggcgccatgggaggttcggccgaaccatgggctggcccaacctagcccatcttcggctggcggcctactttgttgtcctcctccatagacttgtgaattttggcccaatgtgtcatgttatttctgagttcttagcccattcatacataagtctggttctcgacaccgtccgattgatttatcgtctgagttgatgtcgattctcctccactttattgtcattctttgcaaaaggttagtatacctaatactagtggaatattattattctgaaatatatatgcattgcaagcatgactagttctcctttattttagtaatattgacggtcgaaactgatcgataacgaccgtcaacagatgcttaagaggtccgcctcaaaaaatagattttttttatggcagacctcttagcgtggccaccagcgaaaatcggttttcgctggcggtccatggccccccacccctcgatatgtttttgctgacggttttcgcgtgtggccgccagcgaaaataataggccaacgccatgaaaaatcgtttttctagtagtgagtgctactagtgttgttcgcgaatctggttcctttctcatttttctaagaacaagtgtatatatcacaataaccagttggtagaaccaaattcagagaagaacttgcattaatagctaggaacaattttacctaataattaagttcacaaactgtcaccgctaaaaatttactagtaatttccaaactaatttgtgcattaaatcgtcgtccaggaatcaattgaagtatacaaatatgcaatttgaatatacgaaatcaattgaagtatacaaatatgcaatttgaatatacaattccaacataactaaagcgataaatacttacaaaagaggctctttgtctgcaacatgaagaaaactgcaacggaaaagagaatcttgagaagcttcaactccactcccacaggtatctcgactgggatataaaccagatgtcttctcctttgaaatccttcttcaattgagattgatgattattgcaaggtgagaatatggaatacttagcaagccacatggcaagtatgcaagtgcacgggataacaaaaggtgacaataatagggcttatttgcaaagacagtatttagcaaattgttaaaattagtaaaacagtagagtacttaaatatcaatattaaacaactctgaataccatgccaatgcagcacaggcccaaaccattcatacaggttgtacaggtacaaccttcatacaggaactaaccattccataccaggagctaataaattataatcagttaccaatttaatatcattaatcaataagtttagactaatcatgaaaaacattattaggctcgcctataaccgcaggcataactattcaaatagttttactctagccagaaatgtaccaatgaccaatgtacccacaagacacatcctcataacatgttgtcatgccctcagtatcaccatggtatcttgaaaaggagttgcgacagtaccctctgcataacacaattcaatatagtgcaccgttcccggttcataatctcctcgtgaccccatgcactttatctccacttctcagtctgttgccccccaatgaaccatgccatacaaaaactatagccgtttcccacgctagcttgtggttagtcctcttagcgcttcacaacagtagctcacgaaaccagtcttttaattgtaatgagcatgaccatcaaaaccacgtgctcacaaccctccattaattaggtttagttgtcaaattaattaaccaatcacaattagccatcatgagctaccatcaaataaccatcattaagtaatagtgaagcattcgttatcccgaccatgtactaatgtttctaagcatggatacccatatataaagtacaaggtagtcaatttataacccaaagggtactcaatgcaaattggtcgtacaaaggagtaggttcacaccactcgatgacattcgaaaataagagcacaattgaaataatagagaatttaaatataggattaacacgctcaaagggtgttttaggatctatgtgacttgccttgtaaacaagtatcttcaattcatcttcgaaaacttctccaacgaacaagtgatcctctgaaacgacggaaactatactctaacacgcaaaataagaaaaaaaaacactaacagaaaccaaataaacagtacacgtaaagttcataaataggtagaacttgaatttggatgaattataagacttgaatgaccatattccgagttcgtatgaattaataaagttttaatcaattaaaagctataaacaaagcaaccaaatggcttatgacatcgtatttaattaatttaaaactgaaaaggataataacgatatcagcaatgagagaaaatggactgacgtcactaaaaagttggacccacgtgtaatagggagtattgcatgggtctaccatggacctagtccaaaaagatagcccacggtgtaccacagaaatcgacgtctaggattggttgacaaaagtttgacctagatcagactactctgatcaaacttgaactagggttaggacatcacaatgttggcaaaaaggtagcattaagcatttaatgctactaagttttgcacctttgccaatgaggagatgcaccataagcatcaccaaactaatagcctcatcttttcgcttatgtttatgcttataagccaaaatttgaatttttaaccgtaaatttggagttgattttgggggtttttcaatcgtaatttatttttcaacctttgcttttagatcattaagaacacgtatataaaaattttatttagaaattatttttcgtttgcaaatatatcgcaaacgatggactccttgttgacggtcaatattaccaaaatagaggcgaactagttatgcttacaatgcatatccttgttagaataataatattccactagtatttatttcaaaaaaaaatattctactagtatttggatcactaaccttttgcagagaataactataaagtggaggagaatcgacatcaaatcagacgatgtcgagaatcagacttatgcatgaatgggccaagaactcagaattgatatgatgaattgggccaaaattcacaagtttgcataaaggagcaatagaggaggccacctgccgagtttgggccaggtgggcccagcccatggttcggctgaacctcccgtggcgccgatggatgcaaggtttggatggacggctggtattgatccccaatgatggttggagggtattaccgaccattccaaccgtcacaaccgtcattacctacctataaaaggagctcctcttctcacttcactcacacacctcaagaaaagctctctcatattctctcaagttagtttagtgttatcaagctagtggaataggaatagagcagaaatcggagtccggaagccttcggaagagttcgggtatggctctagtatctcttctcttctcttttgtaagctttgtactttatttagaatactcttctttatacatttatggtattggaatactttccgagtatacgaatgccaactttacattatattcatgttatactgattatactgctagcttatctgggagatgctttggtacgtgtataatgttagcgtatgcaattactctatgtcatgacgatgatattagagtagtttcttgtcgcgtcccaaatcgactctaaaatacatcctcgaaattgtgcatagaataagtaaaatccatgtgaaagcctccaacaattaaaatgtgcaaagttaaaagtcaaataaggcttggaggatttttgtatatttcctaaaagcctaaaatgcgtaaataaattttagtggaattttcagagcacaaataataattaagaagaaataaacaaagttaaaaaggttttataaaaagaaaaatccctaaaagtccttttccccccttcctctcttgggccggctcggcccagctccctccctctctctctcctctcccccgcggcccatcggccttcccccgcgcgcgcgtcgctgacgggcgggcccgcccgccaccctcgctgacgggtggggcccacccgtcatcccctacctcgcgccgcgcccgccgcgtcgcccgtgcccaagcgctgccgccgccgcggattccgccgcatcccgccgcccccgcgcgcaataaagagggggaaatcactccccgtgattccctccctctttcctcccacttttccctctctctctctcggattcgtttggaaatcctcccgcaaacttcgccggcgtcattgatggagccgagatcgccgcgccggtttccttcccctccggccgccctctctcactcccaacactatttaagcactccccgtgcctccctcctccgtttccgacccttgccgctttctctccccatcggaatcgagctcgcgccgtcgtcctctctctccaccgtcgccgccgagcttcggttcgccgccgtcgtcgccccggacctcctcccgcttcggcatcgcctccttcggcttcgccgcgtccccgtcgacctcgtccaccccttcgtttcgcccgccgaccgccggaacgccaccgtcctcgtcgacccgagccgcgccgccgcctctctccgcttcggtcgccgttcccgtcgtcgccgtcgacccggggtgagccgaggaccgccatttcgcttcccccttccctctcctctctcgggcgccgctccgtcgcgccggtggtcgccggcggcgaccatcggggcgcgggcgcgccgcctcccgtcggccgtgccggcgaggccgccttcgggcgcgccccgcggctgccatgtgggacccggccgttagccgccagcgtcctcgggtgcggctgacgcgtgggacccacggcgccggccggcgcaagccgcgtgcacccggtccaccgtggaccgtgaggctgccacgtgggccccactcccgtggacccggtccgcgcgcccctcccctcggctgatgcaataaatccgattttaaattaaaatttaaatgaagaaattcgtaaatatccatttaaagagcatataaacttcaaatggccatatcttggccatttgaactcggaattggaccgttcaagtctctaatttttccttaagaagtcaagaacccatttttgtgctttgtttctgcttgttatatggagtttattagagtaaaagccttttcttttccgttggtcgtgtagacgctgcagcttcggaagatccgctcttcgtggaagttgaagccggcgtttgggaaagcgagcaaggcaagtcacatcatctttgaatatattgaatcccaatttataaaattatgttgatttaaattattgcattatcgctttatttaaattcccgcgttatcactgttttatttagccatgcctatttacctttgttatgaccttaatattgttattgttattatttccttgttcaccctagaataaacaaaaccccaactagtggacactctactcatggtaccactagtatgattttaggtagatgcttcgctatttaattaggtaacattaggcggttttacaactctagactttgggatattcatatcacctggacactctggaattgttggatcattgtggaattggattcacacctcccccctctattcaaaatccctaaaaatggttttaggctgggctcggggtgcatggttttgatagtagcacctcggccatataaggaccggtcttcgggcctctgttgcaaagcactaccgtacttccacatgtctagtgggtaaggcttagtttgtggctcagtctagttataaacaaaagtacacggatggaggtggatgaagtcgggggtcgatggacattctccagggcaaatgaaggctacacgagctgcagcccggtagtcgagatgtcatggcacagggccggtgtcctgctgctaggggctcagtcctgcctgcctgtcccgggtgttccggccgtaggtgggattgggtcggtactcttgtctatggctaggatgggttggaaactatgtcacgtcttccgtctgtataccgtggtggtatgtggcacgtggttacacgtgaggaagatgtgtcttgtgggtaaagatgtacacctctgatcagagtaaaatctattcgaatagccgcgccctcggttatgggcaagccgagcaatgtacccaagttagtgttttaattcttaaaacttgcttaacaactaaaatatggaatggttggcctgggttagcttaggacgagctgggacccagggtcgggttgccagttcggtctgaatcatcgtaggccttgggttaaggcaggttcgtgtgggttcacggccttgataaataatattgtttagttctagaatcgtgtttacaaaatagccctgagcaactaaatatctttaaatgctgtttactgcaaccctaacccctttatggtataactcctttgtactcccttgcatttattctgcacttgtgggtgtgtcttgttgagtacggtggttgtactcagtcttgctcaatttttcccaaccccagaagaggagttccaggaggatgaaggcttcggtgtctagctcatgcctgccgtcaagtgcctgtggtcgtcgccctagtcttccgctgtttctcgtttgtctttgtgtgtgctgggccttcgctgcccatgtaataaattaactatttacgcttccgcttgttatactctgaattgtatcaacttttggtgtaccttgcctcctgggacaagaattaatgcacgcacgtaaggaatgcccgctgggttatttccggtcgtgacatttctggtagtttaggcgtggtgtctagattacgggatatcattatttcgggttatatgctacggatgagaggtgggccgctgatggtgatggctcaatacgggcattcctccgtgcgtgtatatagtcttaagttaatttcctggggagggtactcctccgtatttagccccggttgtatggacaagacgggctatcctaaggaactcggcagtcagaggtggcttctcgaagtaccaggagagcatcggatagagggtattagctactatatcagataactaggatgtatgtatactatgtatattagtagtataagaatagattctctttctcttttctttccactgagcatagataattcatatgagaatgagtagctccttgcttgtgtgtcactctacccttggattacattaaccccagcttagactatgattattacaagtaatatataaattactagatcagattctctaccatgatcttcccacgggattaataaatatgatacccttggaatactctcgggtgaaatgctacaatggtatatccgtgcgcttgaggatgaactctgtaaccataatataccaggagtatttctgcgccgttgctgggaattatatttctagtaatatcgttaagaaataccaactttcctaaaatgcacctttagcttaaagtgtggccacaagacatcaaaatatgagacttaccattcatactaataaaatgcattcacattgaattgtttttatcgtcattccattaaattgtttatttgtagctatttgtttgccacgcagaaccttttatttatcgtcatcccaatgtgacccaccttattttcttaccggtcacaagcattgtacatatggctcttgtgactttttccagtgggttccacttctattgctcatggtgccacaagcattggccttgcccttaaggacattcacagtgcacacacgtggtatgtggcaatattaaacgcttctgtggacgcgaaaggggagtggggacagtaacttcactaggttcgcgcaaccaaagttggtaacgagagccctgcaacaatttcatcagaaaaaaggaatcaaattgcgcgtaacaagaaagcgagagagagagagagagagagatgaagaacggtgtctaatagattgcgccggagaatctcaccggagagggccgcggaggtggtgaagcggcagcaagcccgaccccgccgacggtgcccttgccagctcacgcctcctaatctgcgtcgaaagatctcaccgaagaagggagaggagtaggggtgtcggcactgcctgatttgcccatagctcatgtggtggtgaccggagcggaggaaggaggagcggtcgtcggttcgatatggttagcgcggccgcaccgctggggagctcgtcgcccacatcgccagagggtttttcgatcgccgcttggggggggggttccttgaccgtcggtgctgcatttattctgggtagccatgggaggagaggaatgggcggtgccacgatggtggccggagattgcaggaaggggacggtggtggtgggttgcggctcgatctgccccatgcaaccgcgccgccgagggaggaggccgtagggggataggaagcggcggtgccgcggtgatggccgtagcgggggagggagagggcatttgtcgtgggcggcgacactgtctgccccgcgcggctgcgctgctagggagctcctctatcaccgccgagggaggagaccggagatggagagggaggagcggtggtggctggacatggagtgggag

SEQ ID NO: 19427 - DNA, 2447 bp, Oryza sativa
agaggaggacacaacgatccttaccactacttacacgaagacggacagtgaagggagaagccggtggcgagctttggaaggcagaggtcttcgggacatgccgacgacggtgctccgactatcctcggtgaagaagagagagcaactgaggttctccttggcggtgtgataccgacggtggcttcggcatggtcgggcggtgatgggatcagcggttggagatgcggcaacggcggactgcctcgggtgaatggcgacgaaggccttcctggggcctttgttggacgggaaatggaggcagggctttggcttgctgttgcagtacctacagtggaagtagcgcagcttggagatgcccgaggtgacgacgtgacacgaccgaaaatcggcggtggcggcggacagagaagacaagcgccgcggcggctctagagcacgggaaaaactcgtgttagggttggaaaagagagaggaggtctggggcatgctatttatagccaaaggaggaggagatcgaccttgacacgagagaatttgatggcagaagagctagggttcaaagagaaaacagaactcaaatcacacatcgaatccacgtgatttactacggaatttcctctgactattgagtggaaataaagaggagtatgacgcgaagaaatcccctcaaccaatttggggaaaacgaccacaaggccagtcggatttggtggtggagtcaggcggcgttgggctctgctgggaggagtccggccagaggtaggaggcggacctgacatgtggggttcggtcccacatgtcagcgggatcagggagaggaggcatggaagggacgcaaggtggacttgcagtgcgaaacaatgggccggcgtggtggtgtggctctgccaacaacactaactttgcattttttacaaattagttcttcatattttttgatattatgcaatagtctaatatttgtttgaatcaataccatacatagaaaattcgaaatgacattgacaattgcccaattacaagaaataccatcgacaagtgcaatttgccattctacagcgactttgtcctataaatgccatcgtcattagggttccacccatcccgccccattaaatgtattgttcagcctatagctcttaatggagggctactaacggaaccctaacggcgatggcacactacgccagaaccctacatctgtgacggcataccagtgacgggcctatgaattggtcatagatgaccgtcacctttgacgggtcgctaggtttgccgtcatcggtgaggcatccgggcgtagcccgtcacaggtattccctcacctgtgatgggccggaaggaaaagccgtcacaggtgaggaagtgatgggttttcctcccaacccgtcacaggtgagggtatcccctcacctgtgacgggccgtggcattatgagccgtcacaggtggtagtccgccacctgtgacggattttttttacggcccgtcataggtaggttaatacctttgacgggcaactcaattgaagcccgtcaaaggtatgaccaacacctttgatgggcttttttaatctaacccgtttgaggtgtgttgggtctataaataccccccaaaccgccaactgctttccatcccgaccagttcactgttcacaaatcggttgggagggcaaggggggcgattttttgctaaaatttaaggtaaaaaacacattattctccattccttctcaatatattgatcatcatatatttttcttcatatgttgttgatttcagatggatcgtagatggatgtactatgcacatcgttcgtctaccgagtatagagaaggggtcactgaatttgtcacatttgcggataatgacagaaaaagtaggatgagcatgcacatgttgtgtccatgtagggactgtaagaatgaacagatgatcgaagatagcgatgaagtgcatgctcatttgataatgaatggattcatgaagaaatatacctgctggaccaagcatggagagcaagaggcgcctgattgtcacgcccggaaattcactagtaatttctgaactttatttgtgcataaaatcctcgtccaggaatcagccgaggtacacaaactgacaatttaatatacaaatccatcataataataacgttacacacttacaaaagaaaagaaaacagcagcggaattaacggtctagcgatggcttcagctccactcccacaggcagctcaactggggtataagccaaacgtcttctccttctggatcctttatcttcaactgaggttgattgattattgcaagaatgagcatatgacatactcaacaagccacacagcaaatatgcaagtgcacaaggataccaaaggatggcataatataggctcatttgcaaaatcagcatttagcaaaacatttaagagaagtaaaatagtggagta

SEQ ID NO: 19428 - DNA, 4910 bp, Oryza sativa
cacactcatcaatgaatttctccaatgatgggaatgcacccatacctacacacaaagcaaacaacaaacgttctaccctactaactattcttcaaagacactttggcggcataggttctaagataggttccaaacttcactctatctgaacacttaagattcgactatcatcttcttattcctcgatccacttgacttgcagaagttgacaacatcgacgtcttcgagtttctccatcaagattaacgactactcaagttgaaagaggaagggggaagaatgacaaaacgatttgcaaagaattctagataagaaagaaaggaaaattttcacaaattatgttttcggaaaattagtccttaaggtttgaccatttggcttatcctacagtcaagatggctctgataccaacttgtcacgcccggaaattcactagtaatttctgaactttatttgtgcataaaatcctcgtccaggaatcagccgaggtacacaaactgacaatttaatatacaaatccatcataataataacgttacacacttacaaaagaaaagaaaacagcagcggaattaacggtctagcgatggcttcagctccactcccacaggcagctcaactggggtataagccaaacgtcttctccttctggatcctttatcttcaactgaggttgattgattattgcaagaatgagcatatgacatactcaacaagccacacagcaaatatgcaagtgcacaaggataccaaaggatggcataatataggctcatttgcaaaatcagcatttagcaaaacatttaagagaagtaaaatagtggagtaattaatcagaaattttaatcaacactgaacagcacacccatgctgcacaggcccaaccatcctgaacaaccatacccggctgtacagatctaactccaaaccaggagctaaacaaattattaccaagtataacatccataattattgtgagaggtgtgagactaatcacgaaaaacattgctcaacccgcccataaccgcgggcacggctattcgaatagttttactctggccagaggtgtaccactgtacccacaagacacaaccccacatcatgtcaccatgtgcctcaataccaccacggtacctcggaaaggagttgtgacaataccccttgcacaacataatccattacagcgcacctttcctggatcataatcaccccctcaaaaaccagaggcatggactccccagcgacccccgtggacttctcgccacttctcagtctggcgcactataatgaatcacgctatacaaaagataaagccgttgcccacgctggcttgtggttggcacgataaatgtttcacaacagtagctcgcgaaccggtccttaattgtcatgagcacgactctcaaaaccatgtgctcacaacccaccattatcaagttttagttggcaagtaattaattaaccaatcacgattgaccatcgtgaactatcattaagccatccttaaataatagtgagtcataagttatcccaatagtgtgctaatgtttctaagcatggctaagcaatcataactaatatctagctgaaccaatatataaagcccaactagtcaagttataataacccaaggtatcaaggaataaagtaatcaatgcaaattggccataacaaaggaataagttcacaccacccggtgacattcgaaaataaatgcacagttgaaataaatagagaatttaaatataggatcaacatgctcaaaggattgtgtttaggatctgtgtgacttgccttgcaataatcggtcttcaattaatcttctgaacactcctgacgcactcacgaaccttcgcaacgacggaaacgacaagctaacacgcaaaacgaagaaaaagactaataaaaaccaaataaacaatacatataaagtaaacaaacatgtagatcatgattttagatgaatttagcaacttgaaccacctgaaacggatctacggttatttagttatgattttccgaagatttaatctattagaaaaaagggaaaaaggaaggatgatgatgtcatgctgacatcatccatggcggccgaaccacgatgacgacctcgccggagatagagcggccggctgcggatttggagggcatgtacacgtagaggacgacgagacgaacccaacggtactcaccacaacgacaaacgacgtccgacgacggccggcaacgacggggaacgggcggcggctcgggttgaccgacggcggcgagctacggcgaccggcggcgaagaaggacgggcggccgggcttcctctctcctcggcgcacctcttggcggcggcggcaagcggcggcgacggcaagggcggcggcgcgacctcgccgaagctcggccggcggcggcggcgagttggacgacgcggcgacgaggctacggggcactagagagctcgggaaaaggggcaaacgaaagaggaggactagagggtcctatttatagccttggattgaagagatcggactcctcccgcaagaaatcgatccgagaaatcaaaaactcggttttggagataaacccgaaaacgagtttgattcgagcaatatactcaaccatttgctccgattcttgaggggaaagatagaggaggacgagaggatcaaaacccctcaaaaatccggaagaaaaagggccggattggatgcggatttgagggagaaaaggggcggctcgggctcggcatgcacggctcggctctgtctccagccggctggagattgaagatgacactgtagcagggaggcaaactagacttttggctgggcttctacttcttggcccgattgaaagagggacacaaagcagactttggaggagggataaggccagccgaaaggaaaggagaatgggccgaggactgaagctgaacttttcctatttcggcccgaaaaggagaaggggattttaaatacttttccaattaaattaatcactgaaatgatctttgaattgttaaaaatacttccaatgctcaaataatttcaagaaaatcctgaaaatacttggacactcaaagtacttaacaaaattacaattagaccatttaatgattaatttaatatgtgggtaattactgaaatgctctttgtatgattaaaattaggaattgagctccgaaaaatccgagaatattccagagagtataattaaccatggagaatttaataaaaattaaatccaaccatgctttatatttaggaaattttatttcccacatttaactttacttgtaaattaatgaacatttaatataaattctattattaatttattaaataatttataaatcctgaaacgaaaatcaggatgtgacaaatctaccccccttacaaagaatctcgtcccgagattcggaacggctagaaagaaaaaggcataggtaaactgcagtctatcttattccataactccgataattattctaaggctttaaagaaaactactgccgctttgaaactggtggctgagttgtaacacttgaagacgcaactcttgaagacgcaactggcactgcattggctcctgtgacgacaatgttgttgacttgaccttgcgactgcggatgcttcggcttcggacactctcttgcaaagtggcctggcttgtaacagttgaaatatacctgctgctcccttccactactgttattcgactgatcctgctgaactagcaccggctgatttgcttgctcgatgttaacttcattgctttcattagtctctgatttgatctcaccaccgatgttcaactgttgcgattgtccttgaccagcggaagaagattcactaatttggagtggcttgatacgctgcctctggctactaccttgtgcctcctgggatacagtcattttccttttacggttatccatcctgttcttcttgtcttcaagtcgaattgctttgtcaaccagctgctgaaaatcaacatagtcatgagagatcaacataactgacagctcatcctttaagccttccaaaaacttctcctgcctttcctcgtcagtacgcacatcttctggagcataacgtgccagacgattgaactcatgaagatactctgccacggtacgatccttgtgcttcaaagccctaaactcacgcttcttcaaagcaacaactcctacaggtacgtgtgtcttcttgaatccttcggtaaactcttcccaagtgattggttgtcgttctgctctgttcatccggaaatgatcccaccattctgatgcagattagaaaaggtagaaggagaggggttacactaaagacaagaccttaaccaggttaacactgatctgatgtgtgtagaccattatattgttcaagttgattaagcaagcaacctagtatagtcacacactcatcaatgaacttctccaatgatgggaatgcaaccatacctacacacaaagcaaacaacaaacgttctaccctactaactattcttcaaagacactttggcggcataggttctaagataggttccaaacttcactctatctgaacacttaagattcgactatcatcttcttattcctcgatccacttgacttgcagaagttgacaacatcgacgtcttcgagtttctccatcaagattaacgactactcaagttgaaagaggaagggggaagaatgacaaaacgatttgcaaagaattctagataagaaagaaaggaaaattttcacaaattatgttttcggaaaattagtccttaaggtttgaccatttggcttatcctacagtcaagatggctctgataccaacttgtcacgcccggaaattcactagtaatttctgaactttatttgtgcataaaatcctcgtccaggaatcaaccgaggtacacaaact

SEQ ID NO: 19429 - DNA, 719 bp, Oryza sativa
tacttgtcctcctgacgaatagccttatccaccaacttctggaaatcaggataatctccagtcatgagggggtaagaaagctcatcattaagtccttccaagaacttctcctggcgctcttcatcattgcgcacatcttctggagcataacgagccagacgattgaactcgtgcagatactcggtgacagagcgagatccctgggtgagcgacctgaattccttcttcttgagagacaccactcctgatggtatatgcatcttccggaaagcagcggtgaactcaagcaaagtgataggttcagcagtagtcctattaaggcggaagtgatcccactattcagaggcagggccatgcagctggtgtgatgcaaatgagaccttctcctgatcagtgcactggagcaaatccaacttcttctctatggcatgcagccaatcaccagcttcaacaggattagtggtgctagagaaaataggcggcctcacacgaagaaattctgctaacttgttctgcggcggtggagcattgttgttcccttggttgagctggttctgctggttctggagttgctgcatcatcatgttcataagctgtgcctgttgagccaggacttgggcaagtgtgggattctctccattgttgttgttattgttattgttgttgttggggccattcccgttgctgcgagtgagcaccatctggcatggacaggacac

SEQ ID NO: 19430 - DNA, 6214 bp, Oryza sativa
cagggtaggagggacaggggtaagaggcctcgtcagtagtgttctacctcttcagtccttatgtgaccgtttcttttggcttacaaacttgtaaagcagtactacttttgctattactactgcagtactacttgtgtttgtctcgtctacgtagttcttttcattcgtatggtgcttgaacaacttatgctcacaacaacacactttcggcgcttcacggtagtgccatatccagtagcgcgcacagtccacaacagcacacatgaaaagcggcagctcgagttatcactatcaactttcggcgctgcctgttgacataaagtgaatcacgcccacgcgtgatcgtcttgtcacatctaatgaataatgtatctcattgagttcacatatattgcagtgaaaacgacgctatataattgacaatctgaaggcaacctcttcatatcttctttcccactaccacaccacacacgaaaatggaagcctattaattggtaatacgtaatctagaattgagattatgtacaacattcttcactacaattttacattttggcagcaaaccaaatatgatcaaatgcaattttaccttaccaaatatttggtagtgccaaaacttgcttatattttggcattaacataatatttgtacggtaacattccaaatatgccctaaaaaataataaaattgtattttaccagtcttggagattttaatcttgtatagttttcaatataaaaagatttgataactattgatatttatataaaaaaaatatagagcacagtacaaaatcgccctcccccagggcggcaagggggccgcctgcaaaattccatgccccctcgccgcccatttgcaggcggccccccgcacagtgcaaaatcgccctagcggagggcggcaagggggccgcctgcaaatttcgttgacggccgtcgcccgagagcgaacggccgtctgccacgtcagtttcgccgccctctgggagggcgatttttaaaaatcgccctcccagagggcggtaggcgactatttccgttaattttcaaaatggaaaattatttttgtaaaacttttaataaaaaaaattataaataaaaaaaattccaccggttcgcaggctccggctagcgcctcactcccggcagggcgcaggcaatgagacatactagcaatctactccctcagtcccataatattgcaatctatgaccggataagacatttcatagtacaacgaatctggacagatgcatgtccagattcattgtactatgaaacatcccatccagttctagattgttatattatgggacagagggagtagcatgcaagctgcacagcacaagaaggaaatcgaagattgccaacatgtcacacgaggaacccatgctagcattttgactaaactttaattggctttgaagaacgacccaacaacacaaaaatgtattttatacatagcatataagaaataaagcatattttaataaaaattaaagatgcaaaaaaacttgaaacttatacacaaacttccacgttttaagagctaaaaaatcatatttctttgaaacttctaataggataaaacaattattaacttgtatgtccaaaaggatattttgggtattttgaaataatggcctaacacaataacgtattaaaacaattgatgaaatcattgttatattatagaaatagataatattaatggcaatcccctgtttcgaaatttccaaacccctagcgctggggtggcgacgatggcggcggagccgcgtgggtcacttcgccggcggcgggggagtgcagcaagggtggccagcccgagtggcggctcaccctcacctcacggcgaggagctcgcggccgccgccaccgagcgcgacaacctcgcgacctctgtcaaggtccaagcacgagttctggctctctccccgtcagggtttcccaaaccgccggggccggggttaccgtgccccggcggtaagcacggttatcgcgcggtaaccgcggtaaccgtgaaaaaccgtgcaaaatttatcaaaaattcaaattatttttaaaatttatttgaatttaaggaggttaccacggtatttatatcaccatactccgcggtaagcccggtaaccgcggtaaccccgcggttaccggcggtaaggtaaaccctgctcccggccacgtccaactccccaccaccagcagcaggaatccgaaacgctctcgcatttgggatttgggagtccgtcgcagactgcgcgacacgatggatccactgcctactactatacggtgtgtgtggttcgacacacacatagcacatagcagcagcttgtctctacaatcatgtcgtcgcttgcgcatctcgccaagatagtctctctcgatgctgtcttgcgttcagattgcgtcgtgctattcgtgctattagaaacagactcgatgacaaggacgtattcaatgtgagcaaaaatattgggtgccgaatctctgaaaacagtcttgacgataaggacgtactcggaataattaaaaaaaaagagttcaaataaatgttgaaaattctcttggttatgtttgtgatggatctaatttgagaaagagtaatattgcaataggtttatatataggggctattctttcaacctatgtgcttgtgaatatgttgcattataaatcgtttgaaatcatgaatctttattgctaatttgagcttaattgtaatatatttgattcatgtttatactacgatgcatgcttgttaactagctaatgaatttatctctcttgtattccaaaacatgaccttgaattgctttaggtacacttcaaagctctcggaaaaaaaatagaaaatagaaaataaaaaaaattggttattacaagtggcaatcatgacatcattgcatttattcttggtgaaattattgtcaaagggagtgaaatatacaaaatgtatgcttcttgaaaggggagaattgaattgttttgattttaaaaatagccgattttgtactttgattgcaaaattgatgggagaaattctttcttttaaaaagggggagagtttttctttttcacttttgtgatttttgtttttatttttcaagaacacaaaattatattttggtgccaatgtgttcatcaagggggagattgtgaaatcattgtcatgattaatattttgtgatgaacaattggctatgcaaatgatttaatcaatgaagtggtttgaaaagatgtgtggatgttggtgtgagtgcgtgtgactaatgtggatcaggttgtgatatctgtgctcagaaatggttgttttgtctgattgtgtgcaggtgacttgaggtcagccttggtcaatggtgaggaccaggactatgctcagagtagtgcagaggtctagtgcagtcgggataccacgtgagaaggtgactagagttaggattcttggggtcaacttcggtcaacggtgggatcgagactagactcagggaggaattgagatgcagacggtcaaggatactggatgacgaagttggatacgagatggcacatggtggatgaatatcatgtgggagagattttcgtaacgggcttcacgaggtatgcgtgcaagcgtcggttttcgtgaaggagattcgaagaaactggagaggagtactccctccgtcccaaaaaaagacaaaccctgctttccgtgtccaacgtttgaccgtttgtcttatttgaaaaaattatgaaaaaaatttaaaagataagtcacgcataaagtattaatcatgttttatcatctaacaacaatgaaaatactaattataaaaaaatttcatataaaacggacagtcaaacgttgacacagaaatcagggtttgccttttttttcgacggagggagtatatatggtgctacagtgcttcgggtactgtagcatgcacatgtatgcgtactatacagctagcttgcttttggttgtgttggcgttggctggttggtccaggagcgagcttggcgtgtgcatggaggcaggccgacagacagcaggttgttcgggtggcaagcggcagtccgagtccgactcggttggatggcaggccgagtcggcccaggtggcccacgcggcaggaggcaagaacgatttgcagtccgactcggttggagttggctgcggtttttatttagagattgaagattgagttctagaggaactaggaggttcacttctactttgtctaggaggattttgagtataaaactacatcaacttgaaaagaacaccaacaaataaggtggaagaatgacaagacaaggcagcacatcggtgacaatactaccagtaacgatgagccccgccatggccgctagaagcgagcttctccggccggcatttggtgaagcatctccttcgctaggacggtttgtcattaaccctcacagctgcagctacaggtggtggcacatgttcctgatcatgctggtgttgtactcggcatgggcatcgccgttcgagctgtccatggagaaggcagcctccattgctcttgttgtcacagacctggtggtcgatgtcttcttcgccattgacattgccttatccttcttcgtcgcataccgtgacacctccaccggcctcctcataactgaccgcaggaagatcacaatgaggtacctgaaacggccgtgtttcgctctggatgtggcctcgacgattcctttacaaataatctaccagcttgtgactggcaaaagacaaggactgtgggggctcctcaatcttctccgtctttggcgactacggcgcgtcagcaagctctttgcgagggtggagaaggacatcagattcaactatttgtggaccaggcttatcaagctcctttgtgtgacactgtttgcgctgcattttgccgcttgcatctacctgtggatggcattcaactacaagatcaaggagcttacatggataggcagccagatccatagctttgaggaccgaagcgtgtggttttgctacacctgtgcagtgtactggtccatcaccacgcttgccacggtcggctacggtgacctacatgccaccaacattggcgagatgcttttcagcatagccttcatgcttttcaacatgggcctcacatcctacatcatcggcaacatcaccaacctcgttgtccgtgaaacctccaacaccttcaagatgagggacatggtgcagcgggtgtcggagttcgggagaatgaaccggctgccagaggcgatgagggagcagatgttggccagcgtgcagctcaggttcaggacagatgagcagctgcagcaggagatgttgtcagagctgcccaaggctgtgcggtcgggcgtcatgaagcacatgttcaagagtgctatcgagagctgctacctattccagggagtctccgacagcctcattgtgcagctggtcgcggagatgaaagcagaattctttccccccaaggctaatgttatcctagagaatgagacctcgacggactgttatatcatcatctctggcgaagtggaggcattgacaacccttgcagatgggacagagaagcatgtgaagagaataggacctcggggcatggcaggggaaatcggggtgatgttcagcattccgcaaccattcaccatccggagcaggagactcacccaggttgtccgcataagccatatccatctgcttcaggctgtccggcctaacaccgcagatgggtacatcgtgttctccaattttattcagtaccttgagtctctgaaggtgcaaacaaaggatgtggcttttgtcagcgatcatctttggaatggaaactcaatggttttgagaagggcaaccgaggttgctgtagatgaatcaaaagaggccgctcacaaaatgttaccatgcaaagaacccaaacgggttgttattcatgagcaacttcccaacgcgactagcacagcactgcatccttcgccggggaagctcgtcttactcccagattcgatgcaagaactgatgaaactttcagaaaagaaatttgggaaggccgtgagagggatcctcactgtggaaggagccgaggttgaggacattgaagtgataagagatggcgatcacctgttatttagttagtaggatatgccatatgctgtggcagattgtaaatgtatatgatatgagcatttatatatgttcaaaaagataatattaatggca

SEQ ID NO: 19431 - DNA, 1890 bp, Oryza sativa
taaactaggtctcacgtgtcattgactcaaagaagtgtggcgatgctcccttagatttgataaggtgtgccaataatgtgatcgcctcaacttaggcaagtggtaatatttgttagcaaattagtcccgttcttttcttcaacaagagttggatgaaaattaagatttttgtggcacacttttcaaactgctaaacggtgcgtttcgtgcgaaaactttctatatgaaagttattctaaaatatcgtattaatctagttttcaagtttgtaataattaaaactcaatcaatcatacgttaataccacctcgttttgcgtaaaaaacttaatcttcatcttcatattcatctttaggagaaatgaacaccatctaagtgtcattcactttcctacttttggcagcatatacctatgttggtgttggtgtagaggccaggttttacctattattttaaaaaataaatccactttcctactaggaaaccacatcattgaaaatcaccactatgacaaccaaaacatggtgattgaaagtttaaggtaaaaagatatactttgaatacagttcaatggtcaaaaatgaacttatagttgccccaagaacgtaattgacagtttttttttcttttgtgtggggagcaattgatagtaactgaccaaacatattaagaaaattaccatgattgtgggtcatctggatctcgatttgctagaatcatctctttgacctccaaggatgttaatgcatctggtctattttttgcgtgtttcgagaaaatttcctcaaactttgcaggaacaaacctgaaaatcatcatgtttaatatatatatagatccaaacaaagtgtagaaatcttcaaaaagagcatgcaattaattctaaagaccaggcctaaataggcctcgcgcatactgaatatgtgcaaataagatgcaatataattattaaaattaaaacaaattgatacttatggaatttgagtccaaaaataattgagttttgcatggtttcatgacaagaaagaagtgataatttgaaccataaatatattattcaaaggctagaaataattgaggtgatgtggcttaatgagagaagagaaaaataacattaattacacttagtggggatgaactatataagtatataggattacactcgaataaatgtaggatgatgccatgaccattttgatttaaggaaaaaattagtgtgttactattatgacctctgaattaattgcaacacataccgtacgagaaaagagtgtgtgggaggaatttttgccaaggcataacttaattaatcatgtatagtattactaatgtatgtaaagtggaataaaatatgcatctaaaagttgtatttcctattaaacaaaagatagagtatatcaagcaaatgttcaaaactcactaaagttcttttgtatgtactcctaaagcatttaaactaataatatgtaattatcttgctatttagatacatatgcatcacatattattgttaatatgcttgacattaattatatgatatcatgtgatatcttctaacacttatgtaagatatgtatatataggcatgtggttggtgttaccttcctttagcatctagtgcacctgtgtcactcccgtgcattcctttatagatgttctttatgtatatcgacaagtgaggtaatggtgcgtccttctgcacatttgaatacggaaacaatatctggtcaattatttccttgtgtgtacaataaattaaatagcatatctagttagtctattttggaccaaattcataataaacatgtcattatttttatatgatttgtttagaattagggttatgagagggattgagagagtacggggcttgttttaggaccaagacca

SEQ ID NO: 19432 - DNA, 19500 bp, Oryza sativa
tttaggcgactatttccgtcaattttcaaaatggaaaattatttttgtaaaacttttaataaaaaaaattataaataaaaaaaattcgcgtcgcgcgggactccaaatttgccgtggcccaacaaggcccatggggcatcaccagtaagcccatgatgccgcgccacgacgcgacgcagtgcgctggccttgcggacaaaacgcaccggcggctttgcgcccgtcttcacgggaaatcgaggagccgagcgagacgctgctaggagagagcgacgtgccgtgttttgtcgcccaaaaacgtgtgggacggtgatggatcgaatcaaatgatagcctgtctggtttgcaggtgagacgtgagaccgcgcgttgtgtaatgctggaattaagtatattttgccttttttttaaaattttttctacaaaatagataattgaaaaaattattctaggaatagactttttttcaatgccaggaccctagcgccgaggcccatcatcaaggcgccaacgacactggcgctcataccctcgccccctgcggaagctaagtgactaatgtaaagagagttggtattgaggacttacagatagatccccgatgctagtgttattgatgccaaggacatatttataagaaaaaaaatatttatattttaacccattttggatttgttttttttacaaataggtcttcaccactagtgttattggcgctgacctcttttacatcaatgacttagcatttgcaacgggtgagggtgtcaactcggtgccgcaccaaggcattgaacctcagcgccaatgacgttaacgtcaaaaaaaatgcatttttttcagaggtatatttgtgttgacggaaaacatggcgtcctgggagctctacttaatttcaatgcaagtctaaggttagcctcgagtgtgtcaagggcgtgccagctggtttgatcctgcaaccagcaagaaaataataaatagagtgagtcagccgatagttgatcggtcgagataggccgacgacgtatcactggtgatcctagccgatgtaattgaaccagaccggctgtggattggtatataaattaagcacaaaaccctaaatatacctcatcggctgtaatagcatctactcagttgtcaaatatattttggatgataccatagaaatataaaataggtttttagaaaggactacaaatataaaaaatccaggtgtgtgatgcacgtggtatgaatctcggcacctatttcgttgctggcattaaatttcgtcaaatatctccttttttttttttcagatttggacatggactggcctggctgctaatctgagagattgatgctacgtttacaagggacaggactcgcgaaatgttcaacgagatcacacaaatggtcaaaaaaaaaatgggagcaatttgagctgcggtagtggactatgaccgataacaggagaaaccacagctgttcagtttgattctaggggaaacacactcaagaagaggacattagatagctgcaaattccatgtgcgatattgggaaagagagaataaataatgaagctgttgccctgattggagttttggaccaggaccaattgtgcgaccaaggacctgtttggaagattagcccagggctaattttgagagttaatgtttagtcctgaatttgtaggctaaacattagcctagggtggcatgtttggatcgatgggctaattcaaggctaaaaggtggagagagagtagaaagagagaggagagagagctgtttttttatggtccccacacaaaattagccccattagcatcccttggaggggctaatgttttgagggaggctaattcatattagcccaaaattagcccacctgtttggatccttgagagctaaattgaggctaaaaggtgatagctaaacattagcccatggaaccaaacagggcccaagttttggaccagtattaacttccacatttgcctttaaatttaaaaggcctcttttcagcacgcatgaacttttcaatgtgaagtgaactaagagaaaaaattgtactgaaattcatgtgagcatttctacgtttaaccgaatgaagttgtgaaattgcccaaacgggaattaatagggaaatctaatgaaatgtttgcaacctcccaagattttagaaaagaatatctctgttcaaaaaaaaaacaaattacgtccaaatttacaatgtttctatgagcgaacatgtttcgattttttgcatgcgatctccggaatggacggagaatgcgccgtcgtcgacgctcgtcgtcgtcaccgtcgacgacgacgggcacgaagcggcgccggagtcgtcgccgtcggcgttctgcactatggccagcgtgatgaagctccggtacgtgggcgctagctccggcagcggcgcgtcgccatcgaggacctgcaccaccagccgcatcggcggcctcgcggcgggcgccgggtgggtgcagaggaggcctagcttgagcaccagcgccgcctcctcgtggtcgtagtctccgcggagccgcgcgtccgccgcgccggcgatgtcccccttgtgccaccggtcgagcacccagtcggcaagcacgaactcgccgtcgtcgccgtcgtcgccggtggcgccgccgtgctcgatgggccgccgcccgcacgccacctccaggacgaacgacccgaacgcgaacacgtcggtcgccggcgtcacccgccgcgtgtgcgcgagctccggcgcgaggtaacccagggtgcccaccacccgcgtcgtgcgcgggtcggcggcgccgcggccgtacagccgcgccagcccgaagtcgccgagccgcgcgtccatctcgccgtcgaggagcacgttgctcgccttgacgtcgcggtggacgaccacctgctcccagccctcgtggaggtagagcaggccggcggcgacgcccctgatggcgcgaacgcgctgcgcccagcccagcggcggcgcgctctggccgtgcagccaccggtccaggctgccgttcggcatgtagtcgtagacgagcaggagctcgcctctccggcggcagtagccgagcagcggcacgacgttgcggtggcggaggcggccgacgctggcgacctcggcgacgaactgcctcatcccctgctccgcgtcgtgcgacagcgacacgaccttcacggcgacctccgtcccggacgccgggaggacgcccctgtacacgcggccaaagccgccgacgccgagcagccgcttgccgtcgaagccgcgggtggcgcggacaaggtccttgtacgcaaaccggtgcgggccgaactccacctcccagtcctcccggacctcggcgtgccgccgccgccgccgccgccataggaggacggaggcgacggcgacgaccaccgcgagcgcaaggagcggcgcggccaccggcacgaggaccttgagcaccatggaccgccgcttggtgctggcgcgcggaagcttggggagcttcgcgtagtctagcggcggcgccggtccgtccatggcgaagctccagccgagcacgtagtggcgcgtcttgtgcggccccgtcgacgacgagaggccgacgtacgccgccgcgtccgccgccgccacaaccggcgagaggtcgacggcgacggagaggaggggcctcctcggcctgggcacctcgacgggggccagcgtcacgtcgatcgccgcggcggcgccgtcgtagtccacccagacctgcatggcggcgccgctgaagagcgtcaggttctcgaactcgccggtgtcgtcggcgtagtagccggcgggcatggaggcgacggacgccagcccgttcacgtcgacgccgacgtggttgccgttgatgtccccgaactcctggttgcggatggtgtcgagctcgacggcgaacacgcggttgctcgcgttgccgttgttctcgctgttgaagaggcccaggaactggctcggcagcgccgcggacaggttcttgctcggcgcgacgaagaaggcgagcccgttgccgctcaccgtgacgtactcggcggcgatggcgaacacgaaggtggtcgagaaggaccgggcggcggcgggggcagtggcgttcggcttcggcggcggcgcgacgaagcggagcggcgccgggtggaacgcgtggcccttcatctgggacgtgacgttggtcagcatgagcttgccgtccggctcgaccatggccatgccatcgaggtcgagcggcgcgccggcgaagccgtcgtacctgaaatggtcgctatcaccaccggccgccgccgccgccgccgacgactcatggctaaggataaggacgtggaagagtagtaacacaaggaaggagacgatggagttaggcttgggatgcatggatggatcaatgggattttgccgtgcaaagctgaataactcatgtgtcctaactcctaagtcgtaattaaccaattctagttaggtaggatactatcaggtctgtttatttttgcaaaaaacaggaatttggttaagcaagcaatcatagtaaatcaatagggaatcgctaaatggcatttgacattaaactgatgaggccaaaatcttgcaaattttcgactttaagattgcttcacgattcgtgttctgaaatcccagtttttctcctctaactccagcgaccggctgcaatctaacaagttacggtttagtgtcccgggttagagtggcagtgggaggtgggaagggaagaggaggaagatctttgggctttaagggatggtcatggaagacggcgagatgccggtggccgggctaatgacaaggcactggcatggaagccacgaggatggaggatagcggtgggccgacggcagggtaaagtaaagtttatggttaggaggcgactgccgatggtggcaaacctggtggcagtgagttgtcggagacgaggaaaataacagggatgggacaccttgtagctatcagcttaaggagagaaggaatggggcgacagccacagtgttctcgccagtaccattggcgtcctcccgccagacgacaagactgaacggctgcggagcatcaagcactctcctctcgtggcgacactaggagtgaggggggacgagaggagggatggagttaacgttaggttttcttgcatgaatcttaaagcaatctaacggtcaagaattatagatagacagtccatctatattactttctttttagttttttacactattaaagtattgaacttgcaacaccacactcaaaacattttaataaatacacctacacctatatatttactgtacattactatagcttagggagtttgatatttcacatatgtggaacaggtttccaaaagaggataaggagggagaacatggtaagttttgtttttttttcataaaaaaatctccctcctatggaaaaagtacgaattaccctcccgaactatcgcggtcgtccgaattacccacctaaaccaaaaaccggacattcttcaccccaactatgcaaaaaagacgaattatccctctcaacccaatccgcggtggttttggtctacgtggcgtacgcgtggcagtccagtcagcattctatttataaaaaaaatatgggacccacctgttatatcctctctcactcttcatctcactcttctctctcttctctgtcgcactctgcggcaggcgggggacacaaagtggcggcggcggcgcgcacgcacacggacggggccggaggcggcggcgtggccgagacgcgcatggcggcgaggacgacggcacgcacggcgcggcggcgcgcacgctcgcggatagggggacctccggcgtgtcgccgtcgacgcgttcgcgtggctcaaggcgcggtgggcgtgcctccagaagcaggggcggatctacagtactagggccggtgtcaggtgacaccaacgactttcggtaaaacctatagcaaaactgattatccatatgttatagcaccatgatctaagcataattagtatattatgacaccgatagacacgttatgataccaacgaatcgattttctagatctgccactgtccagaagcgcacggaggtgaagctccaggacctccccgtcgtgctcggcgcctgctgcgtcctccacaacatctgcgagacgcgcggcgaggagctcgagccggagcttcggtacgagctcgtcgacgaatagacctcaccggagacccccgtccgctccgaggccgccaagcgcgacagggacaacatcacccacaacctcctccaccgcggcttggccggaaccaccttcttctgacgatcgattcgatcacaccgccgccgcttcttgatttcccccttggtccacttgcagcatctccattactattgtgatttgtcaatgtcctgcagacctgcagtttgattgctttgctttgtcgtcggcgtgaactcttcattgtttgattgcctcaaaggctggttgattgtttaccagtactccttgattgcatcttcgttctgccgcgacaatgaagccggcgctggcaaccgcgggggcaccctcctcgagatcctccgcgggatcgacgagccgccgagcaagctcgagctccagcacgcgggatcaacgagccaccacctcgagttgggctcgctggagacgccgacgacgacgcggaactcggcgtggatggggcggcgcatcgaggaggtcaaggcctcgagcctgcggccgggtgcttgccgcagagccgtgcatgccgccgtcctcgccgccgcctccggcccctgtccgcgtgcgtgcgcgccgccgcgccgtgcgtgccgctgtcctcgccgccgcctccggcccccgtccgtgtgcgtgcgcgccgccgccgccacttcgtgtcccccacctgccgccgtgcgcgtgagagagagagaggggaagagtgagacagagaagagagagaagagagaggaagagtgagagagaggatatgacaggtgggtcccacattttttataaataaaatgctgactgggctgccacgtgtacgccacatagaccaaaaccaccgtggattgggtcgagggggttaattcgtccggtttgtatagttgggggtgaagaatgtccggttttatggttcaggggggtcattcggacgaccaccatagttcggggggtaattcgtacttttcctcgtcctaaataggttctagtggaaattaattttggacgaaaaattatatataccagtaataatatttttaagaaatctcacctttacattgggattttttgcgactcctcttctttctaatggtctttttactactcaacgttctttgtgatggcagcgctcaaatttgttctcgcttttgtgatatcatagcagtgtgctgtacgctactattaaaagtttgattgaaattgaaacgatgtgacggaaaaattgaaaatttatgtgtgtagaaaagttttgatacgatgaaaaagttgaaagtttgtgtactaaacaaggcctaatactcgagctaggcagccggtcaactgagtcaccattaggaccaccaaagctaggaagaacacaggaaagttcctggttgattgttacgctcgccatcagatttgtgctgctcaaccatagcccgccataggattttttctgcggaatctatggcttcttgtttgtctgtgtttgacaaacttgtttccacggttttatctctataccgttcatgatggaggatttggagctattttgaagaacaaataattataagatagaattaaataattatgataaggcgaaaaaagagtcacgatattcatttaatcattccaaaggtttaaaaacagccacgcttaataggagaaacgaaatatatatatatatacaccgtttatatcgtgattagtctaaattaaaatgtaaaaatgtgtaaattgaacaatagtcatatacaaaacacatttgtatttatgaaagaagaggggaccattgtatatcaaatccaattctattttgaatcttgatcctcacaaaattacacattaaagacctctatttataatgttatctatctatacttaggcttcgatcgttcccgggtgttctggaagattgagagagaaaacatctcgttttccgcgcgcacgcttcccaaactactaaacggtgtgttttttgtaaaaaaaatctataggaaagttgctttaaaaaatcatattaatccatttttaaaatttaaaatagttaatactcaactaatcatacgctaatagctcacctcgttttgcgtatcttcccaatctcctcaatccccttctcctcaaacacacccttagtataaaaaagcaacacttcacttcttttctaggtataacccagaaaacatacacaaaaattggtttttctttcctcattcatccgatctactcatccaacgacaaaagagggaagtatatggctgtcgtttgtgatcttttttttttagggggtaaaagcaggagctctgcctatttcatataaggagaagagagagaaaccaaagtttttacaaacaaggttacaaaaggatcccaagcggaccctcctccgataaagacaggttggagacaagaatttttaggaaatggaaagcaactaatgtgaggatacgagaactactcatctaagttgtgagctccatcataggctttgcacatatcgattatggactcaacgacttgcatcactgtgctgtatgccccattgaaaatcctagcatttctttgaagccaaatgccccaaactgtgtagatgaagaggccatcaaagtttcttctttgttccttcgccatctctctcctgcaggccgtccaccatccaagcatgtctccattgtaagcggcggctggtggcatatgaaggcccgctttctgccaaatgtatctccagacttgctttgcgaaggatcattccatgaggaggtgggtggctgtctccggttccacaccacaaagtgggcagatgtggttgttgtcccagccgcggaggctgagtttgtcagctgtgaggatcttcttatgtatcataagccaaccgaagaatttgcatttgttttctacttttgccttccaaaagaaatctgacatgttatcttgtacgcctccaacgaattgtatcatgtaagcggattttgccgagtaggttccgtttggggaccatcgccacataatcgtgtcctccgttccttcttgcagaacgacctgctggatttggtgccataggtggatgaattctctgacttgggctgtggtgttcattcttcgcatctgtctcaaccagcggttgtcctgtaactcctgcgccaccgttctgttctttcttgttgcaatctggtagagtgaaggagatagctctttaggggataacccatcgagccatctgtcatgctagaattttgtcttttggccatttcctagtgtttgtgatcatacggtgaattcactaattctcaatccttcccactgagaacgcgtgactccatctccatggccctaaacaacgcatgattaatcatcgccactcccttgcacgccatccccgctaccgtgccagggccatccatgcggctgtgccattcgcctgctatccgcctccacctaggatgacgtgtcctcgcattacggacgtcgctgcgcctcccgctgcaaatctcatcctcccgcattgccggcacttcgcgaggaggcgaggccgctgtcgcaaaacccctcgccggtctccagccattgccacttcgccatctccgttatcctcccaaatgttgcgcacctcttgccgcaaatagcttcctcccgccgcaaatcgcagcctccccaatccccccgctggcaccacggtagtccgcccttacccggctgggttgctccgtcttggtcgccactgcaatcgccctggtgttccatcctttcctcgtgcagccatcgccatcacaatcctctcttcccttggcatcgccaccctgctgtgtccccggtggtcctgccatccgtcagcgtcgccgtcctctcttccaccagcattgccactctgccatgcccccgaaggcaaggccatgccgttgccatcctctcttccaccggcatcgccacttcaccactcccacagtggtcctgccttgcactgccattgcaaggggctctcacaatcagggaggaaactgagctaattagtaagtcaatcgtttcccatagcttcaatcttcactaaaccttataatatagctaggttcaaggtcatgcctcatactgtctattggtgttcttgttcccattggcaacgttgcacggtaggtgctcaacggaatgtttattcactgcaaaattatgcattgcagtggagcaaagaacacaatccaaaatatgaactgacatcaacaaggttgttgtcgtccaatctatagtcttttcacattgatcatctaaaaacctcaacaatcaattcacagcgttagaatgctgaaccatccaccacataggtctcacgtttatttttaatcttcctattgaatgagctaccacgtggacactatataccttgtttcgcggttgaatgatatgaatcgattctacctatatttaagggagtcaaattagacttttaccgacccaagtgcaggggtcacggcgcatggggcttccttgttgccacggcacaacgcccatggacatctcggcgaccaggccaccacctgctagcctgtgctgctgaccatgcgctccacctatagatggccaaatgggcagctcgggctgaggtcagtcgggctaggccatgcccacccacgggctgcactaatatctcaagcacggcccaataatactcaggctgtgttgggccagtccgaagacacgagagcccatcgtgcttctccatggaataagtctatttgtcatccctcatctctttgaaccttgtcttatttgactgtaataagtctattgtgtgtccctcttctctttggttgtgccttatatagctaattaaagtctttggatccctcaactatctttcttcctgctcattggaccgtgtcgtgccgggccagcccaccataccaaggcatggcccaactatcagatcgggccggcaccagtcgtgctatgtcatgcttggaccggcatcagtcgtgctgtgtcatgcttggacccggccgaatagccgtgccatgggccggccgtcgtgcctccggccttatagccatctttagctccttcacgctcacgcgttcgcgggcacgcgggatttctcgtcacttcctcctcgacaccggaagccccgcgcgcgacgcgacgcgcaaagccaaactacgcaacgcacgcaaaaaagggggcctgcctttgtaccagcggccagtgcgctgccgactcgtcgacacttgcacgctttatcaaaggcaaagaggcctctcccctgctcctcacgccccctacatctttcagcttcttttgagcctgagcttatttcgaccaaaccaactctgattttggaaagagagggaaaaaaaaaacgagtaccgaagtgatttcaaggcgagatttatgaccttgctgatacatacattcgtgcatataccgtatatattaactactatacgtccatgatgttggtccatgcattgtacaaaggatgagtcttctctgcaatactaatatttagcgtaggttagtttatatgtcaaccactcatagttaaagggcaatactgcgtttctgtcaagtacgtatggagcaatgccgtcatctcacgaaacttcagttcatttcgttcccattgttcactccttagcagaggtgtaaacaaatacacttttccatcatcttaaaaaaattaatcactcatgacgacgttctaatgatgatttgaacgtacagtagtactaccaaagagagggagcactaagatggatcatgatggccgccttgtcgttctcataaaagctggaattattcagctcctcaaccgccttactcaccaaagtattatatgccatggcagtacaacaaggtcgtagtaattaatttacccatcaagaaatcaacaatgatgatatacatgagtacattggcaccactcaccagtcaccaaccatgcattgtatatatataattatatatatgagataagaccaattaacaactgcttggacatgatgaatcatatatattaatatatatataagtttcataaacaaattatctaacaagtagacaccacactttaattaactccttgattatttttttgagtaatttttccttagtggctagttgcaggtagcagctggaatcttcacctcacacttcagcacagtggctccctttcagcgtaggtcatttcggcatggcttcctctttgttttggcccataatgagacgacaaaagagaccctaaaagataaaagagatgtgtaggagagataccaaagcaatgcccaagaaaaagccacaccgaccgatccaatctgagctaagtggtgaccatcctgctcacccttagcttttgcctgcagatgattcaggtaaaaaaaaaaaaaaaggtatatacatcaatgaatataccatgaacaatggctatatatgatgaactgaatcaagattcaacaaattctgaacccaaaattcttaccaccgacaccgccggctcttctgacgaaggagaggaagacgatgacgagggcgacagccgcgacgaggccgatgatgattgcaagtgttttcccagattcatctgatgaacaattggaacagatcacccacagaagaacagtcaaaagccgaactaaatctactccttgtatgtgatgtgagtgagtgagtgtatatacagagtgtagtagctttgtgcaaagcagactagttaaaggtttaaagctacacgaaaagggcagaaaaaaggctgagcggtacactacccacaatgggataccagagatatcctacccctgttttcaaattccaatgatacaaagctggatcattttgaatccactttgtgatattcacagcaaccttattgacaccaagaaagcgaatccacatcaaagttcttgctaaaagttcagagcaaaagtgaagggaagaaaagttcttttgggggttcttttgtttgctatacacctttgtggcttgcaccaaattaaccacaatttgcttctagctaggctgtactatctgtcatcacattggcacaccatatacaaaaactaatatactatgcccatgcaaaatatacagttatacacaacacaggttagatttgaattgtaatgtctgactagtacacattcagatttctgtattattgcagtgtgtgtaattgaagaaggccaagcagatcagaacgttctatctggtggatcaatcattgacactctctaagagagaaatgtgggggctactcatgcagtgtcatgcctaatttcagatgtacatttgcacaacactacatggaaacccctgatttcaggaagctctgcttactttcttgtgttggtcaagaactggatcactcacatccaactgtgatgtcgatccctaatcatgtagcacacaatgtgtaaatttctgcacctctgactacaaggtctatctctaccaacatcagaatttcttcacttgaactagcagctaacttcagatagttcagctaacctgaacagaagagactgggtgtaccgtgcttaacattaactactgcaagtctaggaaggctaaaaattattagtgtcatgcaatgatgttcgtgcactcatcatggcagagacgtaggaagtacccttgggaatatataaagtctaatttcagtaaatgactaatgttaatgattcaatagtacgtgtagtttaatgttgcactgatgatcccagctatggttgcaggatccaacaaatattcagaattccgtaaaaagtagtgacccagatgtgcaggctctcgcatcaacgccatttctttaacgcccgtttcgatgcaatgtaatgtactctacggttatcaagataacggtgagcccagtaagatccacaatgtacaatcatcaacagctagattatacaactggatcggccaatgtgcaaaggaaagcaacctaaacacttcagttggaaactgggaaatccccaataactaatacttataccttaaaatccatatatcactcaagaagaaaatcaagaatgtgtcatgtgtatcactatacgaactgcatatcatttggctttatgtattttttattaaaaaataaagatcaagatatttttaatttgtcccgcaaacaattaaaattgttttatccccaagtgtctcctttggagttttcacaataattagtctaattatcgcggttcgaaagatttctcatgttttactacttgtaaaaaaaaattagtgatgtgatggtaaagtcgtgggtgcataacaaatcctgttgtccacagatttttatacatacgcagttgcattttcaatagaaatttagttagaccaagattcacctcttgccactagtctccatctctttgagcgtgtgttaacgggagcgatttagtaggtgttgagtgtggcatgcttgtgtgcaaatagccattttccatgaattaaaaaaaaacagcagcatccaaattttttactactagttactgtagggaaaaggccatgaaaaatggaacggccagaagaatggaaaaaaatggttttattgtttgccttatgcttatatttataagtcaaaatttaaatttttgaacttaagtttttttatttttttcatcgtaatttattctacaacatttgattttaattaagtcactgagaacacatatataaaaattttatttacaaatgcatttttatttgccaaatattagtaataagccattaggataagcatacgaataagggaaataatgggctgtttagatgcttaccgtggtcactgtacgtgtgcggcacaaatccatatgcgtatccattgcctccgcccacagcgccgccgccgccactgatgccattcccgccgccgccaatgccgccgccgccgccgctgatgccgcctccgttgttgtccccggttccggcattggaccagaagcgcgcgtagcacttgccgaggtacacctcgccggcagaggcgtacccgcagccggccttgagctgcgacgacgcggcggagacgcagtcggtgcaggccttggcgccgaggtcgcccacgcactgcgacatggcctgcacgtacccggccgcgccggcgcggtacgagccgtcgccggcgggcgccgcggcggccacgagcgcgccgagcgccgcgtcgcgcatggcgacgacgcccgtgtcgctgccgccctcgccgccgcacttcttgaacagcaccgtggtgtcctgcctcccgaggaacgagtcgttcccgtagcggacgaagcacgcgcgcagctgcaccccggcgccggccgcggagttgcagagcgacgcgagcttggtggcggccgacctgacgcagccgccgcagatcgcggcggggaggtcggagcggcactggtagacgccgacgaggccggtgccggaggcggccgacggcgaggtgtagttggcgtaggcggtgtagcccgcgctgttggtgagcgccgagagcgcggtgtcgacgtccgccgcgtactgcgtcccggcgtcgtagcgcgcctgcgagcacccggcgtacacgaacgccgtgtagtcgtcggcgccccgcgcgcgcgtggcgcaggcgcacagcacgagcagcgccgccgcgagacgcttcgacatggctgggcttttcttggctccggcgagatccgcggcggtggttggcgttggaagccgagacgaggcgaggcgacgccggtggaggaggcaagagggcagtggagtttgtggtcactgtggtttgcttagttcgaagtgatgatctgatggttttttaagggtttttataactggaccactgcagcagggcaacacaagtccgtgtcaaaggtgagttttttttttctccactgcaaaagtagggtgcatggctgtattcatgtcaagaaagcacttttgtagtatcacaagtatggtaaaaatgcaaaaacttttgccaaataatcaaagcgcatatatataattttttttccgaggaacatatatgtttttcatgtattgaataccgtcgagacttcattgtaaatattcaattactgtctaagatatactactactcacaaaatcagaaatgtatacccctaagctcatttaaaccgttcaaaggaggtcccatagtagtatttttgcttaattttgctgacgtggcgtcttagtcagaaaaaaaattaaaaaaattacgtggggcctatatgtcagttgcaatttttttcttctcttttctctcttctctctttgccggcggcgggcggcaatgggcgagcggcttcaccgtgacgagcgcatggccggaggcaggaggagcggcggtggacgggcgtggcggcaagcggcggctccgggcacagctgcagagcgttggcggcagcaggcggcgggcgagaacgaccgcagaggactagcgacagtgggcggcggtgcgcggccagagtcggcggagcggcggcgggcgagcgggggacgcggcgtcagcgcgtggccagagtaggcggagcggcgactgcggcaacggcaagcgatcggcgagcggcagctccaggcgcgaatggagcagaggggcgggggacgcggggggcacggcgggcgagtggcggcaaggcgccgcctttttccccctctccggccggcctcatctcctcccggtccgcccggcctcctctcccgtctccagcggtcgtgggaagaagggcggtcgcccgcaggctacgtgggcaggggcgtgccgacggtgacgagcaggcagcggccactgtcgcacaaagatgatgaggaagtacaaccgtcgccgtgaagccgttccggctgcgcgccgcttgcctccgccgctgacgctctgcagtcgtgcccgcccgctaacgccgccgctccgcttgcctccgtccacgtgccgctactgctccccctctaaaaccgaaacagaagaagataaaaaggaaaagagaagaagattgctgagtaggatggttgatcccacactttttctcacttacatgtgggtcccacgtatttatctttttattttttgctgactaggatgctacgtcagcaaaacctggaaaaaatactgctataggacctcctttgtacgatttaagtgagtttagggtacacatttctgattttgtggttaagggactaaaaaaattctcgctgttaagttaagggaccttcggtgaacttattcgaaaaatatatagcgtgtgtacagtacggttgcaaggatcgcccttggcgtatgggccggataatagctgccgggacgtggccgtctagaggaaaaagtacaccgaaggtccctcaacttgtcatcgagttacaaaatcgtccccaaaccgcaaaaccggatgcaacacatcccctaacttacaaaatcagtgcaaactagatccctcggcggttttgactccggttttgaccgacgtggcagctgactcagcgtgggacccacatgggtcccacgtgtcagcctctacttcccctcccatctccacctctcttcctctctctcctcccacgaaagcagctgggtacggttcggctggcgcggcggatggctggtgcggaaaaactgggcggcgccagcgggggaggagctgggcggcgccggcgacaggtgacgcctgacgcggggactcgggagaaggggcgacacgggagaacgggccacgcggcggcgatggactcggcgggtgccccgaccgcggagctgttcgccgccttcgcaggagaaccgcggagcaggcgagcgaggcgggcggcgacctcgctttcgttcgtgtgcggcgtcggcgtcgtcttcatcctctgcagcgagctcccggcgagttggtgaaaactgcaaaaccaggcaggggctagcaggcagtctcggtcgcgtgtgcgtcgggcggcgttatcgtcggcgaaggaggcggacgaggggctgagggccgggttgctacgggcggttcacggtcgtgggcggcggcatgtcggaggcgtcgggcgccgcgcgcggggtgtgtgggggagtgcggcgtgcggccgtcgtcgtcgccgcgggctggaagctaaccggcggagagtcgccgctgccggtggcatctcctccctcatcggcagccgcccgcgtccgccgtgcccatatactctttgccatccgtcttgtcacgccgttcctcccaccccgcatgcgcgcacgacgtgcccaccgtcagaggagagggacacgtttggtgggtggaagcggacagcgacagcgacgatgacaacacgggtccggcgagcggcgagcggcggtgcacctcgatccagacggcatggaggccacctataggctacagcgcacggtcagcggcggcagaggcctgccgaggcagcgcgacaagcgttgtgggggcgaaagtcggtggcagctgcacgccgtccttgctgccccacagcgcacgcttatcttctgtgtattcaactcttcatctccacaagacttcagtgatgaaaagacacacgatgcaccgccgcctactgctagcccgatgtccttggtgaccggtgctccttgtctctgtcttgatgcagcaacgtgcctcgtcgtctccctctcccatctcccatcaatagattcatccccaaatttgcgattggttgcatatggacgacgatggtggcagcccaggccgctcgaccgccacggcgccacgccgctgtcccgggccgctcaacgttgcgccaccacgtggaccgctcgacctccgcggcggtgggcgcgaaggtagaagcgggcgccaccgcggtggtgggtgcggaggcacggctgctgctctggaccgccgccggcatcggtctgttgttcggcgaagtgagagagagggacagaggaggaagggagagaatacggggaagagaggaggctgaggtggccacgctgacatgtggggcctcacgtgggtcccacgctgagtcagctgccacgtcggtcaaaaccggagtcaaaaccgccgagggatctagtttgcactgattttataagttagaggatgtgttgtatccggttttgtgattgggggacgattttgtaactcgatgacaagttaagggaccttcagcgtactttttccccgtctagagcatcaactactggggttgcctcttgcccacgccacgggcctgaggccgtcacgcagcctcggtgctggagcggttgatgggctttctgcccccaccggttcggaattttttttatttataattttttttattaaaagttttacaaaaataattttccattttgaaaattgacggaaatagtcgcctaccgccctctgggagggcgatt

SEQ ID NO: 19433 - DNA, 25988 bp, Oryza sativa
cgccctccgctagggcgattttgctctgtgcggggggccgcctgcaaatgggcggcgagggggcatggaattttgcaggcggcccccttgccgccctgggggagggcgatttttgcctcccccctataaagcccagcccctcccctgtcaaatttcattatattcactaaaaatccaaaaaaacgaaagagagagagaggggagggcagcagaaggggagcggcgaagccctgctggttcgctcacttcatcacaggtatgctcccatacatcttttgcatttgtactaatatattacgtttgagtacatatgttgcgttttagttttagttccatatattttagcagatctgtagcacacagcacatatgtgtagatccagagcatagaatataatagtatgaattgagacatagacagtagtgttaattgtaagatgtagtttagtttgatctggagaatgtaacctacttttagaaatttagagaacaatattgtagagaatgtaacttagggcgtagtacagaaatgcgaggttaacgcagttattgttttcatcaggcacaatgtcaagtaaggtcacatttcagatagttcacggtgaaggaaatattagatttggtccagatggtgttgatctgtcagattttgtaatgacatctaagggcatcgataggcctgcggagagaacatttgagtcaatttatagttggttgttgagaggatttagaatagaccaagaagtctacacaatgtcagtatctgttgtagtgagtcgttcaatagaaggttatttttgggaactaatgccaatggacagcactgctgcttggagacggtatgtggaaatggcttttgaacggtcatggcccctcgttatatttgtgtcggtacaagagaaagatacaaatgtttcaatgcaaaccgaagatgtggagggtcctagcaatgcaggggatgttgttggaccatcgatgcaaaatgaggaaaatcaacaaagggaggagcaggccatgggcatggcggatgagggggagagagtcggtataattgttgatgaaatggagagggaagattcggataatgagcaagcggaggacgacacatcatccgatgaggaaggtgatgtaatggccactgattgggcaaatgaggacttctctggtcttgttatatcagagggtgatcatgtaccctgggagtataaggagaacgaggtaattgagggtgcaaggtatgctcataaggatgagatgaaggaggcggtgaagcattgggcagtttcattgcagagagagtttagggtggtcaagtcaacaaattatgtgtatgaagtgaggtgcatgaaggaagaatgtccgtggcgtgtccatgcatataagggtaaatggaatgattattggaaagttagcattgtgaccgagcacaagtgctacttacaaggggtggagaagtatcaccgaaacatcacttcagcttttgtggcaagtgagatgtacagcagtgttgttggtaacattggctttgaaccaaaatcaattattaggcacatcgagaacaaattcaagtacaccataagctatgcaaaggcctggagagccaaacaaaagatcattgagatgaggtatggcacatttgaagcttcttatgataatttgcctcgtttgttagccaccattgcccagaggaataataatacttactatgacctacatacatttacatcggttgaagatcgaacaaagagtgtgctgcaaagagcctttttctcattgggtgctttcatcaatgcttttgtgcattgtcgacctgttctatgcatagatggaacttttatgacaggtaaataccgaggtcagatattgacagcaattgggtgtgatgggaacaaccaggttctacctatggctttcgcatttgtagagagtgagaacactgaaagctggtactggttcctagagagagtgcacattgcagtggtgcgtatgaggcccaacgtttgccttatacatgatcgtcatgcgggtatgttgcgggctattgactacttgcagaacggttgggatgagaagggacttccagctaagtggcctgatgttcggagtcggtggtgcatgcgtcacatgggtgcaaatttctacaagcaattcaagaacaagcatcttatggatctctttaagaggctctgtgcacagaaccaagagaagaaatttaatgagttgtgggacaagttggatgagttgacaacgaagcaaacagatgagcaatctcgcagaccacaagttgaaggtgacgagcctcccatacctcttggtgcattacatgatgacccaccaacaatgagaaggaggtcagggtcggccatcagaaatttctctcagtggattgagaatgagcctaaggagaagtgggctctattgttcgacaccgatggatctcggtatggcataatgacaaccaatttggcagaggtgtacaactgggtaatgcgaggagttcgggtacttccactggttgctattgttgaattcatccttcacggcacgcaagcctactttagggatcgatacaagaaaattggtccgtccatggccgataacaacatagtgtttggcaacgtagtgacaaagtacatggaagataaaatcaaaaaggcacggagacatagagttgttgctcaaggcacacaagtgcatcggtatgaaataatgtgtgttgataggagcaggcgtggtatctatcgcaagcaagccgtgcaggaatgtgtcttgaaggcggatggtggatgtacctgcagttgtatgaagccgaagcttcatcaccttccttgctcacacgttcttgctgctgccggtgattgtggcatatctcccaatgtgtacgtctcaaattatttcaggaaagaagcaatctttcatacatggagtgaggagatatatgggttcgggatctcaggatcctacacaacgctgagtgcccaagttttttatattccagatccatctaagttaagggtgaaaaagggtcgacgccaaactagacgcatcagaaatgatatggatgagtcagaagcaggtgggaggaatttacgctgcagcaagtgtgatctgcgcggccatacttacaagaaatgcccgaagaatgcagaagttccaagcggcgctgatgctagtccatctggacaggcaagtgatggtaggcgaccaactggtgaaggaacaacaagcaggcgcgcaaggccaaggcgtcgtcgcgcagcaggcgattccatggtgtaacaatgctttcgatttaggaaataaaatgatgtaatgagtgttcggactaaatacttctatcgtgtaatttcaattcaatcttgttgtactgagtacctccgactattgttgtactagtactattgcgaactattcggtgttgtatcataatgttatcgtgatgagtgttcggactaaacacttttgtttgtttgtactcttgtttaatatgtgttagtaattcgcttatgaacatttattacttatgttgaactaattatttatatgtttctgatcaacctatttgatgcaggtatggcgtacgacacaccggcgctgttgaaccgtgggattgacaggaaccaccgctcgttcctgtcagcagtcgagggtgcacagctcggcaccttccgtccacgcacgtcgcgcgagtggttgcgtgtcgacccccgtcacgttccttggtacgcgtatgttcacatttgaactgaactttgctttgttttgcacttatgtttgaagtttgctctatacaggttgcgtgcggcaggccttctaccactttgtaggcttgttgaggcggcggcggacgaccgtgacccagcgaagcggtgggatgcagaccggtcactccttgccgctcttgtagaccgctggagacctgagacgcacacgttccaccttccctgtggggagatggctccgacactgcaggacgtgtcgtacctgctcgggctaccgctggcgggagcaccagttggtcccgtcgacggtgtttttgggtggaaggaggatatcactgcgcgcttcgagcaggtgatgcgccttccacacctaggaccgaccaccacccttcctccgtactctacagtcgggcctagcaaggcttggttgctccagttcactgtaagtaaataagatgttattatcatacatgattatttgcgaccggatgagtgttttgtactaacatttcattcttaactgtaggcggaccttctgcaccctgacgctgatgattactcggtccgacgctcccttgaggcgtacctgttgtggttgttcgggtgggtgatgttcactagcacccacgggcacgctgtggacttccggctggtccactacgcacgggccatcgcggatgctcagccacaggacgtgccgcagtggagctggggttctgccgtgctagcagccacgtaccgtgccctctgtgaggcgtgcacgaagactgacgcgggagcgatcatcgctggctgccctatgttgcttcagctttgggcagccgagaggtttgccataggacgaccagtggtggacagcgcaccctacggggttggtcgcagcgcgcagtggccagaggacggtcccacgatggggacttactggtgtcgacgtggggttagtgcaacttcgctgcgttataagtttatcagtcatcttctttttttttccttcacataacatgtctaattccgatcatgtttattgcagcgtcgttacgctcacatccaggtgagacgtggttacccggacttcgtgttcgagtttgaccgtctccagccgagcgacgtcatctgggagccgtacacagaagaggccgtcgctgcgagagcaccgctaggactttcgtccttgtgcacacgcgaccaggcttactggctcaccatcctgccgatggtgttcgacattttcgttgagcctcactgcccgcagcgtgtgatgagacagttcggacttaggcaggtgtttccgggcaacgtgcagccgaccgtcccccctgccgaccactcgtgagttcggattgttcatttctaaatttttatgataattacatcatcgagccatacaatttacctctcttcacaggttgactcgacggggacagctagcaggcgcactttgggctccacgtgtacagcagtacgttgacgactgggtgttagctacagaggaggtgatcaacgagctcttcccacacacggaggagaactaccgtgactaccttcgctggtaccttcctcgcactcgtgcgcgtgtgaccttcactccagacgccccagagccgcacgttgccgctgtcacggacgcgtatcccacgcaccgtgaccgagactacttcgtggcggtacgtccaatttgtattacttccaacaattatgtcatttatcttgcataatataggacaactactgaattttttatttccatcttgcataggctgatgcggcacgggatatcagtgccgatatcaccgcagtccaggtgaggttgagcagaggtttgcacttgactgacgttgagcagaggtcgaccttcgaccggatgcaggagaagatgcgtgcggtcctgcgcgtcttctcctgtcgcagcgccgtggacgtcgtacctccagctggtccggtacacccacggcctcgcggtcctaccgtcggagcaggacctcgtttgtcttcgagcgcccctagcttcggagcagtgcgacctacagcaccggtttcgcacggtacagttcagcccagatattagttcatttttgtttcagcttttgcacgaatgtgtcaccatgttttaactgcacgtttcctcatcgcaggacctcgtatgccttcgagcgcgttcgcaggcacgaccggcccttccgcgagctccgcaggggcgttcgccacctcttcgggcgcgttcgccagctcttcctctcacggagcgtcgatccctcacccacacggtactttactttttattaatactgttaaatacctgtacgaaactgatggtccttgtccagcaggatttgcagccgggatcttcggtactggggcctcttcgtctcacgccggtaggactggtcctactagccagttctacgacgacgacttgcacggtgcagaccaccaggacgtactaggctcctctcagcttggaggagctccagaggcgcacactcaggagcagccagaggtcacacctgtacaggcaggacgggttggccgtgccgtacccccggaccgactcacgtactcccaggggcacattagggcgcagggtaggagggacaggggtaagaggcctcgtcagtagtgttctacctcttcagtccttatgtgaccgtttcttttggcttacaaacttgtaaagcagtactacttttgctattactactgcagtactacttgtgtttgtctcgtctacgtagttcttttcattcgtattgtgctcgaacaacttatgctcacaacaacacactttcggcgcttcacggtagtgccatatccagtagcgcgcacagtccacaacagcacacatgaaaatggaagcctattaattggtaatacgtaatctacaattgagattatgtacaacattcttcactacaattttacattttggcagcaaaccaaatatgatcaaatgcaattttaccttaccaaatatttggtagtgccaaaacttgcttatattttggcattaacaaaatatttgtacggtaacattccaaatatgccctaaaaaataataaaattgtattttaccagtcttggagattttaatcttgtatagttttcaatataaaaagatttgataactattgatatttatataaaaaaaatatagagcacagtgcaaaatcgccctagcggagggcggcaagggggccgcctgcaaaattccatgccccctcgccgcccatttgcaggcggccccccgcacagtgcaaaatcgccctagcggagggcggcaagggggccgcctgcaaaattccctgccccccctcgccgcccatttgcaggcggccccccgcacagtagaaaatcgccctcgcggagggcggcaagggggccgcctgcaaatttcgttgacggccgtcgcccgagagcgaacggccgtctgccacgtcattttcgccgccctctgggagggcgatttttaaaaatcgccctcccagagggcggtaggcgactatttccgtcaattttcaaaatggaaaattatttttgtaaaacttttaataaaaaaaattataaataaaaaaaattcgcgcgacgcgaggtgctctccttcttgctcctgccggtctgcctgagtgagattctttggggagctttctgtggatccaccactttctcaggtgtgctgatttttcatccatgttcagttcgttgtcatttttaattttaccaaatctggataaggcaatatactaaacacatttcaatcattactatcttactaaattttagcagttatgtggtatacgttttcttttatttttcctgattatgacattccagagttataatcttgtaatttttctcctgttttatcaatagaacttcgcatcgtcttgtgcgagtcgtcaaaaaaaattagagttatataagcttatttgtttaaaactttatcagaatttggtgaaaacatcaaagcaaacaaagacaacactatcgaaatttggtaatgccaaaataccaaaatgtgttagggttgatttgggcaacaaactgaacaagccattcgtatcttttgtggggaaacttcacgaaattttattcgatgctttaggatttaagcaagtcgatcaaactttatagattttggtcaataaccagccaaagtacaaatacacatctaagggtataaaagttgtaccagtagattcgtagattcatatttcacggtcctttcacaaagtttatggttttccatatgtacttcttccgtttcatattaccattttaacttttttcctagccatcttatagaggaaaatagcaacatatgtaacaccaaattagtttcattaaatctaacactaaatatattttgataatatgtttattttatgctaaaaactctactatttttttttataaacttggtcaaacttaaacaagtttgattaaaaaaaagtaaaatgacttataatacgaaacgaaacggatgaagtatcctacaaataaattttatgagtagactttcaaaaaataaaaaatatgcaccgtaaaattccaaagaggcgctcctttttagcaaattcaaaaaaaaattccagaagagttcgtttctttttttttcatggatatatgtttttattgcagaaaatgatatgctctattttaaatgaccttttgagatatgccactcaattttgtagaagtaaagaaaatagcatatcaatttcttgttgctctaatatgccatcctatcattttcaatattatcctttcctgttctctgaaagaaaaaacgaaaaagaaaaaggccaactctaccctttgtcccagttgaaatggaaaaagtacactgaaggttgctcaacttgtcatcgagttacaaatcgtcccccaaccataaaatcatatatataatatctctaaacttacaaaacccattcactttaggtccttgagtgattgtggccccagtttgtttgacgtggtggttgggtcagtgtgggtcccacatatcaggatgccacatcatcaccctctctctttctcatcctctctctcacttttctcctctctgcacggtgctgacaggtagggaggaggttgccggggcaaggtgagcgaggagatccggcagcctgcgacgcggcggtggcggttgcgattcgcgagcaggccgcgcgtgccgggtcggatacctccaatctcaccgagttcatattcgaggaagaagattatgctagatatcgactacaaagactagattatatcatcccaaatattatactcgtgtgatgataatatataaaggcaacattggcttcacccaacatgagtagggctattacctgtcaattaaggaaccgaacttgtatgattttttttctctcgtctcttttacctcaatctcacgtatatcttggcattgacgatcctcatactctacaaatatcgtagtcgcggtatagcccatcgacaatagtatgatgtatggcatgttctagactgtgccaccgtttggagctacagcgccatccaacttaattatggtcgcagtcaggatggagctacgtgtaaaaggaggtgcttaagaacttgatcaagaaaatattttaagcaatagtttatcaatttttatcatagatgcacccactaaatataaactcagatacctgatttaaaacagagtaaaccaagtggatgacaccactctccaattcaatctagcttcgtctaggatcctagtgtacttagccaaaaattattgatttaattcttttattaacgaaaaacattattgtacgtttttttgtttttcactgtaactttattcaacggaatactattactgtacggagtattatccatgacgagtataggtacagacgcaacaaaatcaccattcgagaagcttctcctctcctctactgctcctccatttctcgaacctcgctcgtcagtctctcgatttctcgaaccttcttatctgacgttgacgcccctcagaaaaatccactcccattttaaatccccaccaccatatatccctcgaattcatcgtcttcctcagctcaccaaaatccccagtcccgcgcaaccttcagctctcggtctgcgttagctcctgaagaatcgaagcaatggcggacctcttcttcggtggccccttccggcgaatcctctacgggcggcccttcccgccggattgggcgtcggcgtcggcgacggcggcgatggactgggtcgagacgccgacctcccacgtgctcaggatcaacgtcccgggactgggcaaggacgacgtcaaggtgcaggtggaggacggcaacgtgctcaccgtgaggggcgcggcgccgcacgcggcggcggagaaggagagggagagggagaaggatgtggtgtggcacgtggcggagcgcgggcggccggagttcgcgagggaggtggcgctgccggcggaggtgagggtggagcagatcagggccagcgtcgacaacggcgtgctcaccgtcgtcgtgcccaaggagcccgcgccggcccggcccaggaccaggcccatcgccgtctccagcaagctctgatcctgatcaagcccgaccctttgtgcattgtgcgcaagtgtttctgtgtttgtgaactgtagtcgattatagcaaccatcagtcgaatgttgtgaagggcgaatgtgtattggaagtccaaatcttaatgttgaaaattttgaaaaattttagaggtttgaattactagtatatctatgtaataatctaattaataaaggtgggtcttctgcaagcttactagcgcacttggcatggttaaagtttcacatcttaactcttgaaaagacaaatccaaaacagaacaagaatgcaccacattatccaataaataatagccattagatcaactagcaaacaaaacaggtagaataaatcttagccatttgataaaagaggatgttcaagaactttccggtgtatcctttatggcttcatatatgtgctgttgggatacgcgtaggctacaatagcataaatcaaaattttctatcgcgtaaaccaggaaccatgcaagtattagatcataaatcgttaccactcgacgcgctgcgcagcggaagaaggcgctaagaagtcgaaggaattctcgcgaagtagcgcgcgtcgatgtagaggaagtagtcgatcgcaccgactcgaccttctcctcctcgtgcgttctcctcaaccgtattcccacgccgatcaacaccgcaaaccagcggcgcctctaccggtatccacacgtacagggacggaacaccacgcgcagatgtgctagcacccgcgcgcggctagggttttgctcggggaggggagtgacggctagggtttctcacgtgaagcaatacctccgccggtcacacccctcacgaatatataggatccatcactcgggcctccaaggcccgtaggactcctattcagatccctatccgaattaagcttattttggatctccatccaatccccttattccggcccattaagcgtgcgaccctgtaggttcatgtacactcagctgtaacctgaaaactccttttcgatccacgcatcaacagcggcccctagcagaacgcattgacccaccgggcatacataaagatcatatcggctgaacctctagtgtatatttgtataaacccctttgcctcacgatatcaattaagctcaaggctagatatgtgccatcctctaatagctcaatcattcattcgaatatgttgatagattatataacttgtgattgactcctcaatcacctttggcatggctatgcacttccataatctacaacattgaggggcccaaagatatctctccataggaggggcaaatcccatcttaattattcatatctcactacatgtttcatagcatacccgaaaactacttttataactacccaattacggagtagcgtttagcagtccctaagtaagctactacacatgttggaaaccatgataatctcaggtctaaggattcaacaccaacactaaatgagatcactgatgacacaacacatatggctcttacagtatctcatgttgggtctatccaacaacatgttcactaacatgtgtccacattattaatttggtatctctataccatgatccatgagacatgatcgtcaattaatacatatgctgatcatctaaacatatttgttccacatatgatatttgatcagtgatcctttagaaatagcaacacacaacataaagagtctcatgaaagaatcacatattcattaaccaataattagttatctatttcaaggaacaaagtcggataaatatgtaaacatagtatgtgatacaatcatctctatgattgcctctagggcatatcactagcaggagagatatagagtaagaagacacacataagaaataaaaaaaacaggcgccgtcagatatcctctttagacaatttgaaccgatggatcattgaattggagaaatctctttaagatcctttaggaaactttattttacgagaaggtccttccacgtccctgctgtaaaagaaatccctcgattcccctcgactcctcttgtaaatttgaatttatctatagcatcgggaatcgtttccataacccgcgggtaggggtggcaattttccccatggggccggggacccgcccctatggggacgggggcgggtgctaatttcaacccgcggggagtcggggccggggtcccagccatgggcgggggcgggggaggacagccacccacgaggccccggggtatgtgtattagactattcacagtaacatattataccaaaacgcccagctagcccaccttatataaggcaaaaccctaaattccccatcaattctaccctatgttcaattcctcacctacctaggaactcagccaccactagggatgaaaacggtcggaaacggtcggaaaaaccctctaccatttccatttttattttattttctcgaaaatggaattggaacgttatactcgaaaacggtaacgatatcggtaaagtcggtatatcggaaacggaaccgtcggaacgggaatctatcgatatcggtcggaagtcgaaaattcatgtcggaagcagagaactgtggtatcaatccacatttaactatgtatgaagatgaccttataatttcacccttgcatcatcacgctgccacacaacaccgttatatgatgattaataagttgacaataagatcgacaaacaatataaataaagttcaacaatacttcaacatcaatgtggctaaagcatacaatgtagcttacatgataggattacatcataactaatattgtccgacttttttttaggatatagatttgaagtcttcgagaacaccaagctcacaagctggcatggcttcagctgatcagctccttgtcaaacatcatttatcatttcatcatcaattgacatagctacatcgtcatcctacagactacaatggcacattgcataagaacttttatgttgacactgtataactaccattgtaattaagtttcatcctaaactagactttttggtagtttccaggtcaaggggggtcaccgagtggagtcaaattggtggggctcgccggtgggtcccactgtctttccttttccctctttttttcttttcttttctctctcttatccttcccttctctcggttccttctcctgctctctctcgatttcttctctattttctctctcgttctcttctctgccttcggctccttcacgcgcgcccgagaggagagaggtgccggagatggcggcctggcgcagggcggtggtgggggaaggagagaggagaaaggtgcggcgccaatggggaagaggaggcctcggtgcggcagcgctcggcacggcgtcgctcggcgcttggcgtggtggcgcttcgctcggcggcacggaggccggcggtggaggatgggggagggaaaggggctggctgcgatggaggctgtcggggcgaaggaggctgcggccggcgtcggcgacatcgattgctctagtctcttaatgcctaatgggctgctcctgctcctgctagccaggcccagccggcttccttcttcagaattttgtcggaaattaccgataaaaaacggttaccgaccaaacggtcggaaaaaaccccatatcatttctactaccatttccgaaagagattaccgtttccatttccgataccgacaattaccgataccgactgaaacggtaggtgcaaaccggaaacggaagccggaattctcggaaatttccgtaccgttttcacccctagccaccactccactagcggtcggtgcgtgttcctccggtcatgcagcgagcaggcacgtgtggcagcgtcggcgaccggccatgtgcaggcggctgaatcaatggccggggacgacgcatccgcatcggcggccgtccatgcgcagtcggttgcatcgacggccggggacggcgcatctgcgagggcggccaagggcagggcattcgtgtcggcggtgaggtccaacgtggcggcggtagcagcgcctaatcctccgcctaatctcgccggccaccttgccgctgtccgccgtcaggtctgcccagccgggtaccacctcgccgtcatcaagctgtcccacctcgtcggagctcgctgttcctcgctcgtcagtggacctagccgggtggtgcggggtcccgcccacccgccggggcccctgcgggggcgaggacgggggatgttttccacccgaccacctctgcggggccggggccgggcgaagaagtcggggagcgggggcgggggcgttctagcccaacccgtccccgacccgccctgttgccaaccctacccgcgggactgcgatttagggactcatgttttcgcttatgcttatacttatcagccaaaatttgaattttttactttaaatttggagttgattttgaggttttttcgtcgaagtttatttattagcatttgattttagatcgctaagaacacgtatataaaatttgtattcacaaattatttttgtttgtaaatatgccatttctctcgaattttcaagtatgtaccattcagacgagtcaaaggcacctcccgcacaacgaagcaaattggctagccactctgatttgtatagaaaagaaaactaaggttgtgtttagatccagcggtgaaaagttttggcgtgtcacatcggatatacgaacacacatttgaaatattaaacgtagactaataacaaaacaaattacagattccgtctgtaaactgcaagacgaatttattaagcctaattaatccgtcattagcaaatgtttactgtagcaccacattgtcaaatcatggagcaattaggtttaaaagatacgtctcgcaatttacacgcaaactgtgtaatttttcgtttatatttaatattccatgtatgtattatgtaaggatgcggcttccctgttcatattgtgaaattaatccattgttcactactatatatgcataagctctatttatgctattattcaccgctaacaaagtagtattatgtattattcataagctctttttaatgtctaattttatggatgtcatgtatgggctacttcctccgtttcacaatgtaagtcattttagcatttcttatattcatattgatattaatgaatctagacatatatatctatatagaatcattaacattaatatgaatgtggaaaatgctataatgacttatattgtgaaacggagggagtaacttataggcgtgtcaaagggcgcgctattttctactcctgattatattcataagtagtactctctttatcccagtttaatcagcctatgaacaaataacaccaagaccaaggacaacaaaatatttatcattctcaaattaattatcatcgattgaggtgcttcatcgctttgtgtgtcgtgaattactcatgttttaaatattacatgccattgcaccaatcgagattaatctggttggttacatgaatacattcaatgatgcacattactctttgcacaaataaacaaagagacacatgttagacgatgatcattttgaaaatacctcaaaatccttatgggtgatcaaaatgagatggaagcactgaataaacacaacctgattgtctgaataatggctgaatcctgcaccgattatattcatgtgttggtcagttgatttaatcaaaagttcagttagggagtcagtttaatttgccaagtaagatttgcccccatgtaactcgcggaaaagtagccgagagcaaaaatgaacgatgcctgatcggctgatcgtctttgttgctgctttggtgctatatgatagggtaatatctgtatagtttaccggatactcaatagccgttggatgccctttttccaaatccgatctcatatttgctataaaaaactatttggattcgactacgataaccatataagtacccaagtattcagatttttatcctaaattaattaatacaatcgggtgaacggcgagaaaatagttgtatttgcgagatacattctattcacaagcaacttcactgacctatctatgtttgcacatagctgtaaatctcatttaaacgtgagtcctgtgccactaaacttgtcagcgacgatgtcatccacacggcgcgccatctccggcgtcatgtggttcacccagtcaccgaccacgcccttccggaaaagggtctcacgtggaatctttcgctgcgcatcaacgtaacccgttctgttcgcctcgaatcccctcatacggtcgaggctgcagagctccacgatggcttcaaccgtgccggcttcctcctccgcctcggagaacggcagcccgacgaaccgcgccatcttccggacgttcccggcagggtcacgcagcaactcctcgtaccgcaggaagagcacgttgtccggcacctcggtgctcgcgtgccagtagccgaggatgtgatcccagaacggcccgtatatcttggcaccaccgtcgtcgtcgcggtaggactcgagggtttcggcgaatgacacgtcgggcatcagctgccgggtgtagtgccacatggacacgatcatgtccttgggttcccgacagatgtagataattttgtagcctcctctgttgccagaggagttagctgtggtagtggctggcgtggcgctcggtagtatagcgagtggcatatgcgtgttgatgaggcgcggagaggggagtgcgtcgagtttggcctcttcaccacaggggcgaagaggccctcgaggaaagggaggcactggtgcgggttgaggcggtggagcgggtggctggaggcggaggcgggggcggaggtgggagggtggtgcacgtggcgtgccatggtggcgaacgtgagggcgatgagccacgtggtgccgcacttggggaggctggccacgatgacgtcgtcggggcggggaacgaagcgccgccgcagggccacggccgccgggacgtggatctccgccagccagaagccccggtagaggcgtagcttgagcggcaggttgacctccatcttgctcgggagagacgagaccatgtcggcgaggtggtcgtcgccgtcgtcaatcccttccggcgccggccgctcggaggccggcagctcgccgtcgacgtcctcgaacgggacgggaccaaccggggaaaaagatattcctgcggtcgccatggcagaattggcagatgaaaatggatcagctggtggcgcgcacatatatatatactccgtgtgtcaatatgtgcagtggcgtgcaagcagctgcgtgtgtatctgccattcagcgtcatgagaaagatgagcgtgcacacgcgttacttgtgatgatgtgacggcgtccccgcgtccttcgctgcttcgattgagtgatgaactgatgatagagcgatgaagcgatccatatcctcaacagtatacgctgaggatcgagtacatgctgattaggataaacggctgtcaagatttatagtagaataagtcacatagtatatactatgttgtatttgtattgggacggagggagtagcaaactggagagatgcatgggctaggaaagttgttcggaatatcatcgttcagctattgttaagtacaacgatcacatcatatccaaaattaacaatcatatcaacaatacaacagtacagcgctggtcttccaggttaactatgaatttcacataacacacatgtacacacactaaaaaaaaatgattcaacacctttgcaacaattttttatgggacattttttaaagaaaaaactctttaggaaccgcatattcaacatctttctctatgaaaaatgaaactattcaacatctttttatggaatgttattttgtaaagtttatttggagagcagtttattattttttttgtctttaccttcctaatagcatatctcatgtttttttagattggcttatgggtagacgagaaaaataagaaacttattcttataagagcttcttctatacgttgggctctatggttgagtaggaatgacatgattttttgacaaaccaccatctatttcatatatgtaggtaattttcaggacaactcattagctcaggtcttgggcacaactataaaagtgtgatgaagagggcgagtgcttaaaagttacatgccgtaatcttaagacaacggttatgcaactgtttaccaattttggatggatattcataaacagaattcaataattgtgtaagggtgtgtttagttcacgccaaaattggaagtttgattaattagaacgatgtaatagaaaagttggaagtttgtgtgtgtagaaaagtttggatgtgatggaaaagttgaaaattcaaagaaaaagttgggaactaaaccaggcctaatccttaccttgggttggtagtctttagtttgctttttttaacggttggtatcttctttttttttttgtgaacctttttattttttttgtgatacgttgtaataattggctctagctcgttgagtaaaggccgggatattatttccattatttaaaaaaaaagaacagcatattcatggtcggaagttttacaagtctacactaaacaaattccacaaagctagctccaactccaatataagcaaatagggcccaattgatcaatcacaaacaaaacacggcatttgcttctcatcatgcaattgccagcccgcgttaagaattctttttacctgtataatttatgagtgttgcaagcaaattaaatcaatagtagtgaattcagtaattaattgacactcgccctcattttagtggccgggaaataggccgggatcccggccttttatttgggttccaaacgaggccacgaggccttcaaatgtcaccaggccacaatctgttcacgacctatccttttcgccgggctggagaataccgaaggccgagtttagttccaaactttttcttcaaacttctaactttttcatcacattaaaattttgggataattgcaaacatgccactactttcaactcctaactcgaaatagccattataaaaacgcaaactgcaaatttgccatcaaagttggttttctaagcttccgtttgtcactgttgtcccaactgatgcaattaaaaggataaaaataattcatagaaatacattgcaacttgaaagactgttttgcccttagctaagtttataccctcccagccctaggacccgacttgaccgcaagctagaatgatcccctccttctacctctatgaatcatagatctcaaatcctctcatccatggcaaggaaagagctaatggattttgatggcggcgggcggcgacgggcaggcagtgggtgttttggcggtcagaactgcaggctacctcggcttgagcggcggccgcagtagcagcaaatgaaggcggcggcagcaaagctgcatcttgggcagcagcaacattatcaggggatgcagcagcagcaagcaaatgttggccacaacagcagcagccgacaactgcatctaagcatcttagctcttaggcaacaacaacaacattagcaggcagtattttcgtgggtagtaggccagtaacagcccacggttgcatctcctaaggcttttatcctccttttttttttcttatacgataagtatgccaaaataatgtttatcttgcaatttggtggataggggtatccttgtcctaaatttgataaaaaccaaccttctaacggtgatagttcaggctgtcggtctaatggcaggcaggttgggttccagctgtttctggtggtaaatatgcaattatactttttgtagtggtagattcacagtactggttgaaaccagtggtaaatatacaattggccctaaaattttcctacacacacaaacttgcaacttttccgacacaccgttccaatttcaaccaaacttctaattttgacgtgaactaaacacacccgaattcatgcacgactgactatacgaggattcagcaaggctgccgataaaattggcctgaaaaggccgaatttacatacgggactatacggggattcagcaagtttgctgataaaatggaaagagctaatacggcgcagtggcaggagattacggaattggatttctgaaattttgagtttgtcagtttctgaaatcattggattgagaatctgaaatttttcaatcggtctatcagattcttaatccaacaaacaattatctcgttacatggacagtgacaacaataagactataatttgttttttaaaaggtgtagcggaatcccatgaaatttcttgtttggattttaaattgaactgaaatccttgtcggaatctgaagttcagtaatactatgcccaaggcaactagagtctagaactaggcaagaaatagcaagattcatgtcataagacagtaatcaaacatgttctgcaacatcaaatactaactactatcacaaacctaaatgaatcttatgacatgaatataacggaaactcagattcatacaaacctgtccatgtcttatgctagccaaaaaagaatcgagacacaagaaaaatttaacaataaacacaatggcttagcacgagcaaactgcttcattcccaagacttaagaaaactagcattcttgtttaaaaagaaaaagaaagagaacgtcaaagaacgaaaactaccatgctctgttcttcatgtcaagcatagaaatcatggagattagaacaaagataacaatccaatttgtctgttagaagctcaaaacaaagtgaaaacaagagaatggattaatcggtgatttgggacttgtcacggttaattgaagtgagtcaatgacaccgccacaatcaagatagaacaacatgccaaaaacagagatgcgccattctcagtgcagattaagcattcagtctttcaaagctctaacgattctagatcacgaacatttcaaaccagtgaacaatagatttcggattcaatccggcatgatcagattaggaaacacatcgatcgatcagagtttttggacagggcgagctcaaaccttacgtcatcaggggcggcgcgttgtcgtcggagaagagctcggtagaagatcgacgcggcggaactcagcgcgaaggaggcaggtgaacgtggcgtcgggcgcagcgttcgaccgcgtggcggcggcgtggaggcggagcgatggggaggcgagcggggtggcgacccgcggcggcgcgtccgcgggcggcagcagggccgtcgtggtcggcgaaggtgacgagcgcgtgcttgtcccagaggcccctccagcgccgggagatgaggctggtccgggcggcggctgcggcggtggagaggcggaggaggatgaggaggaggacgtcgtcggggagcgagctgaggcggtcctcccctccaccgccgatcaccgcgtcgtcgtcgtcgccaccggaggtggaggagagcttcacgcgcttggtgggggagacctcgccgtcgctgacctgcgcgcgcgcggtcccggagacgagcacgtcgccgtcgacgtcgacgtggtccatggccgagggcggaggcgagcgcggtggcgtcgccgcgtctccgagagagaagaatggagacacggcagacgagcgagatcggaggccgttatataaaaaggggaccaccaattctgacatacaccgtgcgatctagttctaacggtgtagattcgagaaggaaaataagagaaaaagattcgcgatccagctcagctgtgatcgagattggatttttacagagagcaccctgtgatgtgtgatcatttgcaaaccagtaaatttcacaaaactgctgataatttaaccaaattatcataaaactataaatttaaggtgatatattgatataacgataaatttatcatgaaactactgctttaagattgagcatcgcaaaactaaagatttaataataaaattattataaaactatagattttgaggtttaaatctttagcacaaatattatgattgagttataaacatccaagtatgtaagtaaattgacgctaaacttatagttttatgataagtttgatactaaaatataattcaccttaaattcgtagttttatgataaatttggtattagagttgtattttgtgatatattatctttaatttgtagggcatgttcagattgtagcaaacaataaacattatcaaattttagcaatgccaaaattttgacaatttgataatattgccaagtttttgcatgatttcttatatatttactaaagtttagaaaaaaaactaaatggattcacatatttaataattttatttaaaaatgatatggtttgaaatggcatcgatatgaacaacccagtagttttacaataattcaatatataataagttttgtgcaatttactcttgcaaattgcatcttgggaaacggctttcgggtcctcgccgccggctgccgctgccgtcggcggcggccgccaccaccggtccgtgtacttgcgcatgcggtgcgcatacttcgccatgaccacgccgccgctaccttcctccaaagcgcccgcgaaccccacccgcctgccaccatcgcgttccatatgcctacgccacgcacctcgccaaccttagcgcgcctctcccgcatgctcctcgacggttgccacgatcgcccccaagatggcctactcggtctcggacgactccctgcatcgaccctgcgcggctgcgcttatgggcatgggggagccacagctgcgctcatgctgttcgacgaaatgccagaccgcgcctccgccgtgcgtcacgttagaggcgatgcctatttgctcggaaaagatgggaccgaccaagtccgaccactggaagacgaactcagtttgttcgatggagtggcctggaggagtccatctgctggcatggaatgccatcatgaggatgcagtcgcatgcttaggagtccatctgcagatctgcctgtatggaactcagtttgctcgatgcagtcacagccatcatgagaatgcattgcgttcaagcacaatggggtggccgtcgtgttgactgcaagtgtgcctggctgcctaccaccttggaggatgcaatcgcaggcttaggtcctctgcctgacctacatcaccttccctgggttgttcaatgcgtacatctgccattctgtgttatttggtgagtgcaccaaattgttcctgtgttgagctactagtcccttcattactgcacatgccgacgtgctggctacaatgctgtgctatgactaattttagttgtttctgaaccttctgcttttttttgtcatctttttcagtctcctgcatttttctcaagaagattattcggagtattggggccactatgccatgttaccgataattgttttgttcatttttgtcagttacggattagtgagcatcacagctgatttgcaaatttgtggcatcaacatctgaaaagattcttgtaggtaccaaacttcttagtttgaatcattttcttcacagagcttactcctttatttagcatcaaatcctacgtttgagtctcttcttgtagtcagttctcagtgcctctttggttctgaacttgcagtgctttgcattgttgtgagtttgtgaacctggtggttttgttttcagattcttcttctctttgctatagctccttgtatctaagccagattcacgaaatgttgggacagcttctgaattttcattgtgacctttgttctaggtagttcaaaactcaccacggtgtaacacatgcccttctcacaatggtctgtaagaatggtagttacctttgcaacgtgatatcaacaaccactggtcaccctgtgttctacttagcaagtccatgtggaagactggtaagtaaatgataaccaaaacattcactaattcctcaattccatagtatagttcttctccagcctgaacttacctcgtcctcagaagtagttgccgaacgtcttctcctccagttctccatgctgcattcttctgttagactgttatcttctcctccagttttgtgtgccgcacgctgctagcttttaccatctatgccgctgtaaattgcattcctgatattgccaggtagagtgccttggtactagtttactgcaattttgtttgagctatcaatacatcagaaggtaaactgtagcagcagctctccacctttttatttattttctctagaaaactggttctaagtggtttgaaatttatgtttcaggtgctaatgaagcttttgttggttgacttatccttttcttcccagttggcatcatactttgtcataatatgtgcgatatagcttcatgattgcttttcaatttgctcattccttgattagatcttttcactgcactttttaaataatactgattctgtctccattggttgaactgtaggtgttatagtagctgtgttttattgcttcctgaagcaactggcagaattttctgatacagaccatcaaacagttcgggatcaagatgcaaggaacaatgaaacagaaccaattctaccaagaaaaagggtggttttcagctatggagcgacggaagagcagcctgagtcgagcatgtgctcttcagaagatatgtgcagtgagaatgtctgcaagatctgctatgatgctccacggagttgcttcttcataccctgtggccatggttttgcatgttttacatgtgcaaggaggtataattctcatctaaatccttcagttacaggagtcagtttactgctgtatggctttgatttgattgctttttctttttacgaatctgattaacttgtagaatgagaaacactcaagggtcttccggctagctccacaaggtggtgggctagacgacatgggtttgaagcctcaccccttctaattatttgatattaggtcatttcctgatatttgcgtcttattaacatgtagaataaaagggacctgatccctgtaaagtcacaactcacaaattgataaattgtcaagttttggattccgattataagcctcggtctgaactgttatgatttatctctctgtaaagctaggagccaaagatttgttgtcccataattatttgatgaagctcactgaataacaccacattgcctactgttactgcaggatcgcggaagacaaaaatcaggcatgcccaatttgccgaaggctgatccacagagtaaggaggctggtggagcccttaggttcgtcttgtggtgagtagatgatcttgagtcagcagagagaagagttgcaatgctgcactgatgaattgttgccttgccgcccatatgctgcctgtctaggcctgaaggatgctttggactaagcatggaatgtcgatcacctacctgacggattgaccggatgaggaagctagtattgaagatggactcaattaatttacgccggctattgaatctttttgtttcctttttcttgtgtatgtttaggtaaagactttcagtagttcgtactgctttctttctctgatccactgtacgtttcacacacttggagactgatgcatgataatagtagttcgtatcgcattcatgccgtgcactctagccatacgtttggctggaccaaagctcgtggttgcaggcttgcggccagaattattattcttccaaggtctcactctccgtggcggccaagtttccctcccatgtgttgaccatcatgggaaccaac

SEQ ID NO: 19434 - DNA, 635 bp, Oryza sativa
aagcggagaagacgaagagctcctgaaggcttgaaagtttctcgcaacagccggactccaaaatggattcccaaaactcccttaaataggcgcactaccgacggtgcgaattccaaggaaaggagagagatggccaccggaaatttctgggtccgttgcgtcaggcggtttcttggactttaatttaaatttactcataaccgttggacttcgcatggtgttgtcgaacactctttgtctctacggtcctcacaccgagatcgaccagttgagaacgacaacaattccgacatcagaagtcgcgattggttacatgagttcatttaagtagaagtcgggggctattgtcagggttacggataaggtataccctctacccttggacgtatgctatacgcaatacggtatgtcggtgcatatacggacgtcctctgaatacgctaaggaagtccatcacaaagtctgtcaatggaaaggttcctacccgtataggactgggtcgttactatattgtgcagggtccgatgcctccgagtcctacttggagaccgcctgacctgcgatataaaagggaccccccgcggggacctaagggatcgaatctcataggctacacgacgaccacagcctacgaa

SEQ ID NO: 19435 - DNA, 639 bp, Oryza sativa
attcctgcagccctcttctcctccaatcccgtttaattaactctttccaataaatgatcttgcagcttagctgatagccatgacaatccattacccagagtaggcatcaaagaccggatcattgacatcctttctattgacctccgtttctggggatgcatgataggcatatccagacggtattacctcgacatgcgtctttccatcagcgacatgatccgcggcgttgatcattctctttaccataagctcttcataatatacaccttgtgtcttgtcaagtggattgctggtaattaacttttgcatttttgttccactcaattctacagtatacagtatcagagctggtcacaccacatattgcattgcaaaattcattagccttttcgtattcagtgctatgcaggtttgtgttcgcaccgttggtcgtgatgatttttcttactcgcaagtactggaaaacaaggattgcaattgatgcagtcgaaaagttccttcggatgcaagatatgctaggccccaagaggtacgcctacacggacatcatagcaatcacaagccatttcagagacaagctgggccaaggaggatatgggtctgtgtacaagggtgtgtttctcccgggtgatgttcatg

SEQ ID NO: 19436 - DNA, 1521 bp, Oryza sativa
cctccacctgggcgctgaatccatctagcaccgcggtgtttgcggcggccaaggcttgcagaaggggctcggcactcagcggggtggcagaagacgaggagaagagccgccttggagaaaatgcgacgcggctcggcccgccagaagacgcactgagctcggggatgtcccccggacccgtttggtcctgggcgtcgcccgagggagcgggcccaggcgatgcgcccgcggccttgtcgcaagctgccccggaggttgtcgcctgagcgtcacccgagggagtgggcccgagcgacgcgccggcggtcttgttgtgaaccgcctcggaagacgccatcgcctcagcctgcgagcccgggcggtttcctcccgagtggcttcttcagcctgacgagcccgggcggcctcctcccgagcggcttcttcagcttggcgagcccgggcggcctcctcccgagcggtatcctccgcctgccgaacccgagcggcctcccgggcggcctcttcagcttcccgaaggcgatctgcggcctctcgccggtcagattctcgcctctgttcctctgcggccgccggatcttcggcctcggattggccggacttgggatggcgggagggacgcgacgggacatcgctgaagcagaagaaaaaaccagaaggcaaacaaaataggtaaggtaaaacttgcttttgggatagaagaaaagacggtcgcaaagagagcgggacgaacctgcgagggggtcggttaaatgaccaccttggaggggaaattaggtttccctgggatggttctgtctcccccatcttgcgcagccgtttcttcttgcgctccccctcgggctgcgatgttggcgcggccccctccgggcgcctgctgctggcacgtgccgccccgccccctcggggaggagatgggggaggtgttcctcccagtttcctcttcccccgggcgtcggtagggcggttgctccccgagcccccgacgcggggcccagaagcacgaccccctccgggggtaggttgatccccccggcggctcccacctgcgccgccatggcccttaggagcctgctcctctgaggccccgaccgccgtcataatggtcaagatggagacgcgatctgggtcgctgcagagggggaggataccgtgggggatgagggacgcctccacggagttgagatttagcacccgttggatcagtatcttgaaatcctcgggggcccaatcccatctgaccccctggcgggtccgcatatagtcttcgggcccgatgtactcccaggcggcccgagcgcgccgctggagcggcgcaatccgacgacggaggtagtcgccgtacaccatggccccggtgagcccctgggatcgcaggcccgcgaggcggtcgaggacggcgacatagccatcccccagatgtcgcgcccagaaattcacgaaccagaatttctaagctgaatgtgtattaaacccctgtccaggaccagccagggtacacaaacgacaattgttgacata

SEQ ID NO: 19437 - DNA, 570 bp, Oryza sativa
cctgcagcccagggtgatccaggatggtgtcttgtccagagcatgataattgcatcccaggtgcgccgcatgatggaggttgtgtcgaaagccggaacgggtacctgatctctggtccatgcttgctgcaccgatgtgatgaacaagtcttgaagaagtcttcatcatcacttgctgtggcaacatcagatttgtatttcagaggagcgagtaggaggagcaccgtgataagaaggttggtgaagtccatgcagtgtaatggagatgagatggagtgaatgagaaggctgtgctttagaaatggtcacttgttttatcggtgtgaattgatgctgtgcttgtcatgatgtctgaggctctgagcagtgccaatgaaacttttgccatgttctatttcttcgaaaggtattccttatcatttttggctcccgcatgcccttgattttccacaactgattttattccgacttgtttttttttcttttggtgatgttgaaatcaactcgtgaagttgacatggtgaaactctgtggtggtagtggagtgactggtgataatcttttttaaagg

SEQ ID NO: 19438 - DNA, 759 bp, Oryza sativa
ttcatcagtgaagttgccaccataggcatgattcaccatgttaatgtcgtgcgtcttgtggggttttgctccgaggaaatgagaagggccctagtttatgaacacatgcctagaggatctctagacaagtatatttacttgtctgagagaagtttctcatgggacaagatcaatgagattgctctaggcattgctagggggatcaactacttgcaccaagggtgtgatatgtagattctacactttgatatcaagccacacaacatccttcttgatgataactttgttccgaaagttgctgatttcggcctcgctaaactgtacccgagggacaagagttttgtgccggacagggctttacggggaacagtgggttatatggctcctgagatggtatcccggagttttggtgtcatatccagcaaatcagatgtttatagctttggaatgctactacttgagatggctggaggaagaagaaacgtgacccaaatgcagattcaagtaaaagtaaggcgtactacccatcatgggtttatgaccagctaatagcagatcaacaatttgatgagatatcaaatgttgctaacatgcatgagctggagaggaagctatgccttgttgggctgtggtgcattcagatgaaatcacacgatcgaccgacgatgagtgaggcaatagagatgctcgaagggggtgtggatgcgctgcaagtgcccccgagaccatttttctgcgatggggatggcattggcaatg

SEQ ID NO: 19439 - DNA, 617 bp, Oryza sativa
atgccttcagacttgcaatatgatttaaatatcttagaacagaactccatcccattgtcagtacgaaggattttcacctttctttcagtttgtctttcaaccatagttttccactctttaaacacatcaaaagcttgatatttgtgcttcaagaaataaggccaaacttttcgcgaataatcatcaacgatagtcattatgtaacgagcacctccaaaggatgtcttacgagcaggcccccataaatcagaatgcacataatcaagaataccttcagtggtatgtgtagatgtgttgaacttcaccctcttatgcttgccaaagatgcaatgctcacaaaatttgagcttcccgatgctttgtccatatagcaatcctcgcttgctcaattctgccaaaccaatttcactcatatgcccaagacgcatatgccaaagattagtagcatcggaattagataatgaatcagaaactgcagcaacattacctaatatagttgtacctcgcagatggtacaggttggcagatttaatatcagctttcatcacaacaagagagcctttagttaccttcaaaattccgtctccaccggaatatttgtaccctttgcgatcaag

SEQ ID NO: 19440 - DNA, 7733 bp, Oryza sativa
aattcctgcagccccggcaaagatccggtcgaatctaccaagcccgatgccacatgtatcgtcttctcaagttcctcacaccacctccgtctctcccacctccgtctctcacattattagtactggtactaagagcagtaagagcggatacaatagcagactataagccaactataaatatattttaaagagataaaaggaagagagaaaagagcagctgcagcacggactccgagacgtaatgtgtgtatgacagtcacggagctcgtggctcctcaccgggagaccgcgcagacccccctttgccagttcggccgggggcttagggtgagatctcaagctctctctgtatgtggaaagatcgcgtgcccggaagaaacgcgagacacagacgatgtatacaggttcgggccgctgggaagcgtaataccctactcctgtgtttttggtggatctgtgtaagagcaagttacaaaatatcaaccagccctctcctctcccgggaaaatcaaaatccccccttctcttcgtgggcatggtcctccttttatctcttaaggggataccacatgtacccttccctttttaaactggacttttcttctttacataaatggacggagatttgcacggttgccctccgaacgtccttctgatgggacggcacatacctacctccacttctgccgggggcaggcgcgtcgtgggaacgtggctgtgcgctgacgacatgagcagtgtcagaccggtcaccaatcggtcattcttgtccaccgcgtgtcagcttagcaacgtgcatgtttgcccttcttcacacaacatcttgcctgtaatggttaggatgaagcctggcatatatcgatcggggctaacgtgccatctctgggatgtatcacgctagctccagctggggacgagtgcctagaggctctcgtcttgacgggacggggcgaggcgtgcgtcagaccgccagtcgccacctaaccgttgatctgaccggtctgtgactggtcacagaccggataaaagagcgcgctgcattgcgctgcatgcagcgtgacacgcttgaccagaccgcaataaatgcggttaggtgagccctaccgtgttcacccaacctatgtacatagtgcaaaccccacaaggggtcggggcacctcggccctcggggccggggcaggagcaacccgaccccccctcggggaaatcaggaggagggcggacacctcaccctcgggcccgacgtccccgaaggtgccaggccacgtgggcgattccatctgcctcaagcctccgggcgcaatactcccggtcccatatcaccgacagtagcccccggcgttatgtcagggcgatcatccttctcaagggaagcggtcgggcatgacgccactcataaagcctggtgacaggtgggaccggtctccgtgattgggcagaaacccaacggtctcaaaccacgcatatcggtaatggtgtcttggccgtcagtcatgggcggtctcttcaagactgccacatcacttgagcagcgctcgaatctgggcgtgcagattcgtttcgtctggagatatggtaacgtcgcttcggtcggcgatcgtaattaacgcgcacacgatacgatctatctcgactgccacaaccgcatatccacctcatgcgccgcaagcgggcgaatggaattagtggaagcgtgggcgcgagaaacgagggagcgagatagcgagtaacgagggagcgagatagtgggcacgagaaacgaggagccgggctcagcgatgggaagggtataaagccatcgaggaaaggacttgctcccttcctttcgccactattcccctttccttcgccgtttgcgccctaaactctctctttgctgcgcctcaccttcgccacacacgctcgttctcaaccctctctttctccgacgacatggcacggggctccgctctgctcgacggtagcgtactaccgccttcccgcattgtgggcgagaggcaggctgggctgccgcgtcgcttcatgccggaatccgccaccggccgggagatagtgatgctgggcgaggcgcgcccagcaccagattacccggggcggtccatcttcttcctccccttcgcaatggccgggttggttcctcctttttcttctttctttatggatgttctggagttctacgatctccagatggcgcacctcacccccaacgcagtgatgactttggccatcttcgcgcacctgtgcgagatgttcattggggtgcgcccatctcttcggctgttccggtggttcttcaccgtgcagtcggtgtcgccgccgtcggtggtcggtggttgctacttccagccgcgggggccagtgttgaaccgctacatcccctgcgccctccgcaagaagtgggacgattggaagagcgactggttctacaccccccttgccaacgaagcgcgcctccgactcccaagccagcccccggcgccggtctccagctggcgggcgccagtggatctgggggatgactatgacgccgtcctcgaccgcctggcgggcctgcgatctcaggggctcacaggggccatggtgtacggcgactacctccgtcgccggattgcgccgcttcagcggcgcgcccggagcgcatgggagtacaccgggtccgaggactacatgaggacccaccggggagtcagatgggattgggctcccgatgacttcaagatcgtggtccaaagggtgctgaatctcagctccatggaggcgtctcttattcctcaaggactcctccccctctgctgcgatccagaccgcgcctccattctgaccatcatgatgggggtcggggcctcagaggaggtggctcctaagggccacgacggcgccggcgggagccgccaggaagaatcaaccccaggagggggccgtgcttctgggccccgcgacgggggctcggggagcaaccgccctgccgacgcccgggggaagaggaaacagggaggaacacctcccccatctcctccccgaggggacggggcggtgcgtgccagccgcaggcgcccggagggggccgcgccgacatcacagcccgagacggagcgcaagaagaagcggctccgcaagacgggggagacggaaccatcccggggaaacctgatttcccctccaaggtggtcgttcaaccgaccccctcgcaggttcgtttcacgcctttcacaaccatcttccctttatcccaatcagcaagttttctcttatccaccttgtttgtcttccggttttttcttctgcttcagcgatgtcccgtcgcgttcctcccgccatcccaagtccggccaatccgaggccgaagatccggcggccgcagaggaacggaggcgagaatctgaccggcgagaggccgcagatcgccttcgggaagctgaagaggccgcccgggaggccgctcgggttcggcaggcggaggataccgctcgggaggaggccgcccgggctcgccaagccgaagaagccgctcgggaggaggccgcccgggctcgtcaggctgaagaagccactcgggaggaaaccgcccgggctcgccaggctgaggcgatggcgtcttccgaggcggttcacaacaagaccgccggcgcgtcgctcgggcccactccctcgggtgacgctcaggcgacaacctccggggcagcttgcgacaaggccgcgggcgcatcgcctgggcccgctccctcgggcgacgcccaggaccaaacgggtccgggggacatccccgagctcagtgcgtcttctggcgggccgagccgcgtcgcattttctccaaggcggctcttctcctcgtcttctgccgccccgctgagtgccgagccccttctgcaagccttggccgccgcaaacaccgcggtgctagatggattcagcgcccaggtggaggccttgcgagcggaacgagcggagctcgaggccgcatgggcgcgcgtcgaggaggggcggcgctcggtggacgccatggtggaggtgggccgtaaggctcaccgccgccacatctcggagcttgaagcccgcaaggcggcgctggcggagatcgcccgagaggtggaggaggagcgagaggccgccctcgtcgccaccactgcgatgattgaggcgcaggactccctccgccttcaacacgggagctgggaggcggagctaaagaaaaagctcgacgccgcccagggggtcctcgacgccgccgctgcccgagagcagcgagcaacagaggctgaagcggcgtcccggcggcgcgaagaggcccttgaggcccgtgccatggcgctggaagatcatgccggcgccgtggagaccagcttggcggaccgcgaggccgccgccgctatccgggaggcgacgctggcggcgcacgaggccgcctgcgccgaagaggagtccgcgctccggctccgcgaggacgcgcttgctgagcgggagcgagctcttgaggagtccgaggccacgacacaacggctggcagacagcctgtccctccgcgaggcagcgcaggaggagcaggcgcgccgcaatctggaatgcttccgcgccgagagagccgcgctggagcagcgggctgctaacctcgaggcgcgagaaaaggagctgggcgcgagggagcgcaacggcggggcggctacgggcgaaagcgacttagtcgcccgcctcgcagctgccgaacacaccgtcgcggacatgcagcgcgccctggactcatccaccggggaagccgaggccctccgcttgtcgggtgagatagggcccggcatgctttgggatgcagtctcccggctggatcgcgccggtcgggaagcgggcctctggaaaggccagacaatttcgcgctctaccaatctggaaggcctcgccccgcaccttaggaggatggcctgggctgtccaacaactccccgaggagctcgagaagaccatcaagtcatcctcgagggacctcgcccaaggagcggtggaactcgtgttagcgagttaccaggctagggaccccggcttctccccatggatggcgctggaggagttccctcccgggaccgaggacgatgcgcgcgcgcgggtccgggatgccgccaaccatatcgtccaaagcttcgaggggtcggcccctcggctcgcgttcgccctcagctccgacgaggagggcgacgccagcggtgaggacgacggtggcgacgaggccggcgacccgggcgcattggaatgagcccccaggcccccgccaatctccaactttttcattttctttcttctttttgtatagatcaacttaatctgcaatcaaaaatgatgaaaaatttctatgttaactttattttgctatgcatatgagttgaggatgatttgtgccgtggtccttttgcattttagcttgatttaagggctcgtgctcaagtcccgatcctcaaatggctcgggtcggggctagtgcctggggagatccacatgtcgagactggccaggccgggaacatggtgaccgagggttatgggtgacccgattgtgggtttttgccgattcccccccggagttcaccacgccccggggcatggctcggttctgggccccgcttggcgattttagctgaccgaaccgagcccccgagggcaaggttgagcacgagtgaccttatttcaagttaagattcttcagaaggaaaaacggcacagacacaacctttaggaaattgaaactgcttttattgaaatgctgaaataagaaaagtaaggctgtgcatgtgtggtagcccccggctaaccctgcacacccgaggggggtgcggggttagcccgagcccgaaacctgacacccgacccccccctcaggggtagaagcgacgaaggtgttcgatgttccacgggtttggcagctcagtgccgtcgcccgtggccagccgtacggagcccggccgggggacaccgatcactcgatacggaccctcccacattggtgagagcttgctcagtccagcacgcgtttggacgcggcgtaggacgaggtcgtcgacgcagagtgatcgggcccggacgtggcgctgatggtagcgccgcaggctctgctggtagcgcgcggctcggagggccgcgcgccgccttcgctcttccaagtagtcgaggtcatctctacgaagctgatcttgatcagcctcgcagtacatggtggcccgaggagacctcagggtgagctcggatgggagaaccgcttctgcgcagtagacgaggaagaaaggcgtttccccggtcgctcggcttggtgtggttcggtttgcccagagcaccgctggcaactcctcgatccatgaatcgccgtgcttcttgagaatattgaaggtcttggttttaaggcctttgaggatttctgcattggcgcgctccacttggccattgcttctggggtgggcaggtgaggcgaagcagagcttgatgcccatgtcttcgcagtagtcgccgaagagttcactagtgaattgggtgccattatccgtaataatacggttaggcactccaaaacgggccgtgatgcccttaatgaatttaagagcagagtgcttatcgatcttgacaaccggataagcctcgggccacttagtgaacttgtcgatcgcaacatacagatactcaaacccgcccggggcccgtttgaacggtcccaggatatcaagcccccagacagcaaatggccatgacagtggtatgatctgcagggcctgggccggctgatggatttgcttggcgtggaactgacacgctctgcatcgccggaccagatcgactgcatcattgagagctgtcggccaataaaatccttgacgaaaggccttgccaaccagggtgcgcgaggcggaatgggctccgcactcgccctcatggatgtcagcaagaagctcaacgccttgttcctgaggaatgcacttcaggaggattccgttagccgcgcgccgatagagggtcccttctaccagcacgtagcgtttggaaatgcgttgtacgcgttcactcccttcgcggtcctcaggtagagtcttatctgtgaggtatgtttggatctcagagatccaagcaatcaatctaagggagtttggagcgctcccttcgggtcccgaggcctggactccgacgggcctcgggggtcggtcaggcgcatccgtctcccctaaggggtcgggtcgcgccgacggctgggtaagcctttcttcaaaggcgcccggtggggtctgggctcgcgaggacgcgagccgtgagagttcgtcggctatcatgttatcccgtctgggcacatgccgaagctctattccgtcaaaatggcgctccatacgccgcacttggcgtacataggcgtccatttgcgggtcagagcaccggtactccttacagacctggttaacgaccagctgggaatcgcctaacaccaggagacggcggatccccagtccggctgccaccctgagtccggcaaggagtccctcatactctgctatattattggtcgtcgaaagtcaaggcggaccagatatctaaggacgtctcctgtcggggaggtcaacgtgacccccgcaccggcaccctggagggacagagaaccatcgaactgcatcactcagtaggtggtgtgaggtagctgcgaggggttcgtgctggcctcggggattgagacggtctctggagccggggtccactctgccacaaaatcggcgagggcctg

SEQ ID NO: 19441 - DNA, 1941 bp, Oryza sativa
ggataagacgtaaccacagtgaccctatgtgcctgaaaataatggcgcagtttcctcgaggccatcagaatagcgtaaagcatcttctgggcctgagggtatcgggtcttagcgtcccggagggcctcactaacaaagtagacaggccgctgcacctttcggtggggccgatcctctttgctaggggccgtatccccggggcgttcttcattcaagtggcctttcggggcacacttgtcttctgtgccgatgacctcggggtcggaggatgaaaggggcggccttccctcagtggcctcggggccgtcctgggggtcgggggctcctggcatcgtcggacaagcaggcaaagggccaactccggtcgtcaggggcctctggcctccgttcgactcgggggcctcttctccctgctctttcccgggtcgagtcagcacagggttagcctcggggtcaaagggcgttaagtgcggccttcccgcagtggccttggggccctcctgagggtcgggggcacctagcaccgtctgacaagcgggcagagggccgactccggtcgtcaggggccgtaggccaccgtccgactcgggggcctctcctccccgctcgctcccgggccaagttagcacagaatgggggtgcacgaaatgaggattgtcttcatcgcgctccacaaccaacgctgcactaactacttggggggtcgccgctaagtaaagtagcaggggctcatttggctccggggcgactagaaccgggggagagctaagatatgcctttaactgagtgagggcatgttcagcttcctccgtccaagtaaacggccccgagcgcttgaggagcttaaacaagggtagcgccttctctcccagccttgatatgaaacgacttagggcggccatgcaaccggtgacgcattgcacatccctaagtttgctgggggggcgcatccgctcgatagctcgaatcttctcggggttggcctcaatgcctcgggcagagaccaagaacccgagaagcttgcccgcaggtacaccaaacacacacttatcggggttcagctttatgcgggcggagcggaggttctcaaaagtttccgctagatctgaaagtaaagtttcttggttgcgcgtttttacaaccaagtcatcgacatgagcctcaacattacgtcctatttggctacccaaagaaattcgagtagtacgttgaaaagtaggacctgcattctttaacccgaagggcattgatgtataacaataggttcctacgggggtaatgaacgcagttttctcctcatcctccctagccatgcgaatctgatggtaaccagagtatgcatctagaaaacacaaaaggtcgcaccccgcagtggagtcgacgatctgatctatgcgaggcagggggtaaggatccttaggacatgccttgttaaggtcggtgtagtcgatgcacatccgaagcttgccgttcgccttgggaacgaccaccgggttcgccagccactccggatggatgacttcacggatgaatccggcctccagaagtctcgccacctcctcgcggatgaaggcttgacgttccggggcctgccgccgcactttctgccggaccggccttgcgcccggccgcacggcgagacggtgctcaatcacctccctggggaccccgggcatgtccgctggtctccatgcgaagacgtcagtgtttgcccgcaggaaggagacgagcgcgtcttcctatttgccatccagaagaccaccgatccgtgtggtcttggatgggccgtcgcccaaggcaacctccttgaccgggacctcgtcgcatgtggcaatccgctgcctcggggcggtgggggcggaggtgccaagcctctcgtcaccaccctcgggcttggtcgcagcagcgaggtggtccgcgcgctgctcgggctgcaggaat

SEQ ID NO: 19442 - DNA, 1879 bp, Oryza sativa
aattcctgcagcccatctggaggtaggcgtagtggaccgccgccataaacttcaccaacgcgggcctccccaggaccgcgttgtagggcagactgaggtccgccacatcgaagttcacccgctccgtgcggaagttggctgatccaccaaaggtgaccggtaggtcgatgtgacctaacggccatgtgtgccccggcgtcacaccaatgatcggttgagacggctggagcaccatccccggggccttgatagcatcaaaggccgcgggggaaaggatgttgagagccgctcctccatctatgaggacacgccccaacttcacattgcagatggtgggggaaaccaccatcgcaatctgccctccccgggcaacgcacggtgggtggtcggtctggtcaaaggtgagggccacctccgaccaccgcgcccgacgcgtcgcctcatgagtaggggccgcggccagaagctctcgcttcatagccttgaagctccggcgagaaacgtgagcacacgctcccccgtcgacagtggcaatggtggccccaggttcttggaaacctaggtcatcatcaccatcatcgacgtcaacggcgggggccttctgtctggcctcacttcgccgtttaccggagggaactgccgcggacttgccctcacggcgttcctgcctcctgtcctcctcccacttcctcgttcgctcagccaagtttttgactgcgcgacaatccgcgagatcgtggagggaggtgttgtggacggagcaccacttgctggctgggcgctccctgctgggagtaccagcctctttctttttgtcgctcgcaggcctcccctttcgggtggcccgcggaacgccctcgacggcgaggacgtgaccctcgtcgccggaatggaccgaccttttcttcctcctcctgtcacgccgccctgtctgagcggcggatccgggggcggccgaagctgccacaccggaaccggaggggttccaggtccaggcctcctccttacgagccactcggtccgcgagctgaaaaagctctgcggtagtctggggctctttggaggcaatcttttcgagcatgcggttgtgccgcacaccccccctgaacgcgtagatcaccgcgtgtgcagggatgcaaggtatagtattgcggacttggcagaaacgctgaatgtacgagcgaagtgattcatcatcccctcgctgtactgcgtgcaagtccgcttcttcacctgggcgtggataagtgccttgaaagttcatggtgaactgctggcacaaatcctcccaggagtggaccgacgcgggcggcaggttcattagccaaccccgcgcctgtcccttcagggccatgggaaagaaattcgccatgactctgtcgtcacccccagcggcctcaatcccggtcgtatagacctggagaaactcggtggggttgacactcccgtcatacttctcggtgatggtgggccggaaccttgggggccaacggacattccgaagactcgccacaaaggctctacagccgacaccaccagccgggggcatggagggctggtcctcacgtccctgtcgaggtgacactctggacgaagaggcgccctccgttgcgcggggagtacgccggctattacgccgacgctcgatgtcgaggcgggcatccggctctccatgccgatcctcccgagtcggaggtgccgacgagggagtggcagccgaatggcgtgcaacagccgccgctcgccgcgccctccgtctcgacgacgcggaaccggtagtggcggcgccggaggtcttggtggtggcggaccgtccaccagcacccaggcgctgctgtgccgtcatgaccaagttggccacgtcggggctgcaggaatt

SEQ ID NO: 19443 - DNA, 3047 bp, Oryza sativa
cgtcgtccagccatcgctgggctggagactccgggtcagggacgacaggcgggtgacgtaggagcgcgccaacagcctgaagcgcgccctgaggcgtgctgccgtcaccgtagacgaggaggcgacgctccccatctcgccgttctcctgcaccacccgcgactggcgatgctgcggatttttcgactctctcgagtgcctccccctgcttaggattttggtgtggaggaggtgggggagtacgagctcgacggcgtgggtttggctccccgtcgtcgccgctcacactcggagagaggtcgtgcacctttgcttgctcggccattaggctgaacaagaaaaacttggcgcacacggaagagtatgagagctcagaaaacacacgctgagccccctacctggcgcgccagatgacggagctcgtggctcctcaccgggagaccgcgcaggcccccctttgccagttcggccgggggcttagggtgagatctcaagctctctctgtgtgtggaaagatcgcgtaccaggaagaaacgtgagacacggacgatgtatacaggttcgggccgctgggaagcgtaataccctactcctgtgttttttggtggatctgtgtaagagcaagttacaaaatatcaaccagccctctcctctcccgggaaaatcccccccccccttctctctttgtgggcatggtcctccttttatatcttaaggggataccacatgtaccctctcctttccaaacggacttttcttctctttatggacggagattggtatggttgccgtccgaatgacacttcgatgggacagcccacacctacttccactcccggcggagacaggcgcaatgtgggatcgtggctgtctgttgctgacgcgaccagtgtcagaccggtcacagatcggtcattcttgtcctctatgcgtcagttcagcgatctgcatgatcacccttctttttatagcatcttgcctgtaatggttgggatgaagcctggtattcatttaaccagggctaagtgccatctctaagaggtaacacgctagccccggctggagacgtgtgcctagaggctctcgtcttgacgggacggggcgaggcgtgcgtcagaccaccagtcgccacctaaccgttgatccgaccggtctgtgactggtcacagaccggataaaagagcgcgctgcattgcgctgcatgcaacgtgacacgtttgaccagaccgcaataaatgcggttaggtgagccctaccgtgttcacccaacctatgtacatagtgcaaaccccacagggggtcggggcacctcggccctcggggtcggggcaggagcaacccgacccccccccccctcggggaaatcaggaggagggcggacacctcaccctcgggcccgacgtccccgaaggtgccaggccacgtgggcgattccatctgcctcaagcctccgggcgcaatactcccggtcccatatcaccgacaaggttaaatactaatatcgacttagattatatagggtatccaccatcctatgaaatatccaacggcttgattgtctagatactgttattctttccatacttataactgcatcagttaagtttgaccttataagtcgtgattagaatctcaatctctagcctgcttttggttgccgattagggtagtatcggggtttcagccgatcttacctgatttaactcctttatattttatatgcttgattgatatgttaaatccgccctttatattaagatcttgttgcatttaggtatattaaacttcctgtttgatatattttgcttgctttaatatcttaatatagaatggtatcggagttttagccgatacatgctagatctatctgatcggctatgctatgaatgcttataatctccttgttaatatatattttgatctaagtgatttatactatctcggcatggcgaccgatatatcctaatcacttgatttaagtatatatcgacagaagcattatataccattaatatttacagccgatcgaatagatttagttctttctttcctatttatgactgccgatcgattcaaatatgtcatcggctcaaagataaatgatatgtcatcggcgactggccgattggctatcatttatggatttaaccgctatttttttgtctttatttcttgttgattgcaggatcaaatcaactggcacgctcacgaacctaaaggcaagattttggacgtgcactgaagttaagcagatcttgcaggccagtgtgtgtttttcgcatcaacttctattgtttgtaaataaatgaatagcgtacgaaattcatttcactgttgccggcccggcagaaaattcatttcactgtttacaatcgtttctagcttcagcattttacagcctacttacaagctagctagctagctgacttggcttccaagcagacacaagctttagtgctcatcctcctccgagatttcagttagctcagagaagaatggtaagaatccactgttagtgtgaacgcaaaatatgatcttgcggctaaacctaaagtcggcaaagagatattttgtttagggtgatcgctacagtgatcgatctctcatgaacatccctgatcgggggataaccgccataccctagtgtcggttccccctgtgtgcagtggctataaatagagatcaatacctaagtgttaaaccctaagagatttctctcgctacccgatcaaacaacccactgaaacacagggaagaatcaagacacgattctcttcgtgcttccaaactagaagagaagaaagaagaacaaagacagagagaatgggaactccaggagatcaaggtatgatccaatcccattttaatttgtagttccactttgtgccaaaccgattctatcaaatccaacaatggtatcagagcaccgggttggcctcaaattggaactcaataagtgtttatgttcaaattgttcttcgtgttcatgcccaaatccctctgttaaagttgagttaagcccaaatcatgcaatcccgaaatataag

SEQ ID NO: 19444 - DNA, 1854 bp, Oryza sativa
acgcgggctaaccaggccgcgcgggaggcggcgaatgccggcctaggcccaggttgttgggcctggagcccaggcggaaggcggcgcggcaatgacgggccaggccgagtgcggcctggctcgagaacgtggcccagttcaaaaaaaaaggttatgtgggctgcatactaatgggcctaattaaaaggattgggctgagataatattacaattaaaattttcttttttgaagaattatgattatgattatgatatttgtgtttaaacattgaagatattttattatgttttagttaatgataataagaataataagtgattttgttatgtgataaaattctctttcatttatttatttattttatgatcattacattatatttattacttaaagttattattgttttatgcattatgagtttatttccgttacaaataaatattataattaagtgtgacaaataattgtcattctggccaaagctgattgacttttatttgatcacaaaattttattaattcaattcaaatctggctaaagctgttttgattgaattaataaaaggagttttaaacaaattaataaagtgtggtttgtatttattattctggccaaagctgattaataaatacttattcacaaaattttattgttcatttccttctctggccaaagctgttttggatttgatcaataaaagaaggtactcatcttatgcctcacaaatttccggaataatgggcaatattgaacaacttaatggaagtaattatgcttcatggaaggagaagctggaaattactctagctctattggatattgattatgccctccataatgatcctccggttgagcctagaccggaaaatgagaattatgagacattaaaaaggatatatgatgaagtaaaggcaaaatgggatatttcaaaccgtaaatgccttatgattatcaagagctccattattgacgcaataagaggagcagtcccagatactcagacagccagagaatatcttgctaaagttgaggaacaatttaaggctcttctaaggtttatgccaccactcttattaaaagattggtcaatgaaagatacgattttactgaaaatctgagggaacatattatgaagaaatgtcacatggtttctaagcttaaatcaatggaaatggaaatctctgaaggttttcttgtccatttcattatgtcatctctgcctcaggagttttctccatttacgatcaattataatgcaatgaagatcaagtggggcattgatgaattaatagccatgtgtgtacaagaagaagaaaggcttaaggcagaaagagttgaccatgcaaatttatttaagcactccgagaagaaaaagtataagaaatttaagaaggagtatttgaagcctaagcctattcaatttaaagaaaaagggcaatcttcgaatcaatcccagcagaataaatctggaggaaatccctatacagaagaaaagggaaaagaaaaggatgggtgctacttttgtggaaagagtggacaccgccaaaaggactgtattggatttatgagatggctcagtaagaaaggtactgatgttatttcttttgttgatgaatccctaaatattgattatgccaccaattcttggtggattgactcaggagcgacaattcatgttgcaaattccttgcagggattcgctatgaggaggaccctaagaagagggcaaagaagaattagagttgctaatggagttgaaactgaagttgaggccattggagacttcactctcacacttcatactggcttcaaacttcagctgcatgatgttctttatgtaccctctatgaaaa

SEQ ID NO: 19445 - DNA, 555 bp, Oryza sativa
cagggatgcaaggtatagtattgcggacttggcagaaacgctgaatgtacgagcgaagggattcatcatcccctcgctgtactgcgtgcaagtccgcttcttcacctgggcgtggataggtgccttgaaagttcatggtgaactgctggcacagatcctcccaggagtggaccgacgcgggtggcaagttcattagccaaccccgcgcctgtcccttcagggccatgggaaagaaattcgccatgaccctgtcgtctcccccagcggcctcgatcccggtcgtatagacctggagaaactcggtggggttgacgctcccatcatacttctcggtgatggtgggccggaaccttgggggccaacggacattccgaagactcgccacaaaggctctacagccaacaccaccaaccgggggcacggagggctgatcctcacgtccatgtcgaggtgacaccctggacgaagaggcaccctccgttgcgcggggagcacgccgatcactacgtcggcgctcaatgtcgaggcgggcatccggctcttcatgctgatcct

SEQ ID NO: 19446 - DNA, 615 bp, Oryza sativa
aacagactcgttgaggcaatctttgatgagaccataccaagtagtccaaggtcctccatatgtaggaaatttgacggcaaatccacccctcatggattttacaacatcttcatattcggacagattaatgctgttaccgttactgccaccgccgataggagtcatggccaagtatccacaagaaggttcgatgtcttggatagatggtgctccaaacgatgggagcatataataaacgtaggacgaagtcgtggtcaggcaattcatgggctggtatttgctactactgttcgtaattagttcctgcgaacaattgacaaagccgacccaagtaatcatatcatcaaggcccaagtcccagctgtcgtgtgatcctgggatacccagaccaacgtaaggcagctggtccgagcgaggaagagggcagctgctgtttgcatcatcctgcaggttggcgtcgacgacccaaaagatggaagcagtgtagtcgatgctactcacatagtatttccctgtgttgatccgaatggtggccttgccatcatcgctgctgcagtctaactcgtacgacgagacgccgcacctgcgaaggtcgcctcgccggcgaaaaggatg

SEQ ID NO: 19447 - DNA, 684 bp, Oryza sativa
taatatgaaaaacgacttatatagcacgaaacaggaagaacatacagcgcattgttgcttacaatgaagcacacagttacactatcctgagcccacatatatatatccgccttcactttatgtacatatatggagtacctacagactacagttatcaaaccaattgcttttgcacctatagagtcagagatcaggatgagtagcaaatttctcgccatgtatctcctgcttgctctcctcagccatggcacctacagctacagtgccaccacagcttcaggctgggaagaccaagacttcttcaggcattgcccagtgtcccggtgcagcgacggtggaccagagatccggttccctcacggcctgcaatccagcaacacatcatcagcatgcggcgcttcatgcgccaagctagcatgctccggccaagacaccatcctacatcacccatttctggggccttgcaaggtcacctccatagattacaaggaggccatcatgagcatcatcccgcttgtgtactcctcgtctccatgcccgcttcagaagctcatctttgacaatctacagccttacgactaccatagatgtaaattatacagctgggctcctgcaaaaatagtacgctgttcaaaagagttcacaccaaatggtacttctccagtcgatgggggctgcaggaat

SEQ ID NO: 19448 - DNA, 1524 bp, Oryza sativa
atttaaatgaagaaattcgtaaatattcatttaaagagcatataaacttcaaatggccataacttggccatttgaactcggaattggaccgttcaagtctctaattttttcttaagaagtcaagaacccatttttgtgctttgttcttgcttgttatatggagtttattagagtaaaagcccttttcttttccgttggtcgtgtagacgctgcagcttcgaaagatccgctcttcgtggaggttgaagccgacgtttgggaaagcgagcaaggcaagtcacatcattctttgaacatattggatcccactttatgaaattactttgatttaaattattgcattatcactttatttaaattcccgcgttatcactgttttatttagccatgcctatttacctttgttatgaccttattattgctattgtattattaccttgttcaccctagaataaacaaaacccctactagtgggcactctactcatggttcccctggtatgaatttaggtagatgcttcgctgattaataagacaacattaggtggtttttataactttagactttgggaacattcatatctcttggactttatggaatggttggactattgtggaattggatgcacacctctccctctattcaaaactctcaaaatggttttacgctgggcttggggtgcatggttttgatagtagcacctcgaccacataaggaccggacttcgggcctctgttgcaaagcactaccgtacttccacatgtctagtgggtaaggcttagtttgtggctcagtctagtcataaacaaaagtacacggattggagatggatgaagtcgggcgtcgatggacattctccagggcaaatgaaggctacacgagctgcggcccggtagtcgagatgtcatacggcggagggttggtgcccaatgctaggggctcagttctgcctgcctgtcccgggtatcccggccgtaggcaggattgggtcggtactcttgtctaaggctaggatgggttggaaactatgtcacatctttacgacgggttccaaggccatggaatgcggagtaaagatgtgtcttgtgggtaaagatgtacacctctgatcagagtaaatctattcgaatagccgagccctcggatatgggcaagcctagcaatgtacccaagtcagtgttttaattcttaaaatttgctcaacaactaaaatatggaatggttggcctgggttggcttgggacgagctgggacccaggtcgggttgccagttcggtccaaatcatcgtaggccttgggttaaggcaggctcgtgagggttcacggccttgtttaataatactgtgtagctctaggatcgtctttacaaaatggctttgggcaactaagtgacttttaaatgctgtttactgcaaaacctaacccctattattattcccttgtacccccccttgcattaatcatgcatctgccggtgtggcttgctgagtactgtggttgtactcattcttgctcaatccttcc

SEQ ID NO: 19449 - DNA, 645 bp, Oryza sativa
ttctatagccacggccttctcttcatctgccttcctcgccattacactccatggacttgccaaaacttctcttcacagtactcatactctctcttctcaactacgaatcctcttccgccacagcatgggatgatgaagatttcttcaagacttgctcatcacacaggtgcagcaagcatggaccagagatcaggttccctttccggctctcgacacaacctccatcatgcggcgcacccggcatgcacttgtcatgctctggacaggacaccatcctcaatcacccagttcttggtccctgcaaagtaaccgagataagttacagttatgctaccatgaacgtcatcccacctgtagattcctcacctcactgcccacttcagaagctcatgtcgaaaaaccaatcaacttctgtgtacaaacctcaaggtcctcaatcgcagggagctacccttgtagtttgttcaagagatcccatacctgcaaatcaatacgacatagttggcccaatatcttgcctcggccataataaccagttctggtatttggcagatccctatacatacatgtctgttcttcccttggactgcacagttatttctaaaggcatcccaatgccctatagttatgataaaaaagggagaa

SEQ ID NO: 19450 - DNA, 716 bp, Oryza sativa
agtaggtgggtggaaaattcactgccaccaccattggaatctttttaaaggagtatagatacccatgcaagttttaaaattctatacagcaagccatataaaaatctggaatcagttttacttttattttaaaaaaacatcctttttatatacaaatcaagggaatactaattctctttctttctacatgcaggaccgcgggtcactcttgttgcaggtaaggaaataactcaatcttttgtccattctgcatgaaatttcaattaaatgccacccaatttatgaactttcaacaaagagagtgtatatattttctaatccaaataagaaatgccatgattatcttgacaataaaggcacatctggaaaataaattacagaattatgtcatctccaaatgcagctaactaactttcttatttttcaatcagctacatcatctgtagccacatttgtaattctttcattagttgtggccactgcattctacatctccttaaagtcaaggtacaacaaagagatacatttgaaagttgaaatgtttctcaagacatatggcacatccaagcccatgaggtacactttctccgatgttaagaaaataacaagacggttcaagaataaattaggccatggtggatttggaagtgtctacaaaggtgagctaccaaatggagttcctgtggcagtcaagatgctagaggggctgcaggaat

SEQ ID NO: 19451 - DNA, 1443 bp, Oryza sativa
ttttcatttttggcctgtggatgtcctcgtttttcctttcttattccagaagacttgtaaatgccaaatggaacttatacattttgtgctaagatcaaatctactgaggtgacatggaaaggcagcatgtgctgaatcacgataagatttgccatgaactcttgatagctaagtgactgcagagggtgattccaccagtggatggaacttacatatggcgctgttccagttatctgcagcctattattactgagggtacgaaaaaattgggcaggaattgagtgctaaagtattgtagttttgtgaatcaaaacttccaagtcaacaacatctcaatctcgagtcaacagcatcacaatctcctcttaatacaaagatgcgctccttgcgtattcctgaaaaaaaaaacatcacaatcttgtagagtaatcgccctacttaatgtggcaaaatcttgttcatccctcccaagagtctatctgccatggcgattcctggagcatatgctcatgccgtgcaagctttagctactggtatcttatttgtggttgtgagtcttgtactggatcatgttgaaggaaggcatcacaagtgtccttctttctcttgcggccatcttaagggtgtatcggctccattccgtcgggcagctgatccacctgggtgcggcagcaaatcttacgagctggtctgcagtgataccaatgctacaattctcattgacaatgcaacataccatgtgaatgaaatcaactacgactacagacgcttttgggtcgtcgacgccaacatagccggtagcacttgccctcttccgcagtggaatcatcttcttgatcagtacaagcgcaaagtctcaggccacaggattgagatcgagttggctcctggtgcatataatcatgcttactttgttagatgctcacgggaggtgaaggacaatggtatatacaggcctgtcacttgcgcaagctccaactattcttttatctatgtgttattatcaagtgattcagacaaccctggttacatcgaaagcctggagccttcttgtggatacctggccatgactcttctgggtgattggagcacgacagtgcctaggaatgcgagctatgaagatgtcaaaaagttcatgagggaaggattcgccattagatttccgcgcatatatggggccgggagtatcaacgagtgcctaatggattcgataaggtgagttgatttgggatccattagatatgtcttatactcgtatatgtattgtgtactccctggctcccctctttgattcctttttctctacctgcagcgaattgcgcaatggaatagaaccaaggtctagtacaggcactgccatcagtgatcggcttattgtcatctctattattgacctccatttctggttctgcttgattggatatccatcaggcatcctaatag

SEQ ID NO: 19452 - DNA, 676 bp, Oryza sativa
tttacatatttcacaaaagtttttgaataagacgaacggtcaaacatgtgctaaaaagtcaacggtattaaatatttagaaacggagggagtaacaatgaggattatttgttcttaagtatacatggttctttaccagcaatccacttcaaagtccacatggccagtggtattacacccacgatcagttggacaactggatgaggaagcaggcaaccccagaaatgatagtcaaatatcacagtgtagaaaatcctgaaagacgttggtcgttcctcttggacgatatttctgcagagacaatataatgtaaagcgtaaaaaaaacaatataatgtaaaatgaacttaagatgcccccgagcagtttctgagcagataagcaagagaaatccatgcatatataaaaaatcgactaaaagagaaatatgaaaccacatgcaggatgtcgcaaactcactggaatgactgtgctatgcactgtttgattttggaggagtagacataaaaacgacttgtgtatggaaaccgaatggcaaatccacctctcattagtttgacaacatctgcgtagcttgcattctctagcaccagtgggcggtcgccggcacccagaggagtcatggccaggtacccacaggaaggctcgagactcccaatagaatcagagttcatgcca

SEQ ID NO: 19453 - DNA, 3363 bp, Oryza sativa
cgactccattccacaggcaatccttgacggcagcgacgaaaccaacctcttcgagacatcttcaactgagaaggacttcaactctggtgtgggggaaaagagagcaagactgagtactacccactgtactcagcaagtcacaccggaagaggaggtatgatgcaagatatatccaagggaggctaaaggttcttttgcataaagccggcatttcaaagcagtagttgaaagcagtaaaacagttgtagtaattaatccatattaaccaatcactgtccaacgttacaccacgttgcaacaggcccaaaccaccacctgaactaaccagttcattaagctaaactagggtgaaactaatcacggtgaatctggtcgaccgcccataaccgcgggcacggctattcgaatagttttactctgatcagaggtgtacaactgtacccacaagacacagccccacgacacgttcccgtgcgccgacatgccaccacgacataccggaaagaggccgtgacaggacccttcgtataaccccctctaaccgatcgcaccacaccttagggttcgcccccgtccccagcaggcaacgggcagcccccctttcgtgccgcggtgaatccggcagccgatcaaccggacaccccggccgacccaactccatcacgcccaccctcgcctgggtacgtcggctagagaaaagctacactacaagcccagccgttgcccacgctggcttgtggtaagtacgataaattcttccagggcatcccgcgaaccggtccttaatcgccatgggcacgtctagcaaaaccatgcacccacagcccaccatgtagtgtattttaattagccaacaccattgcggtggcactaatccaaagctattgccaataatcaagtctatgctttaatgtggtccccctttgtgcactagttgaactaagcatgactaagcatctcctaaaccaacatctagtcattttaataccccagctatcaatggcatacggaaaacaacatatagctgagtaataggacccatcccacatgatattgtaaaacaatgcaatatttaatagaaatgcgggacatttgtaaattaggtacaatatgatcaattgcaatgtatgacttgccttgctctcgcactgatggaaccacagcaacgtcttcgagaaaccacgaatcgacgaaacgggcgaaatctacgcgacaaacaaagcacacaagcaaaacatgctataagactactgaaacaggaaacaaaaccatttttaatggattctacacatttttatgaatttactgagacttgaatggacttaaacggagctcggatgaattagttatgatttttagaagattatctgtgtttttactaataaagaaaaactcttaatcaatttattgcgcaatattgccccagggctgacgtcagcaaggggtggggcggcgccgacatgcgggacccacgggtcagtgactcaaggagggagaggggcggctggcaagcgggccccaccgagcggcggctcaagagagtgagggagaggcgccggcacgcgggccctactggcagtgacacaaggggggggggaaaaggcggcctggctcggctcggcttcaaagccggcaggccaagcatggcgagcgacggcggcacgcgcggtcgccggcgacggcaaccggcggcacggacggcgacggcagacggcgcgaaaagcggcggcggcggccgaagacaacgatgcgcgcgcggaggacggcgacgcacacggaagagagggaaagggggaggagggggagtttttcaccgaggttggccggcgcgagtggagacgacggcgaacgacgacgacgagcgacgggaggacgacggcgacgggcgaacgatctccgggaggacctagagaaaaggttgggaggggttagagagagggagatggaccacggcgatcggaaaccatggccgacggcggcggtggaggtggtgctcacccgtgcgcaagaggatgagggctccggcgacgaacttcgacggaggaggggtggacggggtggatctcggccacgcgaatcgaacggcggcgacggcgcaagacggcggcgagcctagcgacggctagcggcggccggagtagcgggaagaagcggcggtgggtggttgcacggcgcggggacgatggggagcacgggaggggtcggcgaaatggggaaaaggagagagggggtgccggcgatgcttaaataaggggagagggggccggacgtggccgggagcggcgggaatcgccggccgacgtggggagtgggggaggagagagaggcgggatccgattttcgaatcccggccatctcgggcgcgggcgcgagcgggagagagagggaagtgggcgcgggggacgcggcgcacgcgcgggcgtggtcgacgagggccggggaaggcggagacgtgggcgcggcgacggttgcgggcgcggcggcgcgccgggatcggcgggaggagggagacgggcccgacaggtgggccccacctgtcggcgaccccgagagaggaggcggcgggcggcctgggccgccggactgggcctcggcctgtcgccggcccagcagagaggagggggaggaaaagggaaatgggccgacggcccatttgacaaaaaggaggaaaaagagaggaaaaagaaaaagaaaaagaaaaaggattttcccagggatttaatattgcactttgctcattttaattggttaaaattatttccaaggctctgaaaattccactaaaaatcctgttagcgtattttgacatgtagaacccaagaaaaattccacatgccgattccgattattatttgcgtttattaatttagggtttctctctaggttaaattaaacaatttcttcgaacgatttattttatgaatttagagcaagggaggggaacttcagggcgtgacaccagatctaccggcgcccgccagctggaggcctgcaccgggggctggctcggaagtcggagatgcgcttcgtcggcgaggggggtgtagaaccagtcgctcttccagtcatcccactttttgcggaggacgcaggggatgtagcggttcaacaccggcccccgcggcaggaaatagcagccgccgaccaccgacggcggcgacaccgactgcacggtgaagaaccaccggaacagccgaagagatgggcgcaccccaatgaacatctcgcacaggtgcgcgaagatggccaaagtcatcactgcgttgggggtgaggtgcgccatctggagatcatagaactccagaacatccataaagaaagaagaaaaaggaggaaccaacccggccattgcgaaggggagga

SEQ ID NO: 19454 - DNA, 1020 bp, Oryza sativa
aaaagccggatggcatctccaaggtcaagtgcttcacctacacggtcgaataattttcagaatatacatatgaaaaatacagagtggcatacttgggtaaatctaaaaccacctcacctttcttagcacaattgaggacgtaatcaacactgacttgatctatatccacatcatccaaagagatcgcaccaggaggcattacaactttcttgatcaagttaccagaaagcatgtagttgagcaatacatgacggtcacggcgataacgttgcatcagctcaacaacattttctctggttaagttgatatatagaaaaagcttagctcacaattgaacatgcatatactgatctataatacctattctgaaacgatcattactcgtccatatcgtgtgcaggggagacagcaatctgagttcagaaacactgttggaagcaccccaagtcgctttcagccagcatcgctctcctgcaaaacaaaaggggttaactacatgaaaaagtgctggggtgcgtaaatcggttggggctgaacagtttatgttgaaaatagctagtgaatcatgaatctgatcctacaatcggtccattttgcctgtacaaattcacaaactctcgctattaaaaaggaaatggaaatgacagccatgcagtggccaactgatgattcattcaagaatgcacaaactgagatgatccatgcctcctctcagaccggccaactcaacctccctactaaatcacatccgacatccaccagtgacagaactgagatcgcattggcccgcagctcccaaatcatacatacccgatccatccatccaaaccgaattcgccacaccacagcgcccccgcatttcaaacaccgcaaaaaccacaccaccgcaacccaaaaacaagtcgagccgaaacgaagaggaagcgcatatccaagcagctccgcccaccaccaccaccaccaccatccaaggccggagggcgagggcgagggcgagcggctcgggggctgggtggatct

SEQ ID NO: 19455 - DNA, 1521 bp, Oryza sativa
gcacccacctgagatataagcccagatacccaaattattattttttccattataaatagagtcaatttgaacactggcatgttcttgatccatacatgactgaaacacaaacacaagaatacgacaacacctaaaataccacatgaaaatgcagggtcagcttggtagggctctttccgactgtttcccattttttttaaaaaagaaggaattctgcagtgatcatgtggcacggacacatggtactggtctatgtcttgtctgtgatttacaagggacttcaagaagatccttactccctagtgttaaacttagtaagtgctcagcaaaaagctaggtattgacagtagcttatgatttgtgcagttgacttgtgtgaagatcaggtgcttcaattagtccatttggtaaagatgtataaaaatatagaggaaggcgtgcaaatctgcagtcagggacttctaaatgccaaaggaaagagttagggtgcaggatatggaaataacatgcattattattggttcagttctgtatatatgtgctttgaatgaagtttcaaggttgaaatcaagaaaatagaggacaggaacaggaattcgtaagtgtcttaagtcacctattgacaatatatcagattgctccataaattgaatatgcaccagaaagtagaactaacaacatcaggatatacaatcttgtacaagatgtagagctagcagggacttttctggcactcacacgaggctcgatacgcattagccttcgctccaacctttgtattctagaaagcagggcagcttcgacaacctgaatataagagaaggcaataaataaccagatcatcttggcccagtatttggcaggaggatggtactctcaataatcgggtgaaaatgcaagcatagcatgacatgttggcaaatgcatgatggcgataaaaatgttttttgtcagcaatatatgttaaatgatttaatataataactaatgagaccaaaaaagatattgtacaatcaaaaagaacttttaaaatcaaagatgataatcctattcttgttcaagattccattcgaccgttaagagaaactaggaaaactcatggatgacaatcttattcctatgtgagttgaaaacaaagtaaaccttccatggaggcaaatataaatgaaacaattgacaaggaaaatatcatcatattaagactgttccagaccacaaatatggattaatataagaatatccatatgcctgatacctcaagttgaaatggcattgctggtccaccattgatatttcttggatttaaccgtggcagtaatgaatctaagaaggcctttcctcctgggctactcaagtcagataaaataattgataagtttcataacaatagtgatgttcaccaagtaaaatacaatttatattaaaatgactagtgtacaaactgacctgttgtaattgaatataagaacgcgttcatgcatagcaattgctcgcaaggaaccaagatttactaatatggct

SEQ ID NO: 19456 - DNA, 551 bp, Oryza sativa
agcagcagcagaacatgcagtttggtcctccacctcctcagtccaaactgttagaatttcttcgtgtcaagccgcccactttctcaagcaccaccaacccaatcgaggcccacgactggcttcatgccattgagaagaagctgaatcttttgcaatgcaacgagcaagagaaggttgcttttgctacacaccagctgcaaggtcccgcttctatttggtgggacaactacatggtgacccgtccaactggggcagaagttacttggacagagttttgtcatagtttcaataaagcacaggttcccgagggaattgtggcacaaaagaagagagagttccgtatactatgtgaatctggccatggcacggactgtgtgacatcttcttgaagcttctgtatcgctgatagcaaaccggcgtgtcggtcatgtagaacacacacatttggtctattttcaacaacacacattttaatgtgccgcaaaaaccatagccagcttgatgtgttctcgcttccaacaaatgcaaaagcaacaggaagcccatggcta

SEQ ID NO: 19457 - DNA, 546 bp, Oryza sativa
tatgtacaatttttcggctgtagtaaaaatcattaggtgtttccatttgggttaattttttgagattggatgaacacattccagttggagtcttacaacaaatctaaaaacattcttagatcatacgtgaaatcaatactaatactagcaggtgacaaaatcttgcagaaatacaacatgtttgttgcccagattggttgtgcggcatttggtgtgttagccctttccttatttgggcctggatggttggcaagaggtgctgctctttctgcatccatagcattcatgacaattacaggcgcctcacaccctccaggtatataatctttctttcaacagggatgtggtgctttagatgtgctcagcaggatttaaaaaaatatttctgattgacatctgtttttgtactctacttaaatgcatcatagcaaagctcaccatttccatgatgattgcagctgcaagcttgcctctcttgtttattgatggtccaaagtttcaccacttgcaactctggtatgccctttttcctggagctgcaggctg

SEQ ID NO: 19458 - DNA, 2588 bp, Oryza sativa
caatatagataagcaaatgaaaccctttagggaatgtgcaaatggattgctcactttgtattaagatggagaaagaaaagttacatcatcagcgattgggcatgcaaaaccagcagattgaccgaacaaaaaaccaaatacaaccaggcgactatacttcagaattactgaagacacatttttctaatcaggttgctgtactagctgtgcggttcggataaagtcaggacaaataagacaacctgaagcacttggaatatctgttgaactaaaagataaggtgcatccatctttttatgctttgttgtcactattaattaagtatatcatgtttttactgtttctgctacagtttgcttgccacttgatccgcctcattcctcaatttactcagtggtttcaacagtgtctatgttctatccattagtaacacacgatcctacccagttagtattctttacaagtcaattgatgttcctgcaaggtttcatggccttcagcttcacaatttcttttattcgttacaaaagtatcacatttatttgtaatcaatagtttggatggtactatctaaaacaactgatttggagatgaattgttgacctgttaggatccttaaaggttcccttcgattttggtaagatagagttgtattgttttctttaattagtgtgtgaattaggtgttctagttgtgtgcctataaaacattcattattctgattcttctatttggcataacaaaaactgaaatggtgatatgttgcatgtcttattacttcctttttcagggctatgcattgttgtgtgttggttttccaacttctgatgttgaagttgaaacacaagatgaagatgaggcaagcattaagccaccttgttaatagtagtaactgtcttatctaaccatacagaaggaactagactgtattcttctgaattcttatgataagtcctacatgttccactaagcacataacacctcaatgtataggtctactggctccagtttggaagatatttcgcacgaggacctgttgtaagtattattaaatttgtatttcacaactcatagtttttatgcctaggaactcccgtgtagacaatttatagcataagcgcataactgttgatgttggctgtggttgtcaacaccactgttattccaattccactttaaacatgaaattatatcttctagcttttctcagaaagtggactgctcttttttttcaggaaagggatgattatgcactggagcttgcaatgggtgatgagtgagccgtgtctaaagaggtgacaccaccagaaatttcaatctctacattgtttaatctgttcatttttccccttatattctcatctaactctcagttctcgtccttcacagtggtgtttgcagtcgggagctcatgttgtcttaaggactttctttgaaagtggagaaaggggctttttcctcagctcacaattttccatcttcagtgctgttactctgttagcgattgtttggcatgtaaaaaagtgtgctttcttgtaaaaataccattttctagttcgcacctgacagacgaagaacaccatggattacatgtaaagttgtaaactgaacacctaatcttgagtgcgaataatgaataatgatcaccggagttatgagtttgggaatgatatgctgccatgaaaaccttgaattgagtgaatttgaatcttaaatttatattcaaagcaaatgtagtttcaaatacttccgttctatacaaccagtttgaaaatgagcttctagagttcgttgtagctgagaatttgtagtaaactagagtactgatgcagggcaagttggttttatgttcatgttgcctcacgttacaccgttgtccaattctgcgtggaaccaacctgagaatgctcaattctctgaaactggagtagccgagatgaattcagacaaatcctctgcccaattaggccggaaatcagccaacttgttattcttcaccgaattagtcccacgaatgaattcggcacacctcttcccatcaactaaatcagactgcttaattcatgtcagcaaatacggtccacaaatgaatttcccaaaccaaaatagcaaatacccacagaagtctacgattggatccactagtgaatttggcccaacacatccatcaacgagttcaacccaccctcaaggaattcagcacaccaacaaatttggtcccagttaactccatcagtgaaattggcccacgaaattcccgcaaacaaattcggcccgctaaaagatttggtccatctgctacccattagcgaattcagcccaagcataaattcggccgtcttattctcgacatcgtattcagcccatgagtagatttggcctcatagattctcgtctacaaattgagcccaagagtaaattaggccgactaaattctgtcaactaatttggcccaaaaataaatttggtccatctattttccgtaaactaattcggcccatgagtagattagggctcatgggttcccgtcaacaaattgagcccgagagaaaatttgaccctctaaattccgtcaaccaactgggaaa

SEQ ID NO: 19459 - DNA, 557 bp, Oryza sativa
tcctttcaatgaaaaagctcttagtgcagctcgtggagcctcattgcagcttccagttgtttttggtaactggtctgatctgcatgctttgatggctaaatttgatatgaagatgctggcaggtcatccagaaagcagcagtaatggatctgaaagaacacatgttctatctaaagaactagcggattcactgatgagtgaatcagtgtgcttagtgttaggaagtgagggcaatggcctttcggcagatacccttcaagcctgtgagcttgtaaacattcctatgcaaggtacatttgaatctcttaatgtttcagttgcaggtggtatcttcttatttatgttacaaactaaacagcaaaaaatggcagaacgttaactgtttaagtcatccttgattttttaataattttattgttcttgtccaatctgttacatttggttcttctttctgacatcattgctgatagcttgatatcaatccaaagtgaaggaacaaactgttaagaggaatgcaagatcttggttgacaaacaaaacaaaatgagaacatttta

SEQ ID NO: 19460 - DNA, 548 bp, Oryza sativa
tgtgttatagcacgtggaagcagatggaagactatccacgtcctggcctccaattgtagcccaaagtgtaacatcacatggaacctagacaaaaacgatagaacataaaaaattgaacaatgagcagtacaaaacaatcaatgtacacacaggactataaaaaccaaaccttatgaattgtgaaagaaggctgcaaatacttgaatccaagtaatggagctcgggaacagcttgtcacaaacttcagtagcatgcaacgttctgttggcttaaatcctttgataacctgcacattccaaaaaccatatttttattatgatcattccacttcagccttcaccaaaatttcttttgtttattgtcaatcagtaaaaatagcttcatctttgataataagctaatacgagtagcttccatcctttgtcttggaggcaccttttcaagggagatctcttcttcttagattaaatgaaagattggatcttgtcgttgtaattttttgtaccttctgattttatcaataaaaatttaactgtaggggccctccc

SEQ ID NO: 19461 - DNA, 652 bp, Oryza sativa
ttatgaagcctcatatgacaatttgccacgtctgctatctgttatccaacaaagaaaccctgggacgtcttgtgcactcaagacattcccctcaattgaacatcctggcaagactgtgctgcaaagagcgttcttagctctacatgcatgcaagatggcattcgtgcactgtcgtccagttctttgtattgatggcacatttttgaccgggaagtatcggggccagatactaacggcaattggggtagatgggaacaatcaggtattgccgttggcatttgcttttgtcgagagcgagaacaccgacagctggtactggttcctccatctggttaagacagaagttgttggtatgaggcccaatgtgtgtctaatacatgacaggcacgccggtatgcttcgagcgatagaagagttaaagtttgggactatggaaagaggataccctggccagtgggaagatgtacaaagcaggtggtgcatgcgtcatatgggagctaatttcttcaagcaatttaagaacaaggagttgatgaacatgttcaaaaggctatgcaatcagaaccaggagaaaaaattcaatgagctttggaagagattagatgagttgacaggcaaatgtagtgaccagcgtgcaacaagaccagcggcc

SEQ ID NO: 19462 - DNA, 732 bp, Oryza sativa
tccaaaaattttaccaatttctagaaactttttattattgttctctaactttgtcacatgtttattatccaactgctaatataattttgcacaaccttcttgaaattgttactttatttaaagaatacgaaaatgatgacgttctaactgaacctgtctttcacatgaaacaaaaatatttgaaatattggaaaaatatacctatgttgtatgctcttgcttttgttttagatcctaggtgtaaattaaggggattgtctgctattttatcacttgttggagatactataggtgtagattatagttctttttatactgaggttagacgtaaattatatgaggtttttggaagatatgaagtaaagtttcaggaagttcgccagcggagaccccctcctatccccactacaggtaagaagaagatacagtggggtaggatttggggtggatcgtcttcaagttcaatccaaggtggtggcagttcctctgctacaagtggagacgcctcttagcatgttgtggccgcaaagttgtccggttatttggacagcgactgccatccaccacgaagcacaagatttcaacgtcctcgggtggtggaatgaccacaagataacatatcctgtgctttcaaaactagcacgggatgtgttgacggtgcccgtgtcgacggtgtcctcagaatcggccttcagtctatgcggccgaatcatcgaagaccggaggacgact

SEQ ID NO: 19463 - DNA, 506 bp, Oryza sativa
cctcctcgagaaggagtgtccacacaccgtctcttgcgccgacatcctctctctcgtggctcgtgatagcgcctaccttgctggtgggctcgacttcgagatcccaacaggtcgtcgtgatggcttcgtctctaaggaggatgaggtcctctccaacgtccctcacccggagttcggtgccaaagacctcctcaaaaacttcaccgctaaaggtacatattatatacttgcactacatagatacgcatatcatcggtaacaatttcatggggtcatcatatgcacttgccagtttatctaaagtcttgttaatgctctccctcataccgatgtcccataaatcatcatagagcgagttatgaatgcaagatagtgagagttgtttagctctgatatacggaaagtgtttttatccctcgagaggatatcccaacgtttatgattgccacttaaatagttataaaagtatgaaaaaaattaacaagatagattaatataatatatat

SEQ ID NO: 19464 - DNA, 917 bp, Oryza sativa
aatgcattctccacataccatctccacatcccagagttttgaaccggcattagttcccaataaaaaccatatgttgcccgacttactacaacatagattgtaatgtcactagtctgtggatcaactcccaagccccgcatcaaccatttttttatagaaggtacactcctctcggctggcctatcaattccccttgctgttacaataaattctgacagatctaccccagttggcccataacggacgtttccttgaccatggtatagttgaaatataagtttactggacatatctgcaaagttaattactaggccgttattttacataataaacgactacagtgtaatatcttctttgcaacgtacctaaatttttatatattctattgcaatgttactcaacaacatttaaaactacaaacctaataactacaaatactacagatctactaagttacctacatggctacatctaacaatatatatttatatagtaccacaggtaaaactctatttcatacaatgcatttatcatatatttagtcacgtatataatctacgaatattacctgaaatcgaagtttgaaactggcagggcttcgcctcttcttttcttctcctccccttctcctttttttttttttttgatgtggagaggttaggagggaatgggctcctcaaaggagccggctgggctttataggcggccaggcctgccgccttctgtaagggcggcaagggggtcctgccgccctttgccagggcggcaagagggcaggagggggcaggaggacggccgtcccgcgccgtccagcgcgccgtgtgccacgtcggcttgccgcccttgcgaagggcggcagggtctagttttgcaaattttttcggcgctataatatttctgtaaatattaaaaaaaaa

SEQ ID NO: 19465 - DNA, 4457 bp, Oryza sativa
aggaacaaagggcgtgaacttacactcttcttccgtggtagagacttatacctgaaagggtggagaagtgataggtttggtctgtttgctgcccaccctgataggtttgataagaagaattgcttcatacaagacaaagcttgcaaacacctgaacatcgaggataattatcatcagcttgttccaggaggaagaatcgggaaagtcagagtgggaccccttgcaatgctagactattttgaagtccttcacaaatgcaatggaatagtgacaacagatgttctgggggctgtggctggatttgctgttaacttcgcagaaccaatacgccaggaagatgtcttggaggatatcttagagtcgtttgttcattttgatgtggctatgctggatagcagaagggcactatccttggacgtaaggaaatacgaccactactcaagggagtttctaactggtgttgattgcttattgcacggtagaccaatgccagagattttgaagcgtgaggaagttacagtcaagtcactccatgagttgtggtgcagaatcaaagttccgctgagagactcttataatgatggtgcattttatcatgatgataaagttggcatacccgtctggtctcccccctaccctgatgggaataattgggaggaggaggaagatgaagaggaagaagaggaagagggagataaagaggaagaggctgaggaagaagaggaagaggaagaagaggaagaggctgaggaagatgcaaaccaccgtgatctaaaattcacaagccaacaggacttcttttcagttgggatgaaggctaatgaaatcaacacctcttgtctctgtcgtcctttctctgcagttgcctcaggtgggatgaggccccttgttgtccctccaagtcagggtggggaagtccagagccggtttctgagcaggaggccacagtggttctccagattcattaatggaccaagggctgcgtgttttttgaggaggctactaaaatagcgaccacggctggtggagcgggcttcttgattcttttgtgtctgtctgaaattttgatatgtctgaaatgtatctcttttgctttgtttagttgcttcctgcttacaaacatgtaaaatttctctaaaggagaagttgtccagaagtttcatttgcatcatgctcttttctgccttccaaacatgagcaaactccattaggatacttggctttgtcttgagtacatcatggatcatgaagcacatttatgctaagtgagattttaattggtcggaattttgctcggaatgtcctaaactacaaatttctgagcccaggggagacggatccctgataaacgtttggagcgtgcctttttaacatctgacaggatacaggatgaggatagcatggatgagggagatcaaaactgcacaactcaggttataacaactgaaaacagtcagggaaccaacaagttctcacgcttgacttgtgttatcatctgacaacttatctatgcatgttagttgtatcataaatatgtattatccattgaacttaacttatcctacgtgaccttgaatttcctttttaaaaagaaatcatgtgtgtgctatgcctattgtttgttctctgcaatctctgccattttctgactgtcacctatattcttcttggttttgcagtttaactgttgaaggcagtattttggtgcatacatatgttaaagtctgtgatgctttagcttatgcttcgcaaaatctttgatactgccataatgccattgatttttctgtgctggtatctctgatttatcatgtcttcccagccaacccgcaccgaagcgcagggtgcacacctgcaagtataattgttagcaatagtgtcaattcacttcagtaaataatcaagcaatttctaatcaatctagcatgtaatactatactctctccagccataaaagaagatcaattttgactattcaaagtccacaagacacaaatttgaacgctagattcttcctcataagtctgaaaacaggttaggtaagtgcaatactgttattcaagcatttgctgtaataaacttggatatataatttcatatgcgaaatatacattctaattctaaataatagacaaattttgctacgggacattcaaaaaacacgtaattagctgggagacatcacaagaaggcatatctgttataggacaacgcaaaaaactggtaattagctgcttgacacccgtgggattattttattttattttaacataatgactattacgtgaaatcaaccacaaactatttcttctttgctatttacaacttctacagatatgttaggtgctaataataagttctcttaaactaacatttggcatagcgttctgatttttttagtatggtcgtgttactcgtgtaaccatgtactgttaggactgtaaatatcacaggctgaaaacacaaaaggccattaatacaagaaaagcatatgccaaaacgaggaaaaagttcactttagatcccttatgttatcattgagtttcaaaaacatcctgaaccacggatctcgtgtgcgctagttttgtaagttaggggatgcgttgtgtccggttttgtggttcagggatgtttttaaactcgacgacaagatgagagacccaatgtgaacttttttttcccaaaacgatgatcatgtgggcccatgggccgttgtactttgctcccacggcccagggcatcacggtctactaccatcatcaatggcgggaaagcatgggagaaatggagggaaaacgagctcccattccccacccagaggccgccgccgccaccgccgccgccgccgcagagcggagctgacgatggcgaagcgcaaggcaccgtccggcccctcctcctcgccgtctcccgccgccgctggcgccgacgcgtccccgcccgtcgaccccgtcagttcacctctccctcgaatctcacgctagttttgatttctcttccttttgttgaggtttcgtattctagctcgcagggtggatccgccggcgggaggaatcgcaagggcgcagcggcggcggccaagcggaagcctaggaagccgcaggtttgcgtcctcccaaatcccaatcgcagcaaatccttgcatcctgctctcttttttgattcgtttgaggctgtaattttgccactgaatgtgtggttactgttctgcccccaaatacaacattggcctgatgcaataattctgtcacttttgcgtaggttcacgagaaaaattacgcgcatgtgtactatggatgtagaaatgttttatatgatgggaatgatttctactatggacatagatatacagaagaatttcgtaaggtggaggcacatgatttgtatggatgtccacacttgattgccgagctaccaccacaaccacggttaatgtcattgctggatttacagctctggattatcaagttgtttagactccatccagaaacacaagacctctcaattaagggcttcttcgaagaagaagacagttggcagtacttaggttcagcgggctggaagacctatgattttctatctgataaaagttggcagtcctttgtcaagaaagtaaagggtagaaaggggatggaatttttcaagttgtatgtggactcctctgaaatcaagcactacgacagtttgctaaaagcaacaaatgatgattattgtcagtcggcaactgtcttgttgcccgagcaagatgatctgacatggtattttccttgggatcacatttcccgacgcctcacggaagacctggcaatgacaactacacagattgtagctcatcttgctcacaactatgacaggcaccttagctatgctggggcatggagagcaaagcagaaggctttggagatacgatttggtacattttatgcttcacacaactatgtcccgaggttactcaaggaaagattttacataaataaccctttcagttttgtggacatcaaggatacagaggttgcaggctgtaaagatttccgagtcctccaccgtatattctgggcatttgcacagtgcacgcaggcctttctgcactgtcgtcctgtgatttgtgttaagggaatgccgctatgtgggaaatatgaaggggttctgttaactgctctagcatttgatgctaatggttaccccattccagtagcatttgctgtcatcgagggtgagagcaaagaaagctggctatggtttcttaggaatgtgaaacatgctgttgtgaaggagcgatctcatatctgcatcatacatgattgcaaaagggcattgttcaatgctatagaagatctaaggaataatccacaagaagcacatccatggaaggatgtacaaagccgctggtgcatccaacaccttgctgaaaacctgttcgcccattttgctgacaaaaagctgatgatgctgttcaa

SEQ ID NO: 19466 - DNA, 10864 bp, Oryza sativa
attcctgcagcccgtggaggtggcatttgaacgtgtgacagagtatttcaataacagaagtgctgctgcaaacaaagcaacgggcaacccttccatgggcttccctgaatgtgtccaggatgagatgaatgcaaaagtgcaaaaagcacagacgtatcacgtgacccgcatgaacactgcggatacaaatgttttctccaacgaagcgcatcaaaggtttaaggttcagtcaagacagaagggtgtgattgttcatctgatatcgaaacgtatccataagaatcacaaaaggaacatagcgtgtcaaagcgaaatcagaagaatcgctcgatgttcatgcaacaaagcaaggctgcttcacaagccctgctctcatgtcattgccgtctgctgtcaggttggagtcagcattgcctcatacatgtcccccttctacagcctgtcctatctagtcaaaacttggagtggaaaatcagatgcatccaaccttgttgaccggaattttgctcggaatgtcctaaactacaaatttctgtgcccaggggagacgcaaacatggatccctgataaacgtttggagcgtggccttcctgcctttttaacatcagacaggatacatgatgaggagagcatggatgagggagatcaaaactgcacaactcaggttataacaactgaaaacagtcagggaaccaacaagttctcaggagaaactagtgatgcttgacttgtgttatcatccgacaacttatctatgcatgttagttgtatcataaatatgtactatccattgaacttaacttatcctacgtgacctttaatttcctttttaaaaagaaatcatgtgtgtgctatgcctattgtttgttctctgcaatctctaccattttctgactgtcaccgatattcttcttggctttgcagttaaactgttaaaggcagtattttggtgcatacatatgtacgggataatttactatttgccactctgttaaagtctgtgatgctttagcttatgcttcgaaaaatctttgatactgccattgatttttctgtgccaacccgcaccgaagcgcagggtgcacacctggaagtataatgttagcaatagtgttaattcaagcaatttctaatcaatctagcatgtaatactatactctctccagccataaaagaagatcgattttgactattcaaagtccacaagacacaaatttgaacgctagattctccctcataagtctgaaaataggttaggtaagtgcaatgccgttattcaagcatttgctgtaataaacttggatacataatttcatatgcgaaatatacattctaaataataagtataataaagttaacattatagatctagtgagatcaaagatgtgccgttgatttttatctctttgagcgtgtgttagggccatattcatgggtgtgtaaatgtgatgttgcatggcccactctgttacagaaacagaggtatcactcgtccagaaagcaaagctgaccaagtcacctttactgagattaacgcaaaatcagtctttatttcttgagtatcatagccatggattttctccttgaaggaaacataatgctggtcgaaactggatggaaacgcgcccacttcgaacttcaaatctatgaaagaatccctcgttacagcaaccaccgacctctttaaatcacgtgactcactgatgacaccatcaaagagacggatttccttatccaagtcactggttaaacaaccgagcaacaaattgaaactgctttgcacttctgatataagaatctctacggtggcctcagctgaacaattaaaacgtgataaagttatgtcaactgcaccgtaatcgccaggaatgcaaattgtttctggccgattccataggcctccagagcctatcattgatgcaccatcaatcagctgtaggtcatctttttcttgttcacctgtcttgatcctcatgtcatattcaattagagcatagtccatcatgtctattcctcggttagggccttccatgttgatgagcgaaccctacaaaattattatatttagttgctcttcttataaaagtaagaaatatctaaaggtggatgcttccttatgttgtttcacttgtaacagcatttacttgaaaggtccttaaagttggagcgtggtgtcacttaggtccacgatcttgtaaaatcaacattaagatccatgaacttgtttaagtgaatcattgcagtccaaaaacacgtctgaccgggttgaccgtcctacgtggcagtctagcgtggctacatgtttgcaattaggcccctccacgcccgatccacagccttcatggtgttggagacgcggttcttgccgatgagcgacatgacggcctcccgcgccttggtgagcacctgcgtgagcgcctcccgaccttcgccatcatgttgcccggcgccgttgccgccttcggtgggtgtttgttgcagcagcagcggcggaggggggacaggggcagatgcactggggaaggagaagcaacacaagccggtgctcaagaacaccatcgccggcggcgaccacagcgggaacaatgacggcggaggtggcagggagaaacagcggcgaccgcgctggcgtgagcaacaacagcaacagcagcgaggaggatgaacgcgatgtggcggcgcagaggatgggtgatgtggactagcgcaggtaccaagaggacatcgaggacaaaaccatcgccatggattccgatcctgaggttcatatcgcgccgagtaagctcttgctccgttgatctctagctttgcatgtgccgccgctgacggtgttagatttgaaacttttttggttgtttgcgtgtgccgccgctgacggtgtcaggtttgacatggcaaggaccctagcggtgcaggagatggagcagtggagggcgacggcgcaacgtgtcaaggtgtcggctcggtgacctcggcggccccgtcttggacgtctcggcggcaccacactccacgatgcgtgtgctgcgggaaggcgaggacatcggcacgacgcctgtcgtcgactctttcgagtggaaggatgcggccacgtacacaatgcctgaaggcagcgctgccgcctgtcgtgtccggcgtgacgtacaccgacaagatcaagttggcagcgacatgcaccacggagagtacagcaagaagctagccaccacaatgtacgagaaggtcgccggagtcgggaccgtcgtggactcgtggctggcaaggtgcagcaagtgacgcagtccgctggcaccgtgatctcaggcatcagcggcacctcatagtcacagggtaccgcgcaggactcggacgcctccaccacccttgcctccggcgagccagcgaccgggcagcaacaggacaagggggcgacggtcaccggctaaatcgccgacatgctccgtcggggcgatgaggaccgcgtgctcagcgaggcgatcttcggcatagtgcagtggcggaaggaggtcgtggcacagcgcgtgccggcggtggcggcagcggtgccgggcgaaacgatgatgaagatccgggaggcactcgcataggtgctcgctaaggtgcgggaggccgttacgtcggtcatcggcaagaaccacatctccgacaccgtgaaggccgtggatcgggcgtggagggcctaattgcaaatatggagccacgctggactgccacgtaggacggtcaacccagtcagacgtgttttgtactgctatgattcacttaaacaagttcatggaccttaatatcgattttacaagatcatggacctaagtgacaccacgctccaactttaaggaccggtggtgtattttactctttttacaactaccaagatcttcatcatgtatcaaacaaaagaaaaaaaaattatgtagggtactaagcaacaacaaagtgtccaaaactatttaacatgatttttctttggaatacatgtgttccttagtttcataatttaaacctgttctcatagtaaatcatcatttcataatatagagtacactccctatgtaaggtgcgttttggaaggagaaattcttgaaaagtagaattttgacctttaatttctctatcaatatatcaccaattgcaataaaattaacatcttaaaagtaattcgagtaccaataatttgacgatttttgccaaaactcatgaagtatgaattttccaaatcaaaatacacaatgatatttctagataagtcggatgtgtacctgctccacaatgatgggatcatccctgctacagttgacaatataattaagcaacggatctagatcatcccgcacagctatgtatccatacaactctactgaaccaccatccagtgtaattttagccaactccaatgataaaatttgcagcatgttgcaatgaacatgtgacatgcaagttccattactgcgaatgacacaatttgtgggattcgaaaacctcattgcctccaaccgagcttcaaaaaaagtaaagtcataatgtaagtttgtgaccggaaattaatacagtgaacaaacacttgacatttgaaaagtacatgtgatatttgatgattatatggccttattggatttttttttccttttcatctacaaagtagaaacaacctatgttctttttactaggagagcaacatctatcctagtatcaactacaagaaaaaaaaaactcaagggcagactacctcttcagaaagccaggtatattctttcctgtaccagccttttacctctacagaaaaccacgtgttttgggaagtggtctatattttggaaactggcaacccgctcctcatattaaacaggggcatttgaatgtttggttggccccttgaacacctagtagtcctttaggttatatatagtatgtgaactgcctgagtactttctattattgcttgttgttgctccctgcatgcttggaaaacttgtactattactgacagtttgtggctgcatgtatggagaatttaaacctaatggcaattacaacagtgtggatgcgatatttagattattatttgcacttatagttgtcattttcttgtgtattctgctattgaaatacatgctcaaaggctgtgtgatcaccgtgttgcaaagttcagggataaagtactttggacatttatgtaattaaatggcatggaataaggtcctagtccatgtcatcagaactctgcatgcaacctcagtccctcccatcaggctgtggcgcagattgctatgtatgcaaatggtgctaagctgaagggccagtaaaagtaaagtacaaggcttggggtggaagtgttactctcatccacgtttaaggacctccagtacaattatctcatagctgaaaagagtgtaaggcgggtaaaattatggcagtgctgcatagcaccacatatacaatgatctctaggatcgcaataaaatatttatagatatggaaagagattcgttatgttcaaggaaacaaattatctctaataaaaaataatatagcaaataaagatagagaaaagatagcttactctcattacggtctgcaatatgaaactcccttttccacggtgtgtccatgatgtccctatatatagagccatcacggtgtctactttttggaagtatgttgttcacagtatattcttcaggatcaagaacttcgtcctcctcaacatgttcctccgtttcactccttcgatcatcctcatcacagccatcctgcttcgcactttgccccagtacatcgtatttgatgtatgaaacctctgaggacgccgcatctctattacttttctcatctccagctctagcctccaagattgtgcccctggtgtcaatggttttcataccttgagtgatcgcagtatgcttcttttcctgggatggaagtcgcctgtatgactcgtcgccttttactcgactgatggtggtcatgttccgaggttcccaaggaaatctatcattaattaagagaatgaaaaaccaatatcaacaactaaaataaataagacggtaccatcagtcaggattgagatcatctaaccctgaaatcgataatcgatttctaaattttttttctcgatctcctttgtctttgtttcgaattagtttaaagaaacttattttccacaactaccttcaaacaaatgaaaacaaaacccaaagttttttttttttgcgaggaaaacaaaacccaaagttgatcgcagatccaaaaactgtggcaaaagacgcaaactttagcatcagaacaaggaaaaaaaacacatgcccaaaaaatctgtctatgaaaatcatgccaaaactgtagtaataaccaagtaaaggcgcagactttagcatcgatcagcacaagaaaacacaccgggaaacacgacggacgacaggtcctcctcgagcaagcaatggtgaccaccagcaccagctagccgctgcagatgccatgagagagggagaagagatgaggcggtgcatcggggcaggagatcgggcggcggcgttagagcgtcggagcagacgcggaaagcggcggagaattcgcatctgggcggcggcgggggttagggggaatagccgtgctgtggctgcgtgggggatttctgtcatcatcagaaacgggcatcatgtggatggacataattggagaaatttcattatttgacatccaattcgcaggcctttcagggcaagccactcaatacacattcctttcagattttgtcactgcgatagcgaattcctttattccgtgccactccgtcgccgatccgtccgtccgtccccaacgccagcttttccgtcgtcttctccacctcgtcacgctcgtcaccggcgccggcgtgggctgcgctctagaggggctcgagctcagattccggtgtggatgtcaggaaccagtcgtcttgtaatctcgcaaagcagcagccgatcgaaacgggcgagccgagacgcacgaggcggggccagccgcagacgtcgcggccgccctccacaccgcagaatcgttgggcaactcggagaagaaatttccagcgtcttccacctcgacgtagccggcgagcggccaccttcgcgaacccgggccacatcgggaacgaaggccatatctaatcccgcagacgtgcgacctcagcaccaggcagaactgcagagctaatctcttccatgccataatcagcaaaaaattgttaatcttcccaaacaaatgcattgagaaaactgacagaggaatctactgttttcattgataaactaccaagcgtgctcctcagaagtcagaacgaagaagaaagaaatcacattacgcaactaattgatgggagagaacgaagaaactagggaagaaattagcgagctgcaattaacacacaagctatatctatgcacaatcagttgctgctgcttcgcaagattagaccccgcgccgtctcgcgcctcgtgtgttgatgtgatgttttgtgtggggggtgaaatgtgcgtgctctgaacacgcaggctgacggcgccgccaccgccgcggggaagaggaagggcgccccggtggccgccgccgccgccgccacggcgccgccgaaggctaagaagcagcaggtctgtgccgcgcacattccgttcctttgaatctcccttgcttgctcgatctcgttttggtgctggatcttggagcaatgggaggtcactagtggtattttgcttcgcaagcgtcgagtttaggatagattacaatctgccaatctgggccttgcttaggtacgaatactgaagcaatgtgctgttttttttttattattagataggtgggggcaaaatctgtatccatataaaatgttcttggtatttggtgaggaacaagtatttgatttcatttatttttagattgttacagatttgcctgaatctaatattgatcacttcgctgtaagatttgtagacttttctaagacctgatgtctgatgtagcccccaaatatcaaactttgatgtctgatatttgtggtaagggacaaatgtttggtttcatttatttttgggttgatacagatttacccccaaccttattgatcactttgctgtaaaatttgcaaactttaatatagcccctaaattcaacactgatttgatacatggaaatctcattgtttggtgtaggattttggaacaaaccaggcttacgtgtactatgggctacgagaggacagatatgggctatgtgagagagagtttgaattcatgaaagggtctgatttgaggctatgtgaacgggtaatcggtgagctcccacagcctcgatcgatgtcattggtggatctgcagtgctgggtcatcaagttgcttcgactccatccagaaatacaagatcttcaaatcaaagggttcttctcagaaggcttgccccttgagtttcgtccggagtggttttataaaggtgactgggagacacaccatatgcataatgatgattcatgggcttcctatgtcaagaaagtaaagagaagatatggtatgtcaatgttcgtgctctgtgtggattgctctgaaatcaagcactacagaagtttggtcaaagctgggtatggtgtttacgctcaagtggggaaggttgcggatcatgaatgcatgcctacggaggttttgcctgggcaaaaaagtctgtcatctaaatttcctgctcagtatctctcctatcgccttaaggatgagcataacatgtcaatgacagctgaagaaattgtaccttttattgctgacagatatggcgacaagatcagtctccctgaggcatggaggataaagatgaaggctttggagattctatttggtaccttctatgattcatacaactctgtaccaaggttacttaaggacataggatataaaaactatggcaattatgtgaacatcaaggacacagaggttgtaggctgtaaaagtttccgagtcctcgatcgtatattttggtcacctgcaccgtgcgtactggcctttacatactgtcgtcctgtgctttgcatcaagggcacttcactatgtgggaaataccaaccacttctgttaactgctctagcattagatgctaatgataacttgattccagtagcatttgccatcattgaaggtgagagcaaggagagctggctgtggtttcttaggaatgtgaagcaatcagttgtgaaagagcgatctggtatctgcattatacatgactacaaaagggagttgcttgatgctatagaggacctccagaataaccctcaagaacaagaaccacacacatggagagacatacaaagcaggtggtgcatcgaacaccttactgaaaacttatctgcacattttggtggcaagaagtcggcggtgctgttcaataaactctgtcagcagagccaaccaagtaagtttactgatatctggaaggacctagatgatttgacactcaggtatacgactgagaatgactctgttgctagtgaggaaatggaacaggagtcagtcgagcatgatgaggcagaacttgaatcacaaagcccatcccaccaacttgattcagcggatgatgaggaggaagtaaatcagggcggtgacagcaagagcaagattacaaggtttactgagtggatccgtctgaaaccattggagaagtggtcgctgctgcatgacacagatggagctaggtatggcatcatgggcattaatatagctgatatatatgaaggtaatcatgtgttgaaggggataaagtgccttcctctcaacgcaatagtggaggttacacaccagcgcatggcagaatacttcaaggaaagaagtgctgcagcgaagaaagcaattggcaatccttcaatgaactttcctgaatgtgtccaggatgccatgaatgccaaaatgcaaaaggcgcagattcatagtgtgacctgcatggaaatcaaggagaacaaatattttcccggggaagaggttcaaaagtttaaggttcagtcaaatcagaagaaggttgttgttcaattaacatcggagtatacccgcatcagtagggatcatgcacgcgagctcacgaaacgcgctgaatgttcctgcaacaagtcaaagctgcttcataagccctgttctcatgtcattgccgtctgttgtcagattggagttaccactgctgattacatgtccccgtactacaccctgccctatctggataacacttggagtggaaattgtgatgtacccaaattctcaccagactacaaaatcatcatgccatttgacaaaccaacttggatccctgacaaaaagctggagtgtggtctttctgtttttagaacatcagatcgcgtgcagtctgtcatggatgaggaagagcaacagagtagcagcacttagagtagatcagtttcagacaattcagggcagcaaaaagcacctagaagaacctagtcaagcttgaacctgtgttattgtctgttggcttaaccatgttttgcgttagacattaagttatggtatgcaaaacctgtgtttctattacttttgtagtgcttatgtgctcccttgacaactgatgttttcagatcttttaaggcaatatggttagtggtctcatggatatttcaaactgtgggcatgattatgttctaaatcaggttagttttgctatcctatactatacccttgctctcttttccagttggttacacttttgatatttgaataactgttataggattacattttttcatgccctgatatgcatgaatgggttgatgccaaattatgtcgaaaggtatcatttctaggatgatcattataatgaatggcatgcatgctctctgacaaatcacatc

SEQ ID NO: 19467 - DNA, 20624 bp, Oryza sativa
acttgtctgaatcacgccctggtgatgtcggtgatggtgatacgaaatccgacgttcccgatgcatccacgtggtcagcgtttcaccgacacacgctgctatactattccttaatcattttctggtctcttcctctgttgtttcagtcgtcttcctcgtgttgctcatggggaatataggagtattatcatatgatctgaaattctgatttctgaacacatatgcatcgcgatttgaacttgtccttccatctgtttctctttggaaacaaatacgtcacgaatttgcatgataagctgttggattaaacgataaataattgcaaagtcgctgtatgcatgatctttcagaattctttctctgacttaaccaatcataatcaagcaactactctaaagttgtaacggcaacgttcgctcgtcgagtcctctgctgtgcccagaggaataaagaaaaaaagaattgtccattaagaagctgaccattcaaagaaaaactttcatgattggaactcacttggggccatgaagaacagttcattgcgatttgcaaaggtgatttggtcatcctttcctggcactcaaaacttgaggaattaaaaaaaagaattaatcaatcagctcgttacaaaacaaacatgaagaagcaattaacccaatgttcagatcactgcaggcgtgtcggttggatcgatcgcaaccgacacgatgatacatcgagacacgaccatcagattaaacgaaaggattaattactgcaagtgctgaagctgttcttgcttgtgtgttttgcacgtcgactaactaacggcctctcacgccatcgcctactaagctagcgtgtatgcttccaacaactatatacttcgatccctctgtccttaaatatttgacgccgttaacttttttaaacatgtttaatcgttcgtcttatttaaaaattaaataattattaattttttttctatcatttattcaatgttaagtatacttttatgtatacatgcatacagttttatatattttacaaaagtttttcaataggacgaacgatcaattatgtttaaaaaagtcaacagcgtcaaatatttagagagtatttcatttgcaaccaaccaccggcgagtcggcgacgagtggaattatcatggccatgcaggacgacgacgacgacgaccagcacatgcacagcatgtctcgctggcgcgcggcgacggcggcggccgggagagaacgtgcgtggtgacccaaaccttgacgcgcagaacacaagctgtacactaccacttctctaattctttaagtacaaaccaacacgtagcaccacctacctaagctttagcttcctctcacattccactcctcacatatatatatataccacattgttgtcatggcacggctcctactccaatcaatcacaaccaacgaattagaatctaatcaccctgtcccattaaccaaattaacatcgatcgatcattagtacaaactaattaatcaatcaattagttagagatcaagttattagtgtccaagtatagcttaggaaggtaatgggaaagagagacacgccggcgaggtcctcctaagttaggaccttggaccgtccctcctccatcctcacggctataccaactttatcctcgccccctccccaccacccctctctcccctcccctctcaaacaccaccgccaccgccatggtcacgcccttcccctcctcctagcaccacctctccccttcccgcgctacgcgggacgaggaccagggatggctccccccaccgccgtctccgcctccaccgccggcctgatctggtccttgtcgccctcgctctcgctcgtcgtcaccacctcggtggcgcttctgctcgtgctcggcggtgtgtccgggatccgcgtcaacgtcatccggctcccgtcggcgtcgccgttcccggcgttccgggaggcgccggcgttcaggaatggcgacgggtgcccgccggcgagggggtcggcggcggcggagggggggcgggtggacgtggccatgacgctcgacgccaactacctgaggggcaccatggccgccgtgttctccatcctgcagcacacggcgtgcccggagagcgtcgcgttccacttcctcgccgcgcgctccgacccggacgccggcgacctcgccgccgccatccgcgccaccttcccctacctcggcgccgccgtcagcgtctaccgcttcgacccgtcgcgcgtccgcggccgcatctcccgctcggtgcgccgcgcgctcgaccagccgctcaactacgcgcgcgtctacctcgccgacacgctccccgccggcgtgcgccgcgtcctctacctcgactccgacgtcgtcgtcgtcgacgacgtgcggaagctctggtcggtggacctcgccgggcacgtggtggcggcgccggagtactgccacgccaacttcaccaagtacttcaccgacgcgttctggtcggacggcgagctcagcggcgccgcgttccgacgcggccgccgccggccgccgtgctacttcaacaccggcgtgatggtgatggacatggggcggtggcgcgacggcgggtacacgcggcgggtggaggagtggatggcggtgcagaagcggaggcggatctaccacctcggctcgctgccgccgttcctgctggtgctcgccggcgacatcaaggcggtggatcaccggtggaaccagcacgggctcggcggcgacaacgcggaggggaaatgccggagcctgcacccgggcccggtcagcctcctccattggagtggcaaggggaagccatggctgcgcctcgactcgcggaagccctgcgccgtcgactacctctgggcgccgtacgacctctacaaggccgccgtacccgcgctcgaggagtgagctagctagctagctcgccgccggcgagccgaggcggcggcgtgattgcattgcatgcattcgagggcagacatacgagagaagaggagagagggagagggagaggaggtgtgtacacgtacgtacgcacgtgcgtgcgtgcatgcatgcatgcatgtgtccatacgtgcaaaacacaaaaggggcaaaaaaaaaaaaagttgtgacgtcatgcaaaacggcacaaataagattaattaggactggaagtggtgaagaaatacatgccaagaggatcaatggaaggaaggcgctccgtctcgtagaaaaactaatcctaattacgaatctaaatacatatgtatctaggtttataactaggattgacttttttttacagagtagtacatatgtggatgcatgtgccgatctctttttctttcttcctcttgttttgggttccttgaaaaattttctaccgttgaatttgattcatcatggtgacgatgatgtacataggtgttttgattggagtacgatgtgtaaaaaattagggtggtgagatcagaagtgggtggtgcactttgcaaatgtgtatgtactatatgctttgatgttgatatatcatacaagaacacacacattcaggggggcaaacatcggtccatagctttattttccgttcatccatttgatcacataaattgatataaagagtaaaatacattatcggtccttaaagttgaaggtggtgtcacttcgatccatgatgttgtaaaatcaacattaaggtccatgaacttgtttaagtgaatcattgcggtccaaaacagaccaggttgaccgtcctatatggctgttcagcgtggccgcatatttgctattaggcccttccactttcgcactaccggtttggttggcagaacaatcggggtgcgacaaatatgggggcagcggtggggacaaggggcatgtaaatactatccatcctaggtcggatgcaacgctgatgactggtgagaaggcaggatccaacgccggcgcccgagtgcagctcggcatccatcactctggcgccaaaggagcgtaatggaggccgcgcccatctcttcagctcaacaacgcccaacgacttggtgggcaggcaagcggaatccgcggcatgaactcaccgcccatggccaagcctccaagcttgccgcttcccaatctgtcgtcaccgggaacaggagagaccctcgcggatcttggggccccacgccctctccggagccatccctccaccgtcgccggatagaggggcaccaccagggagaaccatgcttcatcgacggccagatccaccggtcacccttcccgctggtcgtcggcgctagatccaccacgtcactagatccgtgccacgacgctttgccgccagagtgatggatgccgagctccactcgggcgctggcgttggatccggccttctcactagtcatcagcgccgcatccgacctaggatggatagtattcacatgccccttgtccccaccgctgcccccatatttgtcgcaccccgattgttctgccaaccaaaccggtagtgcgaaagtggaagggcctaattaaaaatatgtggccacgctggatagccacatatgacagtcaacccagtcaaacatgttttggactgcaatgattcacttaaataagttcatggatcttaatattgattttacaagatcatggacctaagtgacacaacgctccaactttaaggaccaatggtgtactttactcattgaaatatatgttgaggcatgtgcatatcagcatgaacaaacaatgttgctcgcggcttttgcatctgacgggccggggctaggtgtggtggcaaaggaagtaagttcactttgactcccttcactagtggtcgaatataattcgtattccactatccctgaaccacaataccgaatattttgaccccttcctcccccaactattaaaaccgatgcaatttgactcccttaacggttttggagagcagtttcgctgatgtggcgcctacatggcagtgttcactttgtcttcatccaacgtggcattgacgtgacatttatatgacaatacaactaaaagaaatgtgggacccatttgtcatttacacaaaaatattatgggacccactgacatgtggggcccaaagtcatcctcttcttcccttcttcttcctccctctttctctcccttctctttctcttcccctttctctcccccttcaccgtccgcgggaggttgccgtgtagggagagcaggagcggcagcggcgaaaggggtcggagttcaaagtgaacttattccggtggcaaatgctcgcggtcccgcgtttcgtgggccacgacctaggcgcaggtgagccaaaatggctaattttgctctagaataagttcactttgactcccttaactagtggtcgaatcttattcatatccttaaaccacaatatcggatatttcgaccctccaaactattaaaaccggtgcaagttgactccctcggcggttttggagggcggtttcgttgacgtgacgtctacgtggcgatgttgactcggtcttcattccacgtggagttgacgtggcgcttatgtgtattagaattaaagacaatatgagcggaccccatttgtcattcacacaaataatgtgggacccacatttcatcctatttccttcattcttctccctctctctcccttatctcgctagatcggatcggcgggcggttcggcggcgggcgagcgctgtgacggcgacgtgtgggcaagggctgaagcggcggcggtttcggcccgcaaggccacatgtggcatttcccctctccttctcttcacgcgtcctcatacgatggtttccaccttcttcgatctggaagcgtggttcaaggaccacagtgccacaatgctcttcgagaaggcgcacgtgatgtccccgtcgagcttaaccaaaagtggcgcatcatacaaccatgcgatgaatgtcgcatgcgtggcagacaacaccttcatcatggacttagtgctgaattcgaaagaggattttttaccaatgtggatcaacggggtagcattttgaaattcatcattcagttgtagagatttggttcggtttcctcctattctcccgactctaattctataagctggatagagatacaggaggactaccaacctatatatgtgcacgcgctatctggcaatagattacttgtgtcgagtttaatccgctttacaatttggcatttccattatcaattaaatatagccatctaaaagaggatgagagatttttttctcatatgtcgaacgaagaggtgagggcaactatagtggaaccaagcgaggggtagtgaaggaatttggcatttccattatcaattaaatatagctatctaagagaggatgagagattttttttctcatatatcgagcgaagaggtgagggggcagctatagtggaaccaagcgaggggtagtgaaggcagtggtgcagcagaggctgttgctgccgcttagcatgatagtagttcagttgattttagtggaaatgttggtactgtcgaagataacgctcaatgacgggatgagcccgttcgttattattgtgtaccgcaacctgatcgccgctgccgctaccgtgccacttgtgttcatatttgagaggtactagattaatgacctatatctttcatttttaggtgttttcctttacatcttcatgtttataattttttttctatgttttttctgttacagggatatgtggaaaaagtgaactgggcaattgggggctggctttttataaactaggtgaaaccctgcgcgttgatgcagagtttagtatgataacaataagtaaaaataatatgtgtgatagctagacaacataagattatgtaagttaatgtggtttatgataatttaaatttaaatagtatatagaatgatgattcaaatgtaaaagtaaggtgatatgactttatgaaagaagaaaagtattgagatagtttgaaccgtagattaatcatctaaaggctaaaaataattgaggtgatatggattaatgagagaagagaaagagagatataatttggactatagattaatcatttaagcactaaaaacaattaatgtgatatggcttaatgagagaagagaaataacattaactaagtgatgatgaactatataggtacatagcatattataaaaaaaaatgaagatatatattaaaatataatgtgaattatgtggaattatgatttaacatgtttggattttaaatgctttaaaatttaataaattataaataacatgtttgcatgttgtttaaatttaatgattattagtggatgatgatgtggtatcttgttaatgaatgatgatgtggcatctttgcatgttaaactttagaaattagtgggttataactttatagtaagagaggatgctgtatttgggtgaggtctcccactctacctttagatttggacattttgtagccgtactactttttattccttagtgtcatgggcatggaccatgcttttattccgcatggaccatgcccatgtagcagtttgcatgtcagatcgatgttagtcataatgccaatatattttttttggtctattgagtatatctatattccatgactctagaagaacatagtaaaccacaggtaccaaagatctttaagataacatattctaatcagtggcgaagccaggatttgggtatagggggtgctggccaggagacgtaagaactcaccagcgcctcggtagataatatagcgtggatcttggtgtataaaattgaacttatttttagaatggaggatgtatgtccgaatatatgttaatatagaataaaaagaaccatttttaaagtcactaaatagcaccaactttactcaatacagaatgacacacgacatcatttctattcatcctttttaattttggagacttgcaaccacatcgcttagttacgttaatagacttgcaaccacatcgtttaattacgttaattaacttaggtaatcacgtaaagctaaaacctattggacagctaggtaggtataggctcaacttgcaacaaattaatgagctaattttatggattagatggctaatcatccgggggtggggtttgcagcgcatggggatgggggggtgccaggctcaccccggcaccccctgtggcttcgccactgattctaatcctaacaactataacgcaaggatccaaatcattttttttgacaaacaaagaaataatgtgaacatatgacagttcttgggcagtaaaagatagaaagtgctagagacttggtgtagtgaacactttactgaaaaggcttgaatttaaccaccacaatggaactaagaaattttacaacttcaaattgattcaagctttgtaataatggcatataaacaaggttgccctaatttaggtttattgtatactattaagtttgattacatggcctaagtactaaaagttactcagtaatctctaatttaggtttattgtatactattaagtttgattacttggcctcagtactaaaagttactcagtagtcaattcacaagcgtgttgacgtatttcaggcatatagcccacttactatagacaacttacatggaagggcggtagttagacctaagttatagctaagctacaaaataataaaaaagacacctcttggcaactctggtgcttatctttgtgataaactagtggtaagatagtatgccgttaaaaatctcagctttgcatcatgtacacagtatttcagctgatataactttcctgaaatacaaagcactcacaaattcaatatggcatacatgagaatttagagaatttaccatcaaattcatgtgcctcaactttttttaccacccaatccgcgtgccctctgtaatatatcattatgactgctaattcgtctattttgtaccactttctctatttttcatgtgttttttaattcttaattccatttgtactccctccgtcaaaaaaaacaacctaaacacatcctagtaccatgaatctggacatgtgacacatcatagtaccatgaatgtagtactagtatgtccagatttattgtcatatcgtagtacgatgttgagttttctcgacggagggagtatattttttacaggtttgtgggcatttttctctgggcccacctgtcagaaccaaaagagatatttctctttggatcgatcggatccctccaggcaggcgcaccaccccgccgccgagcgccgccgctgccactggactgtgctggccaccccagctcaccgcccccaccgccgagcgccggcccaccaccccgccgccgagtgccaccaccgccccaggtcaacgcccccacagccgaatggcaggtcaagttcctgagtcctgacgaacgaagagagagttgggaggccctggctgagaccaacaccaccagatttcaccagagttgggaggtcctgactgagagttgggcggagatgtccttcttcttccgggcggcgtcgcggccggcgcgcccgtcgccgcaggagctcgtccgctccatcaaggagtccctcctcgccctcgacaccaggaccggcgccaaggtactctccccgcatcctccctccctcgcgagcttctttccttagtccgcacatgcatgagatcttggttgattagtgctcgaggtgtcgcttgctttaaccgtagcttgtgtgttgagattgagtgtttatctgtctggaactctggatcttagtagatgttagtgcctgaggtcgttggtagtgcaagatgtgctttattttggtcggaattcgtcctacctacagtgtagcaaacccggaatgcaatgtaatccgtgttggtagaaccgtgggattagttttttgggtttaaatcttcaccgatactgacctttggatgctatggcctgtgctgagattgtgcttaccattggagtgctcatttttacccccaatttagtggcgacgaaggcgtcaatgttagggtgattcaagcttatctatgatggagtttggttgtacttcacaaggaaataggcaaaatagcgcaataaattgttggttcataatgtgaaacaagaataatgcctgataatttttcaaaataaatttgcttgagcaggtctaatgaagattcagggcatgtacttagctcaagtcactgatattgattcgggaaaaggggctcttgttttatttattcgctgcagggactaacttggtactacttgggatctttgagcaactggtttccgtgtatcacaaagagtttcaagagtcacattacttgtaaaatatgctttcttgttgagagattctttttaacagtgttgatataccagtatattgcatatggcacttgcatctggagcctactcataagcaatggcatatttgttcctttgttttactgttctagttgttttatgctcttctttatacacagaacacgattctacagtcccactggttatctcacgtagtatttgttttctaattaggctcttgaagatgttgagaaaaatgtatctactttgaggcagacactttctggcgatggagaagttgaaccaaatcaggaacaggttctacagatagcccttgaaatttgcaaggaggatgtcctttcgctctttgttcagaatatgccttccttgggttgggaggtatggtttcatcagttgaatttgatatccctttctgttcaagcttactcgacttattagttgagttctatattgcagggtagaaaggaccttgcccactgctggagcattttgttgaggcagaaggttgatgaagcctattgctgcgtgcagtatattgaaaatcattttgatcttctagatttccttgtagtttggtaaggcccatatgctcaagtttttttatggaaaacaatcaatatttagcacatgctaattcgtttattggtagtaatgcagatataacaccatccaaaaaaatgtctatttgctgcaacaaaaaattccttctttttcccctttcctcgtggtcccatcattcacgtcaatttattgccgtcagtcctcacctataactacaatattaattgtatttatttatgactatgtctactattatgtcattgaatattttcctggaagctgattgattctcttgcatcagctacaagaacttggaagttgcattgaactgtgggaatatgttgcgagaatgcataaaatatcctacacttgcaaagtaagtcttcataaattttgtttcctttgcataagtattagggatttaattgagccttgtttttgttgcctgctaacatacggtatccaatgggtatgccttgaagaaattctgtggttgtataaacagaaacagtgaatcaatttagcaatttgcataccatggcagttaccatactacttgctagttcccctcccctgttgattgcttactaaattgatatggttaatttacaagcattatgaagtaccctttactcctttcagttttacattctggaatgtatcaatgaacaacttgggtttgttatcagctatgagatcagttaactaaaccatgctagaaaatataccaataataccatttagttaataataaatcaattaattgtacatgcattgaatatttgattttgtagctctctttcagatatatattggagtcaagtagcttcgagttgtttttccagtatgttgaattatcgaactttgatattgcttctgatgctctgaacaccttcaaggtaaacccagttttattataacttggtattttatgcttcggttcttcaaaattgatgtttgttcttgacaagattcttgcaggatttgctcaccaaacatgaagccgcagtttctgagtttctgtgctcccattatgaacaggttagctggagtgttatcttttgtgaaatgtgtttatttatgatgtcctcacccttttccctgccttgttggcaccatcatttattcatttgtacatgacaatttttggaatcatgcaacttgtctatattgctatatcttttaatactgatagataccatgtgttcatttgcagttctttgagctctacacaagacttctaacttcaactaattatgttacaagaagacaatcagtgaaggttggactaatttggattaatatattcaatttattattgcgcatcaaaagaggaaatctaaaagtattgtgcttcatttcagtttctttcagagtttttgttagaggccccaaatgctcaaataatgaagcggtacattgtggaagtcagttatttaaatatcatgattggcctgctgaaggtatttgattagtagttatatgcttccttttttttacattcagaagtcactaatgtagtaattacccatttttgctttcacagcttttctttccttccttttttttttcttttttgacaattctggatattagtgctaccagtatgagaatcgagaaatcctgctttcttactgtattgtcaaccaaaggatttcctaggttagaattataaacctgtaactattcttaggtctaccagagcccctaggtccagagctaaatgggtttctatttgttgctaagttacatgtcatcatcatttgcagtttagctgataaagatcgaacacttgaatgccatattggtcataaagtggtaattggttgagcaaccacattgcttttccagtatatgaaaatagtacaactagtcaacactcctgaggagaacagggtttaaagttttgtgttgaggcaatagatccatggctagaacacagttaccgatgacttcctttgcttcatggtaatcagtttttcatggctctgcacatcctatctttatggctcaactaaagtgaagcttttgtaggatacaagcaaaaatatcaggatatgtgccttccacattttcaaggtaatttttatccttaatcttttgacctttgtattcggctagctataactaaccatctaatgccaaataaatcaataccagttgtcaattatcacataatcaccatttgaaattgcttgcttgacccttcagtggctataagttataacctccatggagttttgtatttcttctgatataactttccaacggaaatttcctttgttgctgatcctgtaaacatttcgttgaatagttcgaaatctattccatttggcacttgatgtggttattgttatagtgctatctcatctaatcaagtcgtttttgttcttgatcacatgttgtttgatttgtgaaattttctgttgaacttgatattgttagtccattgtaataggataagcacctctctttcaccattttttggggtttcactttcactgcatgtaagcaggtatttgttgccaatccaaacaagcctcgtgatattattcaagttttggtagacaatcacagagaactgttgaagctactaagcaatcttcccacaagcaaaggtagtttttactctcaacttccagcctgatgccagaaatggaatagagtaaccaagcattatgagttataattgcatctgggtgtttaaggaagatttcttgttaaattgttgagagatgcaagttgtggcactactaattgcgctccttttaataggtgaagacgagcaacttgaagaggagagagatttaatcatcaaggaaatcgagaagcttgtgcattcatcggtatagaccctcaagaaattcaaatccatccgttcaagtttcgctggtcaagaaatgtgatccctttcttcccttcttgtttttaagacctgtgtaatgtgatccctgtatagagggtgtttatcatagggaaatagtttgaccaagaagtatgttggtcacaagaacactttaccattgctgtgtgcatttccattgtgaaaatttttggaacaactggtgggcacatgttcgaattatgaatgacagctgatgtcaaacatatctttgttcataattgaaatgaaatatttcgagatctgtgacagcagctatcgaattatgaacggcagctgatgccagacatatctcctattcagaaactgaaacgaaatattccaagatctgtaacaacagctatcggttgaaacttgttacgtatgggtatgcttctatacatattattttttcagttgacatttgacaacattatatatatgtggtatatatatgtatatatgataatttacagaaggaattaattgaatccgattaacatggagggtgttcttgagtagtgtgctaagctgcggctgacgtcagcggccggaagatcaccggcgcgccgaactgcgggctgagtatcatgagcaccctgggcgcgtgcacgtacgccggcgatagccggaactcgaagcgccgcaggacgacggcgagcgccaccttggcctccatgagcgccatgttctggccgatgcacacccgcgcgccgccgccgaacggcatgaacgccatcgggtggcggcgccggccgccgtcgtcgtcggcggcgaacctcgccgggttgaactccgcggcgtcgtcgccccacgccgccgcgtcgtggtggacggccatgatcgggatcatcacctccgtccccgccggcaccacgcacccgcccagctccacgtcctccttcgccgtccgtatcatcgccaccgccggcgggtacagcctcagcgtctcgttcaagatcatcccgagctgcaaggagaagacgacgaccaagaattcatggatcgttgcaatgtaatccctctctcgttttgatttttaatccaattattttaaagtttgactaagcttatagaaaaatatatcaatattttcaacataaaaccaacatatcatcaaaatatatttaatgttacgtttaatgaaactaatttagtgacataagtatttctaaattttgtatataaactcaatcaaacttaaataagtttgactagaaaaaataatcaaaacaccttactccttacgttccattttataagtcgtttgacatttttttctacacaaatttctttgaatttgatcaagtttatagaaaagtatagtaatattttcaatacaaaataaacatattatcaaaatatatgtgatgttatatttaatgaaactaatttaatattttaaatgttattaaatttttctataattttaattaaacttaataaagtttgactaaaaaaatcaaataatttataatatgaaacggatggagtatatctgaacattcgacatcgtgtgacgcaagaattacatacggttttgagcttggggaggtggtccttggtggggaggtcgccacggccgcagacggcgacgacctcgcggcgggcacgttcctgccactccgggtgcatggcgagcgcgacggtggtccaggtgaggaggttggacagcgtctccttcccggcgaagaagaagttcttgctctcctcgatgatctcgcccgccgtcatcgccggcgccatgaagctcatgaactccctcatgccgccgccgccatcgccgccatcatcggcgtcgtcgccatggctgctgctgcagctctgcaggccggtgacgaacttggcgaggtggctcctgatctccctgtcgagctgccacacgcggcggttcttcctcgtggggaggaacctgtacccggggatgtacaccttgctgtgcgcctcggtggcgtagccggcgagctcgtcctggagccggaacacggcggcgccgtcgtcgtagttccggcggccgaacgcggcgaacgtgatggcctcctgcggcacgcgctggaaccactcggcgacgtcgacctccgcctcgccggcgccgccggcgcgcgcgcgctccgccagctcgtcgagcatgcgggtgacggtgccggcgacgaacggcgcgatcatcctgaggttctcggtgtggaacgccggcgtgagcacccggcggcggcgcgcccaccgctcgccgtggaggttgctgaggccgtagccctcgaactggcagatcatcgggtgcgcctcgtaccggtcgaagtgatccgcccgcgtcaggagcacctcccggatcagctccggctcgctcaccaccaacctcggcgtccgcccaaaccaaatcaaatgcatcggacctgttggtaaatttcaaattattcaaaaatttaccaccaagagataatcagaaattttcttgagcctcgacgaagcaaatgttatatctagctagcctgctatccaccggctttatcaaatgttagtaataaagtggggtcggaacactttttaggctcctttgaaacataggaattttacaagaatacgttcgattctaaggaaaattctcgtaaaatccattcattccaaaggggtccttcctattgtcattttgccatatcagctcagtggcagtggaaataaataagggtgcatttggacttgattttccgaccgtccgatgagaattggacggtagagattgacactggaaagaaactatatgtgcatgtgtatgtaggtggtcaactttgacagattcaaagaacacgcagccagcatcaatgtgatgctcatgatctattgagttgtaaacaaattgccaaaacaaaccgtcactggaactgacagacgacgattaacttcatcatttcttaactgaccgaccgatcaacaataagattcctcacttggattaaacgcgggtgcatgcctgtaggtagctaacttcgagcatattatactccacaaaccgttgaaaaagagggaattatcatcggctgccgtgacaattaatgagataaactaatcggagcatagcagaaagcaaaccagatcatgaactgaaatgctctggcaatgtgcaggagatgctagctgctgttgatatagtcatatgcaagtatgcatcagctgcaaggaggactcattgctaagcaagcctgcatgtgggtagtgtgtcctctgaaattctgaactgccggatggatctgcatggatgtgagctaagccaagctaaggtaagctagctaattaagctcttgtttatttaattaattactcactcacatgatcattaacctacattgacagcctgttggaaagatccatggatggatggatgaatcatgcattgtgatcagtgatgacaacatcaccaagtttgacttgggaggctggctagctatacttccttcgcttctgaatataagcatttgaaggttgtttagtggattaagagggcaaaatccttcttagtcacttcattgatcaaattttgaattacttggattcccctcctaagcactcgatctcaatgggctgaaaatgattgaattacgtccgtgtcccaaaattatttgtattatatacaacatttgaattcttgaaatttttatatttgatattacggagagagaatagctagctgcagcattttttttttttggttatcaaagagcaagtagtagtggagaggaggcatgcagtgctagtacacctagctagtactactagctactacccacacccagcaaaagtgaaatatgaaacgaaatgaagctctcatctccacctaatcaaccataatttaaccttttgcatccttgtttctacttgcaaaagcatggaaccttgtccccttcctaattccctccgcgttcacgcgtgatagcctacgcgtatactcatatatatactactccctccgtttcaaaatgtttgacatcgttgactttagcacatgtttgaccgttcgtcttattaaaaaaattaagtaattattaattcttttcctatcatttgattcattgttaaatatatttctatgtagacatataatttttcatatttcacaaaagtttttgaataagacgaacggttaaatatgtgctaaaaagtcaacggtgtcaaacattttgaaacggagggagtctatatataagtatacatatccatcaaatgccccaagttggttaatttcttcttattttttcgtgtgaaagtgttgccaatttcatatgtaaaaatatgattcgtgtgaaaatcgaaacaaaaatgagaaacaaaatcaccaatttgaaatttcaaagttatagtaagtatgcatgcacatcgatcaataagagtgaaattaaattggagagtggaactagagagagaaattttttttgaatgaaatggagattaattaattagagggtgatcgatcgaggtggtgttgattgattaccgtagagcttcctccaatggtggtagaaggggaggacgcgggggaggatgtcgtgggaggtgggtggctccatggggcgggaggcggcgtccaccatgaggcggacgagctcgatcgagctccccacgaagaaccggtaccccggcccccgcaccccctgcgccgcgaagtgccgctccacccgccgcggccgccaccacagcgcctccgccgccctcgccgccgccgcgtacaccgccacccacgccgccgccgccgccacggccacggccgccgcgccgctccagctccacgtccacgcccacgacgaccacatggcgcgctagctacggcggcgcgcgctcctcctccctgctgctgttgttgatgatgatgatgctgctgctacggcggcggcggcggcggcggcgaggcggcatatgtgtagacgcgtcgtgccgtttcctgcaggtttatatatacgtgctagctgcggttgggagggagagaatttgagagggatttgatgattgaaatttaatttttgatgctgttgatgacgtcataaacgtgtgtggttatacttccaggtatgcatggtttgatgcagaaggaactgatcatatataactcttggattagctggtgcatggaaattgccattgagtttgttattattccattcattttataattattttatattataagtcgttttaatttttttcaaacttatttaagtttgatcaaatttataaaaaaaattaacaacatctgcaatccgaaatgaatttcattcaaattaaccgttcatataatatgttcattttgtgtaaaaaaatattgttaaatttttaaaccagtaaaaaatcaaaacgatttgtagtatgagacggagggagtatttattatattggtttactgtgattgtcgaactgtgattgtcgaactaactgaggtcaatgcttaatgcttccttattaccagtgctactacactttaaagaaattcttacgaaaacttttacaaacaaaaagtctcaacagtttggtttagctagttataggaaatctagatttttgttcacgtacatgccacatcagctggttataaaagttttgtcaaagaaatgtatgtgttgatttttccttcttcctaagaggtagaagggtttctactgcatcagtaacaagtgtactagttacccagtagcattactgcttgtgtcaacacaaaccatatattgatggatgtatggacattttgaaagacctgtacatcaaaaggatcaaatgaatacaattgcacatcgttttgtaatctttaaaaaaaaacaaacatgtttttataccatcgatcatgggaactcggtatagactttaaaaagctatgttccatatcaaagagaatgtgtactgtctcatcccaagataaatttattttcaccccctgccacatataccaatacaaaacttaaaaagacaataataaaatcagcccacccgagtttaaatcttagatttgatacgagtgcttgtatttatggctaattattctttcagtgctaggcaacgtacccgtcgacagcgaggtgcccatgattcgtcaatctcaatctcaagatatacaaatccagttttccccggaggtgctcatacagataagtcgtgcgtatttgtgtttatagaagtgggtatgcgcgcatcatgtacacatgcatttgtactatgtttccaaaaaaatcacaatgcaattatttttctctttatttatttctaatgtaattatttcgtatttttacaaattctgatgtaattgcttaaaaacaaaactattttgggataaacggaaagggaaaaatgatcaaacggagtgagtataatttaatagcaaaccgccactttcatccttcgaaacaatgtgatatgtttcgttcaaacagtacacgcatatgcgagttcggtggtgtgaccgagtttaacaacaaaaacacggagcacgacatggtacactcccaaaaaacatccccaaactattaactgcaaataataaatccccaaagtacaaaaacatggtcgacagacacttcataacccccctctcacaatccttccaaagtaaactagattaaggagcctatcacctccaaaaccaaaacgaaactaactttttattttttgttaatgcattttggggttgtggaggggtggcgcaagttgacgagggtggtgctagctacgcatttgtttcttgttctcttgctgtccccccggaaaagcatggcgagaggttgcagcggtcgggctcctgtcgcacccaagtgcgtacagtctgttcctcacaacctgtccctcctattcttttttttcttgtgtgttaactactgcgatctaaaataagttcattttcacccatctcgtacatatcaatgcagaactaaaa

SEQ ID NO: 19468 - DNA, 1361 bp, Oryza sativa
caatctgatgacagtgaaaaaaaaaaaagagccattctgaaggggaacatgcccagctacctccctaacaaaagtgtagagaaaagagtgcctatttcctctgctgataaataaactaccatcatgtatataggtgcctggagatcttgttagacattgttagacaggaggaatacaggatggtagggcaaaagaattattgagaccactgtgcataacaaaagccactgttcagcttggtatgtgcttgccaagagatttttacaatgtaattcttccacatacacgccagtatgctccagggtgaaaaagggatctttcaaacacccatatatctttcacaagcacctataagaatatttgcacacgccaaaacatcatgagtcaccatgttgaaacaattgattaggctgtcataaggtgtgaaactacaactgcttttgaatgatataaacaactgcttcttataatgtaacgagttactgatggtctagtctctccatttatttgctctacagtttcgtaatcttttcataacatgtaagatagatatacatccccatgatggatcatgcagaggaatacacaagattaaaattctatgttgtctccctgtgctcttttgtggaatttacagaacaataagaatccctgatgctcaatcactagagtccagacaataatcagctgttaaatttccagcatattgtcgcaaactagatactaacagattatttccaatgtatcattgtgaactaatatttgaagtcagttatatgcttggtgttttttttaaaaaaaaaaaagcctgaacaaaactagtcccacttgtttcattgtttgaacattagaacttcagatagtcacccatattttacttacctcttttgacttatctccagacacgacctcaccttttgtattataggcttcaaatttctacagaaatacaattaagaaactgtcatgcgatgaacatacagtactgcacaagacaataggatgcagtgctcctcagaaccactaaaccatctattcatgatcattgcacaaaataataggaaacagagaccaaccaaatacagggaataacttagtcaaggcattaaaactatctttgaaaagtagacattttgaagtttatacttcaggtgcttatgagcaatgcatattctgaacatctccaaattgtgtagacatgaaagctctaaagaaaactaagaggggcatgcccacctaatggtgcaagcagtcagaggatgaatacgagcacatgtggggactttcaagaggtagcttaatgctatccaacttaaacataatacttggtacagtattagataatagagggctgcaggaat

SEQ ID NO: 19469 - DNA, 8998 bp, Oryza sativa
aataaatagcatgcctccaaaagtttgtctaacatccactcacagtaaggtgaaaacttaccgaatgcattctctctgtcaatattttacggagagatgatgtgtctccatgtgccatcagtgtgttaacctgaatgagaaagaagggtctcattgtttgccctatggcttataagccgttgccaaattttgaattttaaaacttgtttttgaagttgattttgatgctttttcaacatttgcttttaagccacaaataacacatatataaaaggtttacccataaatctttttttaatcactaatcagccgtgagtaaccgatggggaaaatatgtagtagttggcacttaaatttgcatttgacatatagacagtattctttataaggagaacacaatcaaaattctatgttacatacaaattgcaaggtcgcactacaagtcatgtatgctatgcactgaagaactcggagatcaattcaagccagaagataactcaggaaaagaaaaaaagaatgctgctcagtgactattgctatttctcaagaaaaggaaaagaggtagaaaattcaccagcctgttactactccctctgtccagaaatataagggagtctagagtttgaaatttgtccataatataaggacatccccacctacttacttataccaaccaatcaaagctatccctcacctcaacttaatctctccaaaaaaaaaaactccagatgtgcttatattctttgatggagggagtatgtcaacctttagtagcaacaaagtggcataaccataaagatcgcaaatcagtaatttggaccatttatctactgaacacttatgaaaactatactagttattggtctaggcctgtgcctaggaaacacgattgtcaagagaggtatgccaaaccttcactggtaacagtatacctgataacaccattaaaaatgatattatcttgtaataatattgaacactacaaaattctacaattaaaatcaccaaacgaatataggtactgagaaaacattaaataaatcagtcggtactaggtacagctcttatcttccattatcagatcatgatatctgcatggaaacctgaaacctatgtaagtgtaatcaaaatgcttagattattctacttgtatatttggtttcctaagagataaaggaaatgtacctccttgtatatcttgaatgcttgatcatagaattcctttttggtatagcctgttttctttctcaatcttgacacagcatatgcattcttcatctgtcagtataacaaccaactaatcagctcacaattcgtgaaaataaaaatatcacaaaggaaaattgcagggtatctcagatcaaatacattaaggtattgcagcggtagcaaataaattccaaaagttatcgttgaatgttgataggatagaaagtaagaaaataaataatgcaaataaaagacagtactccaaaatgtgtactcatatatgcagcattgcactgttataacatggcaactcaagaacagcaataataaagaaactctgttgccaagcatcatgaacctaaataaaaaggaaaacataaaaaaaactacagtaggtttctgttaaatatctcagtttgtgtcatttcatgtaaacaatcattgttctagctggtaaataatcatgtacaaccaggtatgaccagattggttgtgtcaatggtggcacacaggtgcctatggataaggatcgaaaaaaagtaatgtgtgatcaaggaaaaagagggaggccttttaaatttctaatctagaattcaattgactaatcaaagaagtagtcacaggttgtaagaaggaaataagagatgaaaagcagttttctagacaaaagagtcagtacctccagaataacgtcctcctttgttcttctccagccacttggtgtaaaccatctaattcacaataagccaaggttatgatgatgaagaccttttatcatgcgataggacagttttatttaaaggatatttattcctctagcacacatataagttttgatatcaatgcgccacttaacagtatttaacttttgtaggatcagatagagagaatcagcataaccaaacatgagaaataaaatgcttgaaatgtctctgcatcattcagctcatctaagtttgtttagccaaggcagcagatattagggtagcagacggtgaaagcatatctcatgattttgcattctcaaggggctccatcacttatttattagttagttagctccacacttaagtgtgctcttggtgaacttagttttctgtcttaactgaaaatatatgattttccccatccattttcagaaactaaaatggcaatgccacagccgtgctgtaggaaaaaaaatacagtaaggaagaaagaaaaaggttacacttctcagtagtaagtttatcgtccatgaaggggaatggcaaaaacactgcactgaactgtaatgttcattcccaagtgctgcactctggaatagcatgtcatttgtaccttttagtgttgagcttaaagctactcactctaacaattctgtcctggaaactagcagatgggtcagtgtttggaaagggaagagaactgattaccatgtacagattgatttacgtacgtattgattcacgtgacaaagcataaaggtcaaaatatagaatgtaatttcaccttttccagaaggggattggttcccgaatgctgtatggctcatatacaaaaccagggctcatcatgacaaccttcataccgacctatacagagaaaaaaaaacaagataaaaagaacacaacttcaacaattatatgaaatcccttaagctaaccaaatcacaccagaaaaccagattcgtcctcgcaccttgcgggcaccaagtggcaccttcgatgatgtttgcgacggtgtcggtgccttcgataatgatggcggctctgcctgtgctgctgtcgacattgatcttgtatgatttatttggaatagtagctccagaacctgcagcacatgcaaatttacagcacaaaatcacataacaccttattggcagcaaattgtacatcatccccaactcgataatgactcaaaccttcacagtatagacaggcgaccgccccctgtaaccaatcacgccaccggcattgtacggcgagcttgcaaaacctaatggcacgaaaaatgattgaaatggagcccaaattaaaccgggaaagaaaaacaagcgctgggttgctcacctcttgcgcgtgtattcgcgtggatcagcgcgaacgagtgggcaaccgaggcatggtgatccctgaaacggaaacagcaaagaggaagtaagagaatatccgattcgagccgcggggaacgagatctattccgaagtgggagcattacgtaagcggcggcggaggaggatggaggaggtggagagggcggcggaggcgtccggtgacagcgtgcccgaggcgagccagagccatcgccggcggatcgtctcggcgccggcgacgacgggagaagaagcggcgcgccggcgtggaagtggaactaaccaaggcggcggcggcggcggcggcgacgagggttttagggagagactcaatccaagccgttgatagaaaaggagcggctgttcttgctttgatcttctcctccgagttcttttgttagagggcctgttaatctatttagaatggcaaatggtaaaatttttggtggtaaaagatttggtatagagttggtgcttagatgtatcattttatcattttagcactagagagagcgcatggtccccaaacactttttggcaaaaattactaccctagactagcaaataacaaatactaaattaaaaacttttgctactagtgtttagatccaaaatagcaaaacttttactattttagaggatctaaacagacccatagttgccaagagcttcgtcggagcctaataaaccaaactaaaagtcgaaatttgattttttgcaaataaaaaacttaaaaaaatttacgttgtttttgcttggatcttcacctcggagttctaacaatgttagagttgcctattcaacttcctcgatttcgagaaaattaccataatcggagttaggtttcgtcaatatgctatcctgaaattaggattcactataataccactctcaaattgtgacagtatgttagaatgtattttctctcatttcttccaaattaaatgaactctaccctgatttccttggtgagctgaccaagatacccttgctcaatcccgtgttgtctcaccgctgccacgagtcatggctggtgctatggtgcataactgcatccgtgtccatcgccggcagttgcgctaattccattcgaaaattacatcacctgacacacctagcatcattacatcagcgctctcaacacaacatctatagaacaaaaaaacacaatcaaattgattagcttgttcatgtgactgcgacaaagatgtttcggtggctggtgggacagtggcagtgccaggaatggaccagcgagcctacctctacactcatgctcaccgccgctgttcctcctcatgtttgtgtacgcatcattgctgattcgtcgtcgaccaccgaatgaaccagcatgacctcagcggggaaaagcaccacgacctgcacgtcgccctgcttcattgcatctaatgacgacgacgatgccgcagccacaagcaccacctaacgctagcatggtggtgcagcccgttgtcctcctatgtagatctaacgagcgtatggagttggggatggccatggctgccctactgcgtcatccctagcttgtcgaggtggaccagctgacaacgacagggcgtaccagtggtaaggtcgacgacaacggtcgtaggagagcgccacaaaggaggctgcggctttggcagcacgccggtcgatgagatcgttagtgacaattatgtaactttggcatgagaaaaagaacatacggaactaagggcattttagtcccttcaatgtgtagaaagtgcaaaaaaataagtaaatgagagaaaatgtactctagcatattgtcattatttgagagtggtgttatagcgaatcccaatttaaaaatagcaatttagcggagcccatctccgagaatggcataatgtcaattttctcatataacttgtttgaattacgttagatacaaaatcgcacgtgcggttacaaggcaaggaatccattcccaagccgaccgatgcaagcgtgtgcaactcaatcaatccaaaacacgtcccttgtcattcttcctcgcaccgcaacacaagcccaccaacaccaagcaaaccaacgcaccaccttcccctcctcctcctcctccgatccgatccgatccaaatcgccatggatttcttcaagtccatcctcgccgagcccgagcccggcccgtcctccccgccgccgccgccggagacggagacggagcaggagcacgccggatccacgtcgaccccacccactgacgacgacgtcggcggcggcgggggtgggggtgggggcgggggatggggcttcggcgggctgctcaagacgctcacctcccagtcggagaccgtgctcgaggcctaccgccgcgacctcgccgagttcggcaccggcctgcgccgcgagaccgaggcgctccgcgacgccgcggcccgcgccgcgcgggacctcccggcgcacgcccacgcgctcgacggcctcgccgacatcgtcgcgcagggcaaggacgccatcgcgcaggtcgccgccgccgccgccgcagcccccgccaccgggcactcggacggcggcggcggcgaatccgagcccagctccgcctcggggcaggtccggtacagccgcttcgaagcgcagctccgcgcgctccagtcggatccggccacgttcacctccgatcctgaggactccgatgacttcgcggcgtggagggtagggtttagcgtggatgagaggagtggggagatcgaggcgttgtgctacgagagcgatgcgttggaagggatggtggagaagctcgtgccgggcacggtggagagcgaggtgttctgggcgaggtacttctaccgtgttcataggttgaagcagcaggaggatgctagagcaaagctcgtgaagcgggttttcgcggcggaggaggacgaggaggatttgagctgggaggtggatgatgaggatgaggaagaacaacaaagagcggaagcgaatgaggaaggatcaaagcaagaaccgatcgaagaagatgtcgaacgtgtagcgggggataaggaaagcgagaggattgtggaagaaaaggaagttgaggcagtggaagaatcacgcggtttggagaaggaacagcagaatgccgatgcaccgcaaccggaggttttcggcagctctatggtggtggtggacaagagggagaaggaagaggcatccgtttcgaacattgaagaatcaagtgacaagaaagctgtcactgaagaaccacgttcaagcacaggagatgatgcggtgaaagacggagcaaagcatgagacaagcgactcaagcaaggatagtgactactccatggtgtctaggcagcgaacaacgaccgaggaagaggatcttgagtgggatgagattgaggatcttggggagcatgaagagaagagagggagcaataatgactcaagctctgctttaaaggaggaattgcggaagaggctcagtgttgctgaagatgatgaggatttgagctgggatatcgaggatgattgatgatgataaggctgaaaaaacaacgtgccaacctggtatgaagtgttgattgtatctctatacttttttgccaattacttgtgcaagatactgaaatgtggccaataaaattggtttagctgtgctgattatgttatggatacgtttgtaaactaaacttggtgttatcaaatggcaattggctatgcgtcaattcgttgatgtctttatatcactgtaaatatttttgttttatttgactatgtgttgttcagttaaaatacgtaggctgcactagaatttggaatagcatttggacgatttgttcccacacaacctttgaatcaggacatactgaataaagttatgactgcaaaatcgacatcacccctcagtgatgtaggtttcattcattagtgatcaagctctcaccaagattccaatagtagcagatagtggacataggatacaaggctgatatttatagtccattttttactcttttggatatgtgcattttgccatttctgcacatggggacgctggtgccagtgggcaccaaaaacacatttgttctgaattctgtgttcttgcttctttcacaacttagactggtacaatgcgaccattatatgtaaattgtaagttttacagttctctatgtaagatatttctatatcaattttacttgctagttgtatgatacactaaaaaactatatcaagtagagaatagtcatctgttactgctattacgttttccaacagttgtccattattcagtgccttgtaacagggtaatattcattcagcacatgccttatacatgtcatggcaaaacgctgatgaagcttatgcatcatactagcatataaagcagtatgagttctttctgtattgaatttggaatgtagggaagcaaaatgtacagaaatttgcctgtcattcctgtatgatacaatatcggcatatggctgtttccagacccaagatgtatgtaactacagagcaaacaaaatttcaattaccatggtttttaccaacaaaatggcttagctccagttattgtgcctgtttgcctagctccggtttgggtatcaacagcagcctttttctttagaactttttctcttttttttttggagaactttcatttgggaagatgctggtacagctatgctgcccttctgattcgctgaatttctgtcaacctcaaatcttctgaatcctaacctgcttaattcataatctgttcattgttcaagctgcctcacaagttataatggtcttgtttggggggagctttttctaaaatctccagttccctaaacagttcaaatcttctcacctagattcttatattctaagaatctgtagttatataatctaggacatgaattagaaaccagaagccgagaaacatagtttttttttatactactcagaattttaaaactctcccaaacaaaaccaatatatgatcatgtggcagcaagcagctgcacactttatcctgggtcgaacaaggcaagagcaatatcctgggccaaaatttacccaatataacggcccatttacgacattcccagcccagtccggcccgcccgagagcgtccacaaaagccgctgccgggtcgcctccttcccttcctcctccgtcaggtcaaccatctcttcgcagatccacctgctccgccgccgccgccgccgccggcctcctccgacccgcgcgtctcagccgtcgaggtacgcgtcgtcccctcctctccctctgcgcgcctctctcggttgttctcggaatccgtggctcgggtagatgggatggaaggattcgtgtcccttggtggccatgttgacttggggggagggattcgtccgtatcgcgctcgattgttcgcgggattcgtggctcggtggatgggaggattcatgccgtgttgcgacgttgggcgagggattcgtccttatggctaggatccagctgatgcgggatgcgcccaagtttcgtgtcttgacgtgaactctttgctcggccgcgctttagggatgatatggtatgcttggtgtctaggtgatttccgttgtttgattaaaatttgctagatgtggggttttatatggcttggtatatcttggaatttggtatccctgagtgaattcacatgcatttcatggtttattgggtctgcttcggtgtgatgaatacatgcttaattgaacatgaaatagcgctctcattgat

SEQ ID NO: 19470 - DNA, 11734 bp, Oryza sativa
cagatcagtacgggagtttaaatccaattatgatgtttatggctagcaaattcaatagttcaatgattatataaaattgttcatggagattaatattctctctgaggaagtgaggatttgcttgagtgaaattattgtgttgatatgatcaagttgtcttagctccttgtgtcataatgcaggatgacagaggcaccatttgtgccacgtgagaagctgtttaagcaacagcaatattttcagaatttaaccaagcacacctacctgaaggggcgttacgatgtgatcacatctgttgccattccccttgcgctggctggcaccagcttgttcatgattgtaagttgaaagtttcaatttgttgcctatgctactctgttcttgttcctgtagtcttgttcagtcaataacttatttgctgttttataaacagggccgtggagtttacaacatgtcccacggtattgggaaaaaagagtaggcggttcagtatctcaacttggcatggaagtggtaccatccaggctacattgtctttggttgcaaaataatactgtcaatctgagcacattttggttcgctttgttgttatttgtttatatctgatgtcagcaaattgatgctaacttatcagaaatgtgagaacattggcatcgttgcatttccccatttaattgcatgttcctgctttgtgttttcttttgattggtgatggctacatgtactcgttgcttcactatggtgacatggtgttttctgatttcaccattcgcatggcgtacaaatggtgagaactgagaagccttaagatcctgaatggttgcgagtattatttttgcgataccatgatggttgtgagagttggcatcttgctgagattttcttgcgtggagatatactttgacacaccgtagcaataaactcctgacgcgtatgttccaatctggttggtttcttgggcatcttaatttcggttcggatgttattggttagttcgctaacaaacgaaacgatgcggcttggtttccgaagttaaatcttgcaacgcgaaacatctcagaatgtagaacggtttgacatgcattttggtgggttagtgatttgtactcattacgggtaggccatactagcttaaagggcatgttattgatacggaatgcacatgagcggaacgaaaggaatgagccaacgaggaatcatgttcccaggaatatttgcatcattaaaaatgagaaccctaaacacccgttaatagcccgcagaataaaagatttcgttagccaaatgtagatggataagtccaattaacaacgctaaactatactccctccgtcccataatataagagattttgagtttttacttgcaacgtttgattactcgtcttattcatttttttttttgcaaatataaaaaacgaaaagttgtgcttaaagtactgtagataatacataatttcaaaaaaattgaataagagagtgatcaaacgttgtaaacaaaaactgaaaatcccttatattatgggacggagggagtactgaattcccttatattatgggacggagggagtacttaattagtatttgaagatcttcactttctccaatattgcttcagctagggataaaaatggttcggatagtttccgttcgtccggaccatttttcggattcggataatttcggtcggaactatccgaaaattctcggattcggaaacgaattcgaatttttttctcggaaacgaaaatgaatacagtaagggtactatccgtcggaatcggaaaacggtcggaaactatctggaatttttgcatacattgataaaattttagaaaaaacacgtatatatacataactttttcatacggaatcagatgaagataaactttatatcaacattgtagagctcgatgagatctacaactttcttattgactattttattatttgagatcatttaagggtctaaatatttattataatataccatattaatttttataaaatctcagatctacaattcaaacgacatctgatggagatgtgttctatatcaaagttgtagagctcaacgggatctaccactttgtagtttataacatttgtatttgaaagcatttaaagcataaaacaaatattgcaagtttcgaagatgtgaagtaaaataaataacatctccaatttatacaatggcaagtaagttatacatctagtaaaaggtcttgagaatagaaaatgataatcatatttgcatatggatctcttagaggaacaaccatgaaaatcgattttcacatacggttgtgagacagtctacaaaattgacgatataaatgttagagatgttgaactaaaataataagtgatatctcttccttgatcaagaaactcaatttgaggggttttttatataccggtaaatattcgctaccgtattcgttccgtctcgtattcgctccgtatctgtattcgataatattcgatttcatttccgtatccgagttttcgattccgattccgaaaaaaatatgaaaacgaatatgttaaagctagtttccgtccgtttccgatccgtttcaatccctagcttcagctaataccggagagattgcccacctggaacaaaaagagaaggtgaaatgcgacactggattagcatcattttgacaaagaaaaatactgcagctcaactcaaaacaaataactgaaactacaaattatcaagggacagtatttccgtattatgctagatatcactctaggggcaagaaatgccaaaaggagcaagagtttaatctaaaattctcaaagacaagatcatagtcaagttatcgatgaaaaacagtcaactttattagtaattggtaatggggacatggtggttctgatctctatttatatgctttaattaccctcaattactaacttagcaagtactcatgggtggctagcagcctaacatgctagtgcacatatactatttaagactaagtatagcatgaaaatcttaagataagttatccaagagtagtgaagtagaaaggttagtatttgcatcaaatgctttcctttactgtcccaccccctcatcattcttagaatgaagtgagctgcaatcatgaaatttatgagggatttgtggatcgcgtaacataccgttgagcatttggactatgtagtccctcttatagatttctgggagtgctaaaaacatctccatttggtttggttcctttgcgaaaatacttgctgcgaagaccacctcgcttccagtaaggccaagcttttgaatttcagctatagctgtcactttggccttttgttggggttcctcgcacatcttcttctcttgtgtatgatcggtaccacattccatcactgctgctaccatgcttccatggtgagtgatattctgaaaacgatcatgtgcgtctttgaaccgttcgatggctgatgctgcgctgctgacactctgcacagcaccctggaagtgatcatgtgcatccctgaacatctccattgccgtggccatcgcattggcatgctgaacaacattttggaagtgattgtgcacatccttgaacaactccattgctgtcaccatggtgctgacatgttgaatggaactctgaaagtggctatgcacatccttaagcatccttggagaaggaaagtttgattcagtcctactccttttcgtgccattactatgtttcttttgcctcttacagcttgatgccacatccaaggagcgaccagatggccctgcggattccctatccttgtccccatcctcatctccgacctcgtctgtgttttcattctccatgtcagcaaccacttcatcggacaattcctcctcctctctgcctgttctgtccttgccatatattacatcaaatgtatcaaaatatggaaatgggataccatacaaactcttggctctaggatgatcctgcagaaaataaacaagtcgtaacaaaaacacattatgataaaaacaaatgtacaaaaatacttagaatggcttactttgcaatgagcatcatataactctttttcacactgaatcatcttccgcatgccgtcccacgagaacctgggcaacgctaacatatctttgatcgcataatacttcctcttcagcacttttaaccgagaatcgacatgaggactggatctaataccacggcctggcagcctttgcgcaagaatgttctctatcccttgagaataacagttcttgaatccccctccttcgaccttaaatctaggatcaagagaaacctcgcacaatgctttgacaagctcctcatcttcatcggctgtccatttccttttgttcctgcctctgccacgcacaactttggagcactgagtttgactcatccctagaacaaaatcataatcagcttagggtgcatataaaaaggagttgcttattaacatataataattaatattatctgaaaagaattgaaaaatagattaacatgattttttttaataaacacattatttagtagttcgggaagtttgcgcgcgaaaaacaagcgaacagaggttggtaactttgaacattagaacacagccttacatgtacagaacagttcatacaagctagggttttacaacaacgtagtatatcactccattatccatgtccataggaggagttcgacggctagccgatgagagaagaagtcatcgaggcggcggcagtactggaggcgtgttcgtcggagagggcgaggcgaacggcgggggagatgtcaaagccagccgctgcggccatcggcgaggggagaggaggaggaggaggaagggaataatacctcacgtcacgagaggcagcggcggcggcggcggcggccggagagaggcggctccgggacggacggcgggagcaaaagcggcggaggggagatgggattgggatttgggaatggtaggaaccggattagggatttagggttgctggttggtgtgggtgtaggagtgggactgggactgggatgggagggaggcaggccggtaattggattcctcatctcgttgggctttgtcgcttggacatctgtgatccaataccactggattcgggttagggtctttaggactaggatttcctaagcattttccatcagaagggaaacgatgggcacatcccggtaatcactatcgagataatcgttttttatctgtattatcatagtatcgaatactatgatcggaatactatcagattttataaaatacatatttttatataaaatatatatttcctcattccctaaatgtttgacgccgttgatttttcaaaacatgtttgaccgttcgtcttattcaaaaaatttatgaaatgtgtaaaactatatgtatacataaaagtatatttaacaataaatcaaatgataggaaaagaattaataattacttaaattttttaataagacgaacggtcaaacatttttaaaaaagtcaacggcgtcaaacttttgggatggagggagtaatatactgtattatatatattaaaacatataatattgattttgatatatttaattggtttttaatgtaaacatgagcatatttattcatattattttcaatccatcttattttaaataatattttgtaggatagtagagatcgtagaattgggatactacctaagattttatatagaatcgtgtgaaaatgaataataagatcgagatgctatgaaaaataagatactatgtgtgattttggcttgatagtatcgtagcattataagatactagggcatggatcgggataattacaatcttgctctagactctagagattgtttggcaatcacaatagaaatttaaattttgaaactttattttaagttggttttggagtatttttattgtagtttattctgtagcattggtttttagaccgtgatcaataatttaaaagttttacactaattattttttttgttgctttgttcatttatctacggtttaccagcgatagctcgaccgatcagacattggcctcttccaagacaaaagttttagggtaattctatggaaagttgactattattaaaattccataaaatcctacacttgtaagagcaagtttaatagtatagccaactactaactccaaatcatttatagccaattcatataatagttaattactacactattaatatctggtcccacatgtcattcacgtattatgtctccgagtccgtgctgtatctggctacagatctataacccgctgctcttctctctcttcttttatccttttaaaatatgtttatagttggcttatagtatgctattgtagctgctctaatattgtagatcaagtaaaggatagcttataattaatctcttgcaaacctgaaaacacactacgccatgtcacagaattgcccacagatgtgtgtgggtaaaaatagagaatcaacatctaaccatctgtcggtaaaggtttgtgacataccatctgtaggcagttctacggtacaggacagatcgggaactctacggatttttggggacaaactatatgtcgctgattgttaatctcgtgtcaaactatctgtcggcatagactcatctgttggatcacaatcaaacaacccataatcattctcgcaataaatatataaatgttcatcacctagaccctagatcaagtcggtaagggccttttccgatagataagatgacgtggaaggtgacctctgccgacagatgttctgtggggggtggtgttctgtgggggtgggggagggttaggacatggtgtagtgataaattggcacttgtatttaacttcttttttttttgaaaaataaatatgatagttgaggtaactataggttggttcgccatcataccttcttcaaataactgaagtacacatgatggagtgactgaaggcatcacagtttttgtttcacatgaaagcaggcctcacaaaataggcttgtttgaaacgcacagagcactatcatcgaaatttttaaataaacaattaaagttccctgggaacaggaaattaatgttttccaagcatgggaaagtagagagaagaaagaaagataaaagtaagagaggagaagaaagaggagaggacattgacatgtggggctcacacactaactcagtcggttggactatgtcaacgagccacgcttagggaaaaccatcctcaaaatagccgaagcagtcatttacaccggttttacggttgaggggtcgatataccctgtttgcaattgagttgagggataaaaatcagattgaacacataatttcgagggagtcgaattggactttttccaacggctgaccactgtgcctcttcgagtgaagaatcctgaaaagcagcccatgggctcatgagaaaacagagcctacggacagcccatggggattcctctaaaatatcctgtcctccagaccttgaatccatcaatccctaagttccgcgccgccaaccccattctccagcgcacctcaggtaatcaattaataattgacctttcctatctgttgtatacattttactaacatactgtagagtataatgccttgtttgtttttgaagctgacaatcgaatcaacgatgggcctctcgcgtcggttcctgaatctaatcgtggacaaccgcttcccaggcgctgtatcgctgctctcgatcgacttgaggcgccacaagctgttcaacacaacaacacctgctgatctgccattgatcaacagatctgtatctgaatcagaacggccgccatgtgtagccaatgctaacaatcatcagaagaagaggaagaagaagacagtaaagatgaggatgcttcatcttcccgcgccaaccatcgaccttgaagcctcatctaggggctatagctggaacatcaagtgctcaccgctcacagatcgcaagctgctctgcacggacaactatggccgccatgtcctcttcaactccgaggcgcgccaagtggaggacttgcccttcctcaacgagcccaagaattcgaccttctccatcttcatccctggtgcggctactgacaccaatggctgtgacgacaatggtggtggcggcagcagcatctacatcatggagcgttgtcccagccatgaacaagaacagcggttgctgagcggtcaatttgaggcatttgtccatggaaggcacaacacctggtacaaccaactactgccttcaccgccattcatctacgaccccaagtacaagcgacccaagatcagctcatatgcagtgcttgttgacgactgtggcagatcacacatctgcatttcagtggatcatgttggcacctaatgcttggacacagtgaaacacacctggatcagagttggggattggacactacccttcacaggcaaggttgagcatgtgccagagctgaagttgtggtttggcatttgcaccaatgactggaaattgggagctattgacctctccactattatctccacagccaccatggaggacttccagccacagctagtaggcacttggaaggagcttgaggcacctcaacactggagtgagatgcgttgtcctcagcttgccaacctgggctcaggcaggttctgcatcgcaaggttcttccacacttggactactcccatggaaccgaactcatttggttatgattcaattaaggtgcactctttttctgattttgattctgattctgattcaattgagtttgaggagcactcttttactgtcttgaccggtacggatgtagtgccgtgcgtccatgatggcaatgggactggcaatggcaattacgccaatggcagcaatgggaaagtggaactccgaatgatcaagcacaactcgaaaagccacatatcttatggcatagatggtacaattaggctagtgttctgaataacgtactttggtttgcttccagacccatgtattatcttattatccatcattgtcgtctgaatagttaggggactttgttctatatgagacaatttggtggtatcactttatcctatgcattttcattacgaatttgtagtatttgtgcaactattgtatttagatcagcttgtccagttccttgtatttgtttggaaaacaaataacagtgatcacataatgctatgaattggcttagtgatctggcatgtttttttttttcaatcaagggttagttgatgaaggatccgtgaagtggtctggacataaagcttgtctagatccatcatactacggtgtacggcgtgtcagcgtgtggctgcatggcggcattcccttctcgtattattattattatatgactctcacgatctcagcctttgaggcaccccggccctctcatcttcactattcctagttcttcaaatttctttgtggttccttctcttctagttttaaatataacctctaggtttcttgaccaccatataatctgttcaacttctaattgatgaaaatacacatgatgatgggagtggctgaaggcattaccatttctttttgttccagacgaaaacatggcttcattgaaatttcacaataaacaattcaattgccctggaaactctgaaattatgtgttccaagcaggggccaaactgagtacacaagaaccattccattcataagaaaaaagaaaaaacaagttcatacccctaataggcaggatacactgggcacaaagaaatattaacatccatgttactaacaagtaagcgtgctgtgaaaaccaatgcacatttacacaagacattctggacgcgattgtacactacaggcaagaacagcaatcgacatgatggccagaaagtatatcctattatgagtttttacctgcgttgcttcggcgcaatactgcagatcaaatgtcatactccttccatcccgaaagaactcaacctaggaggggtcacatcccctcttggattctgtccagattcgttgtactaggaggggtcatcccctcggttgagtttttctggacagagggagtacgcaggtgacacacattccaagaatcaggtgacagcagtccacattccaagaatcaagtggatctgaaagatgcggtaccagattttgcatcgaagtgctgtcaatggcggaaagttctcacagcttggtcaattcttctccggcaaagtggacaattcgtcaaatgagaagagcagttcatacagcagcacatgtggccacacctgcacggtgtttgatttacatattcattcataaatttttgaggtgacagtttaatgagaacaaaagttgcataaagagatgtatcgatcacaaagatgacaatgggggtgattcagaaacaaaatcaaaattttgtaccaatcagagctcaaaatgtaatgataaggtaactactcttcaattcaaatatttgatcagattccaacaaaaaatgtaatgcatagtctatagtaatgtttaaagagttattttattattcagcaatatatagacagttctcattgctaagaggctaagagtaaagctatatgatggaatgcaaaatataagatacttacggcacaaaaacagcattatattcctgttcaaggcatatgacacatatgtccaagaccaattgatcctttttattgttagaatctacatctgatgtaccattgccccctgtacaaaataaaactgatgttataagacatgaacaagttatgataaaatagcctaaccaattgataagaaaaatgaaaaatcaccttcagcttctctagcttgtctttgtgcagcagcagcatgaaccctgtatggaaaaaataatgcattgtaacaacattttcagtatcttgcattagcaaaatcgtcaatggttacaaaacatatcctagtgtccatctgtatgctacaatgttagtttgtgattttcacccccgatataaaattactcccagggtaaaacttttttcaagacagcatctccaatgtcttccatttcagttttgtcctaatgatatatattagctgctggaagcacatgcaggttccacaatttaaaagatacagagatcacaatgctattgaacattacaagatgttccaaagcatctcattctgaccatgtctagcaaagtgagcaaaccactgaagaatgtaaatgggagtaacatgtccgtctaaatccaaataagtggttggttagcacacacctcttctgtaattcatgtcgtcgttttctttcgagaaaatgctgtagtgcacgctttgcaagaagaaagacaccaaatgctgcaaatcccatggaagcaagctggtataacctgttgtagtaaaacacactattagcctcaagaagcctaaaaagagagagaatattctactgcatcttcatacttggcccatttcccaagattcatgataagttgatcgatgcttttcggggatacataaaatggtcctttgtgtggtcgctgaattcgaatagttccaacatcatctttaatggcctattcatacaacataagaatcaaaaacgaaagcaagacttagccatgtaaaggaaaatagggcaccaacacaaggcattgcagacgaattaaagctatgaattacctcaccaacaacagtcaatgaagttccagttggaagaaccctttcagttctcttgactccaagcatctacaagcattatttcttaaacatgaataatactactacaagcattta

SEQ ID NO: 19471 - DNA, 18093 bp, Oryza sativa
attatattaaagtagtattgagcatctaagaacctaatatgcaatttatgatactaaaagagctctaaatagtatgttaaaagaatcaagctcctttcctttattttcttgagaagccatttgtgctcaatattaaaaaaactcttttgctaccttaaaattgggttcatcagctttttaacaaataatctagatgatgaggtcttgtcattaggtttacatggaggagctcgatgtaggtagggttaggctatggggctgacaaacaaggtttatacacagaacaagctatatcagcaagattattacagaagtccagacatccatatgacattagatggttcatctactataaatccaagattgaataaatcagctgatatacagtcaccaagattggacacataatggcactgtttgatatcgagactaaactgaattacttgtttcaatagaaccaaagaaaattagtatataacaactacagcagttaattaccaggtaccatggaacttctttgctaacagaaagcatcacagcggaatcttgaatccatgatccagcatcgttgtgctttaggaagtgttgttctgcctaccagaggaaaatggttaagtaaaattgctaggatatgcttgccacaaaactaaaagaaaaggaaaccgtagaaatggaaccaatagataccgtttcctctactattacacctctcatgccactttgttggcagataagtggtgtatctgaaccaacccgtccagagactgccactacaagtggcaggaccttacttgcagtgtccaatatagcagctgttgaagacaatacagataggtcaaaacaaaactgacaaaaaggtagtattatgtatgtacctaattggacaaaattacaaaaacttcatttataaaaaaaaaaacagattgacacactacaataaagttataaattcttgtagtatcttaatgctggacttcaattaccacaacaactctcaggttttgaacgcgtgctacaagaacaaattgtgcttctctggagaaagtggtgacacagaggtctactgcttcatcactgaatctagatggacctgaaatattctcctaacactttatctcatgcatcactaggattgaattagctcgaagcataaaaatttccccaaaagccacgtacacggtacattaacctcaatacaataaattaacaaaaccgcagagtaatagaattactgcagaatccagctaattaagcacgtatttagcagacacccaacaaaacatcaaaccaaaccaaaccctcgctcgctcgctcacccaaatccttcgtgcttccggccctcgccaccgatcgcagcacctccgcatccctgagcaacaaatccccggtcagaaccaccaaaatccccccaaaaaatcgcccaaaaaaatgccgccctgcaaaaatcccgcacctgccgctgctcctcccgaggagatacagcgccgcggcgctgaggcagcacccgactccgccccatgggatcaacatctcgcaaggaatcgccaggcgagcaccgaatccggggggggggggagatcagtgaggaggaggacgacgaggagatgaagccgtgaaattttatttttattttcccccctttttcgcggcgagggaagaggaggaggcggcggggagggggaccgggaggcaagcaaagaacaggatacgaggagtgcaccggcctcggtgggggtgggcctcacatgtcagtgagtacattccctgacatgcgggccccgcagggatatgccacggcccctattagatactggcccagaagcgcttttagtaagacttggccctagggcctgtttgagggagcagcaggagctacaacaaagcttcccaaactatccgatttccatgtagagaatgtatatggagaattcagaaaataaactataatttaaaagctgagacttctagtttttctagtttttcgctagctgtttcttagaaccttaagctaccaaaatggagtatgaccttagttagttttggtagtcagccacagttactcttataatcaaaaacttgcttaaatatttttcttaagattctaaaaaactattgttgtgaaatccataaaataaactaaaattgaaaagttagaagattttaaaaaactactgtatctactaatcggttgtttctcgtaatcttaaccttcggcataggtagggcgagctcctctcgcttacatgtggggcctggtcaacctcggtggttcgaacgctgcaagtgggacccacctagggttttaagaggaggagattctcgtcggcggcggcggcgggcaaaggttagccatggagaaggcgaagctctcgtcggcgctcttcgccggcacgcacttcgaccgcaagcgcttcgccggcgacttcgcccggttccggcaaggcccgcctgccccagacgtggcctccgccgccgcgccgtcgccggagaagaagcggaagcgccagagcaaggccaaggcgaagaagagcaagaagaggcgggcggaaggcgccgactctgcttccggtgagttcttcttctcaagaggttgttgctttttgggagtgtaatctgactctgactactctgtcgagtgttgtacgctttgcagatgctgtggaagggttcagtgtgttcaagggattggcagcaaagaaggatgaggacgattcggagaagaaggtcgagactggtaagagtgaggactcggaggttgtaaggcggaggaaggaagtcgagagagaaatcgaggtaatggcgttttgcaaatccgttgagctagctgtgtctctctttcgcaaaattgtgcttatgtaaaatatttgaaaaaaatgtttatcatccagcaactatcttggattagaaataatggcagaaattaacatttcggtgtgttcggtttgcatgtgttggattggtttgcagagagcggcaatactacggaagaagtttgatattcacatttcaggacaaaatgttccagcaccgctagagaactttgaagaactggtttcaaggttagtatctgaataattcaaagagttcagacatactaaattctttattataggtgctgctacatattaacttcaacacatcatggtaccgtctgaggtggattttaacctacctgattttgtgcactaggtatggttgcgactcatatttggttggaaacttgtcaaaacttggatttcaagaacctacacctatccaaaggcaggccattccaattcttctatccgtaagtcattttgactctgtttggatatttttccccctagtgattgaaaattttagttttttagggtcatatatctgaaattgctttgtttcaggggagagagtgctttgcctgtgcacctacaggttctggcaagactttggctttcttgttcccaatccttatgaaaatcaaggtatttatctttgtgatattgttttatgctgtttgtatgtgttgtacttgtacattctttttaagccatgttgttatagccaggatctaaagagggtgttaaagctgtgattctttgcccaacaagggaattggcagcacaaaccacaagagagtgcaagaagttagcaaaaggaagaaagttttatattaaactaatgacaaaagatctatcaaaatctgggaatttcaaggatatgcattgtgacatcctgatctccaccccacttcgtctggaccacgctgtacaaaaaagagaccttgatttaagtaggtctgtgatcataccttcattattttgatttgcacactactacctgttagaagctaaacttgatacattatgaactctgtctaatggtttatcatgagtttcaaccttggaatcccgatttctaacatttttgttggaaagcgaatgcatgcataccaatccggataataatggtatttagtaatgaagtgatggtttacctgctagaagctacacttggtacattatgactctgtctagtggattatcatgattttcaaccttggaattccatattctaacgtttttattggaaagtgaatgcacgtatttagtcatgaatgttagctttttagtggaaggtaaaattccttcactatattaccctgaaaacaatcttaagtgtttattcatctcaaaaaatactatagagcctgtgccttgttaattcccaccaatttacttacgaaatggaaatttaattagatcaattcaaccgtcccttagtggcatcacaactatatgtctgcatgccatttataaaggaatgacaggttgcaattttcgccattgtttttctttttattcgtgggcacccagttcgatttaacagtaacatatgctgtctttcagagtggaataccttgtcttggatgaatctgataaactttttgagcttggatttgttgaagtgattgattcagttgtcaaagcctgctcgaatccttcaataattcgatctctgtttagtgccacattgcctgattcaatagaaacgcttgcacgcacgataatgcacgatgctgttcgagtcatcgtgggaagaaagtaagtattgctttcacagtgtgtactgcgaaaactattttttcagggttatttttgtcattaattcttcacatacaggaattcagcctcttcactgattaagcaaaagttgattttcgctggaactgagaaggggaagttgctagctcttcgccaaagctttgcagaagtaagccatgatccttctctgatggttttctcctagtttccatcttgctgtttccgagagctgattaaacaatttcaactgtagtctctcaatcctccagtattgatctttgttcaaagcaaagagagggcaaaagaactttacaaagaactggcatttgatgacgtaagagctgatgtaattcatgcggaccttgatgaggagcaggtatcacttaatatcatttttagttgctaataaatgtttgtggtagttttgttttcactgctacacttggctcaatttctatctcctcactgaagcgtcaagatgctgttgacaacttgagagccggaaagacttgggtactgatagctaccgaagtcattgcccggggaatggatttcaaaggtgttaactgcgttatcaactatgattttccagagtcagcttctgcctatattcaccgaataggtaagtatctggctttgacaggctacacgcacccgtctgtgcatttttgtgaatgatgtcttgtacataagcatctgcgtggaaggcctgagttctgatgggcatttgattggttggatactgattatatggtcctcttttcaaatttatattattgttattttgcctgttaggcttgtttaaatttacattccagtctgataatgtagccagatatatcatatacctctattgatcagtttagttcagtttcatgtatatgcaattttttctctcttatgaaagacctggcatcatgtttttcttccgccatctcatgattcatgaactaactagggaaaaaaaaaactcctttcttgttatataggacgatctggaagagcaggtagatcaggggaggccatcacattcttcaccgaggaggataagccattcttgcggaacatcgcaaatgtgctgatatcttcaggctgcgaggttccttcttggataaaggcattgcctaaactcaagcgcaagaagcacagggtgaaccgggatcccatctccacattaccagacgaagattgagtttccctgtaacgtttctagatgaagattgagtttccctgtaacgtttctagatggcaccttggcttcagttttcctgtttgaatgccagaaactgctgcctctattagttttgttgactgaagcctgagatgagaatacacttgccttttgttatttacagttttgactgatcaattgaatagattatttctgaatttacaattagattcatcgcatatcccaacatacaaccaatcacaggcatttaccattttcagtctgtcctgtggtcatttgttaactgtcttgcagagcctgcatgatctccatggcatcatctacaagtgaggccagagttgagctgtgcctgctcagcccaatgctgccagagaacatgttgaagctctcgagctcggacgtcgacctgacgacgctcctgagctccttctccagctccatgctcctgaagaaggggacgagctcggcgtcgcctctcatcatggcgatggcgagctcgatgacgaaccttctcatcctcggaaccttcaccctgggtgtcctgtgctctttcagaatctccactagcctccctgcaatgtctgtatctggtacacctgcctttccaaagatttccttgtgaaattcaggtgttgcaagccttgtaatctgtattgccaatcctatagacacctcaagcaagctgctcttctcaaccataattgctttgaacacctgtgaaatcatgtagcagacatcattcatcaaatcatagcaacgatgtctactgaagaatgaaataagtgatcttgttctagagaatctattctatgcccttgagtttactctagttaaatgttttttattggtttctttgatttgtttcaaaagaacatcaacacaggaattctctcatggttgcagtgacatgagtagcacttcatggttctgagttcaagtctctataggagcgaatttcagtttgggttatttgagggctaaattccctgtttgataggttaagttcccaattaaaaaggctatatatatccggttggatgtagaggctacggccttgtttagttctaaattttttcttcaaactttcaacttttccatcacatcaaaactttcctacacacataaacttccaacttttccatcacattgtttcaatttcaaccaaacttccaattttagcgtgaactaaactcagcctaggtaaaaattacccttctctaaaaaaaaagaattctcatccttttttggttggtttttgagaactttctattgggacagctaagttccctattaaaaaggctatatatatctggttagatgtagaggctaggtaaaaattacccttctaaaaaaagaattctctcatattttttggttggtttttgagaacttactattgggacagctgcagtgaggctgctgagctgcaagaagtggtcgctcctgctgtacctgcacaggttcagtaggattctggatgacgtgatctgcagcccggggtggtgcagcgtcatcaccagcctctcgacgacggcggcttcccggagtatccggtcgcagttggcggcgctctcgagggcgagcagcgccaccacctcgccggcctgcagcctgatgtgcgccgccccctgcgccgcgtaggcgaccgccggagccgactccggcgagccggcgaacatgtccagcagatgcgcgatcatgtcgcccgtgcagccgatcttctccttggcgtcgccgtcgatggcgaggtcggcgaggacgccgatcgccgtcagctgcatcttgccgtggcgctcgccgccgtgctggagcaccttgcggatgttgccgaggacgaacacgttgtcggagatctccctcctgatcgcctcgccggtgtgccccggcgtgctcgagaggttcttcaccacctgcagcgaccggagcaccgtcttcgccggcaggctcccctcgccgccggcgcagatctgcagcgccgccctgctcgtccgggtgaagtgtatgatcctggagaggacaccccttgtgctcgagatcttcgccgcgttgccgtgctcgcgcgccagcttcttcatgatgtggagccccatctcgttcatggcgaggtcgccggcggcggcgtcggtggtgggggtctcgagtaaggtggagatggactcgatggcgccggggatggtggcgacgcggatgaggttgcggcgcttgccggcgaggcggaggacgacctcggcggcgagcgacctgacgcggcgcttgctggggctcttccagctcaccatctccaccagccgctcgacggtggccgccgacgtgccgatcttgcgcaccgcccgcctcgccgagtcgcggttggcgatggagccccggaggatgtgcgcgccgatgagctgctcgtcgccggagtccgatgagaggagctcgacggcgaaggagacgaggtccatccgcgtggcgtcgaggatgccgccctcgaccgacctcgagaaggcgcggtagaagaaccgcttgatcggcaccacgccggcgtcgccgaggtcgcactcgccgctcaccgcctcgaccaggcgccgatagctgagcacccactcccagtacgcgcgctccaccaggaagatcaccgcctccgacagcgcgagcacgtagaacagcatcagcgcgtagtacgcgttcttgttgccgccgccgccattgtcgccggcgaagcggagcgtggcgaggcgcagcagcgacagcgcgacgcacgccgacgccgagaggagctggagccagtagaggacgtagctcacgttcctcgcctcgacgagccagccgccgagggggaggaggtggatgggcgaggccgccgccgccgccttgtgcggcggcggcgggtcgtcgtcgtcgtctccggcggcggcggcggcggcgtccgggaggtgcatcggctgctcctgcagatcgagctcgttgctccggctgaacaccctcgtcccctcgacgaggaggatggcggtgacgagccagaagtcccgggcgtcgaggtcggcggcgaacccgccgaggatgaccaccgtcgcccacacgaagcagacggcgccgacgtgcgacgcggccttctcgagcaccgcgacgtggagcgcgaacgccgtcaccttgcgctccggcaccacgtcgtcgacgccgccgccgtcgtcggaggcggtggcggcgtgcatggacgagacctggtgctccaccggccgccgctgcggctcgtacgacgacgccgtcgagtcgccggtgtgcgttctccggtgcctcgccgtcgccgtcgccgtcggcggcggcaacggcggcggctgcactagtatttgcatgggaatgtccacgccgccggcgccggcgccgccgccatgatcagccgtagtgtcgatggccattagccttgtattcccgagtgcgtgcacaagtgcacttggggtttaatttccatggttttttgcatggtgatgttataaggttggagctgattgggcgggaggctaatttttcatctaaattaattttgctggatcttgtgtgaaagcaatcagaagagaaagatgaaatgagattcgtgtggcttcaacgtgcaagaaacaaagtttcatcaagttcagatacacgctcgagtagattacaagttgtttattgcattcctgcgcaatgcaatggagcaaaagctgtgtttaccttgccggttttcaagttgtttaacctgcaggttacatcatcttgtgtcatgtaatgttgagacttgctgaacttctcatgttacagtgcagtagccaagacatgtttgattttgattgttggaaggattattggtgagaattatctataatcaaatatttattaataaaaataataaatagagcaaatagtccataatccatttcaataatcagtaaataaaatctttatagacaacctttcaccgtttcacgcaacagtcattttcagaggtttacataccattgccaactctataactgcttctcgtacactcagattgcatctcaatcaacttgtttttaatctccaaattaagaggatcctcttcattcaaccattctcttagactagatcacataacatttctcggattttatatatacatgttacttgatcatgggtacgtcaagcaatcctatgtctgagtcaacaggcaaaatgacttcatttgataaatccagaagccaaaacaatcatccgggttgcttatctgaacactgccgggtagctgaagacctacgggttcaggctttatacatgcagaattcagtgtattctttaagcagaaaccgtacccgtagcttcaggaatggaagagtacatttcgtgccgcgcaacgaggaaatcattctccggccgtacggtgttccacgcccggtaggccggcggcgccgccgcaaccaatgaccaatcaccaaatccaacacctctggagtttggagtttactctgcatccaaacaaacaaattcaattgaatttcagtgcatcgaattctactgagaaaccggcagcaattacaataaaaaggtaactcttgtactacacatcactcctcatggttcatggactttggcaatttagcaccacttgacaataagtaataacatgatggtatattttacctcttccgtttgttttttttctgtaatgcgtacaactcttaggtagatagagaggaagatgccatcagctgtgacattttcctagaagatgaacattggcatgtcagtcaagaaaactatgctccagctctatcgggagaataatacaaataaagggaacttcgcatgcgtagtaatcgaagttgctgctgactcatcattggattaaccggtgctctcgtgtcagctgtctcctgattgcctacaaccctgccccttcaggaggtatactttagaaagtgcatcagtattcttcgtagcatatacagaattccagatagatacatcaaagaacctgaactgattcatgagtatgtcgacacaaacagagaatgtactggtagatgtagcagagagagttgcccaacctgaggcgagctggcatagcgcgatgccagaagagcagctgaattgctttgttcaagttgttgcctccgttgagagggtgggcaacgccctcggcacactggcgttcacctgggccaccgttgtcctccttggaggatacccaactagtatcacctgtgtggactttgcgtacgccacagcattgttcttcttagaagctgcaaggtatgcatcaatgatcagtcacatgtgataatgttagtcacaaacctgtgtactcatgttatcactacacttagcattcgtaagaccatgatcagattatctagtacttagcaatttatcaagtccaaaaggattgttgttcatttggttgatatatcatcctgtttttctcggtttccatgtgatgcaccgtgcatattttcaggatgttctgccccaacagatcagagtaccaacttttcttcaggactcgcggagctttgagacctttctcatggaatagagtgattgtggtgatatgtttgaataatgttggtttattcctcccaagcaccaaaagtaaagaattgtcggtttccatattgatgcttgttgctgccaccttgcctttcccaggagttcacaaacttaaaggtggtccattacgcaatgctatatcactattgagccccttggttgtaatggtgctgttgatcccctgtctatggtgcaaagatacaacaccagcaccaaaatggcatttgctactcctagctagggccttttacacactgttactggtcatggtgttgctactaacgatcagcaaattgcagtttccaagcatcgtcagactagttcataggcttgtcatccacaaatcattatcctgccaccaagtcagtttgttttcttgcatgtaccttgcagcagtgcccttggtgttcttttctccatttttgttagtaatgatggtattcgctctgttgacagcaatgtgtggcagtttacagattccagctgcagtcatgcgcatcgttattggatcgatctgccttttgcaccaagattattatggcaaaggtggccatgcaaataattctgacaagacaaacctcaagccaacacttaggctgcgttcgttgggtggagaaagagagagagtttgtttggttttccgcgcgcacgcttcccaaactactaaacggtgcgttttttacaaaaaatttctatagaaaagttgctttaaaaaatcatattaatctatttttaaaatttaaaatagttaatactcaattaatcatgagctaatggctcacctcgttttgcgtatcttcccaatctcctcaatccccttctcctcaaacactcccttaatgtcttctatggaatggtgctcggtcaagggatactatacattgtggctcgcataatggagtttttctcattctttcctcggagatcattgccccgtcgtggtgggttcaggggtcagcagggagtcaaatctcttgatatgtactacacacatgcatttgagaaatgtatgaacgctagcatccttgctccaaagaagttgaacctcaccaattttgccatggaatccctcgaatcagactcaaggaagaagcagctgtgcggggttcgaattctgtatagccttgtgaacagagagccctatgacaaacaagtcctgtcaaaagtcacaactccatgaagacggtcaccacactgatccaaatgctgggatggactaaccaagaagacaatcaaattagattgcttgccgcgaagattacagctgagcttgctagaggtctccagattgtcacaatccctggtgcaatgaactccatatcatcacttctggacaaccagaacaaacagcagatacaggaactcataattcagaaagacagtggtggtgaggagaattgctggatactcaaactttggcatcagatgactaaaaagtggtccattctagaggaggagcagtggacagaaactgatgttttcctggtacttggccttgtaactcttgagaggctagctacatatgatattgtcaactgcatggagatcagcagatcaatggacctcatcccaaagatcacagagttcacgagtaacaacagtgagagaatatgtgtcaatgagacaagtcagaaaatactgattgatttgtcattgaaggtgctgagaagactggcaagcattggtggggaaactggtataacattgaggcacaagatatcagaagatcccttcctacttggcaaccttgctgagattttggaggatagcaagagcagtcaggaactgaggaagttgacaatagatatccttataaaacttgccatggatgagactacaaagagagagattgggagcatccaggtgattgttcagatgttgatgtttgcattcactgcgcaagatgatctgccaggtgcatattctgactgctcgatgacaatgaaagcaggacaagcattgtcaatgctaacactagaaagtgcagacaactgctcagctatcatgaaggaacctgggcatagattctttaaggatgtggcaagaatgctagtgcatgacaacaggtacatacatgttgcagcaaatgtactgcaaaacctgtgcaaacactctagagttgagctaggagattcagttttggtggaactttccagtgtcctactagaggtgagatctccacctatgtatgataatatttggcatattttttttaaaaaaaaacaatgagaagcacaggagggctttggccccattctaaactacaactttctcgtcttccgttagcacgcttcccaaattgttaaacggtgtgtcttttgtacaagatttctatataaaagtttcttaaataaattaaataaatccaattttcaagcttgcaataattaatacttgactaatcatgcgttattgacttgtctcgattcgcatgccgcaaaaaaaggttgtcccaaacatattttgtatgaagaaggggctgagaaaccaaaattttagcttcttatttaggatatctgttttcaccagatatttgattctagagtctaacttacatgatgctgcgttataccgtctacaggtgttgggacaagtaatggatgcagagggaaaagaactcgaggtccttgttggcctcagttcacaaatatgcagggttagtcctaaaagcttttcaaaagcgctagaacagggtcagaaggaggcaagattcgtggagaagctaatcaatggactaaatgcgaatatgaaacccaatccacagtttccaggaatcagaagtgtgatagttgagcagtgtatatacatgatggagctgagctctcgttatgcaacatatttcagaaatcatgaattgatggaagcattaataagggtggagaagacaccatcaagggctgaaaaatacaggcttttcttgggcaacacagggctcattgagcacagagtgaatctgtcctctcttgtggagagggcaaaacagttgatggccgtgcattcaactcaacagccttgagaatccaattagattttcgatcatatttaccactagcctttggatcatcctggtccactaggatatctttgtaattcaaaatactgattggcccagaaaacactggtgctaagctctggctaataatttatctgtacagtttaaacttgatcctttttaaaaaaggactatagagaaataaacaaaacaaacaaatgcacataaagattcttaggcgcaaaaaggaaaaaaaaatcaaaattgcatgtttatttgacatacatcgagttcaatattcaacatttgttttattccccaatcaaagtgatcatgtcaattgaactgttaagcaactatcccaaatggtgtactgataaatactctatgattcctaacctattttgttttcttggactaaatatcaaataaggcaagtttggcataaatgatcctgtaaataagtgatgaataagagaatattctgacattaacacggatgggtctgttttttctaatggtcaggccgttgccgacgttttatataaaagaagaaagtgtctcattttaagaaaaaaaaacatgacaaaaccttacaatgcacggtaaattaggggaaactgcacgaaaaccacaactcaccaccaactaacctaatcagccatggcagcgaaaataggagttacagtaccactagcaccacacagttctgatgttcgaagtaaatcctgaagtataccgtatatattcagcagaaaaactcaacagtttctgtcgcgagcatgggggacggttcttgttgactatagaagaacggatatggcttatctggtccctgcagctagtatagcaagttcaatttgagcaggagtgagtgggtctgtgagtgcttccgtcactgctcgtatgaacaagaacaacgatggaaggtgaatggctggtgcactcactctatgctccatgtgaatttgtgaaatttgggttttgctgcccgagtggctggggcctagtcgctcgcccccggcagcatctgatcccacttcctcttgtgaaaattttttatattcatcgtgaggtccaagtgtgcggcgcactaggcagcaaattaaattaatcccccaaaataatatactactccctccgtttacaatataagtcattctagcatttctcacattaatattgatgctaatgaatttagacatgtatatttatctagattcattagcatcaatatgaatgtataaaatgctaaaataacttatattctaaaacggagaaattactaatttgcaccgaactagtactagaagagagcaaaagcaccgcttaaacggttgaaccctagctaatattcgggtgcctttcacacacccccttaaacaaaatcgccaaaaatgcttttcatgatgtatgaggaaacctaagatttcgaggttgggaaaaaccaaatccgcaggagcggacggggaatcgagacctaatctcccccgcggatctaggccccaagcatttgggcgcggcgcggcaaaattaataccgaatcgaatcgaattttttttcgatcgaaaccgcgatcgagaggaaaaaaaaaaggaatgcatcggaggaacacggaagggaagcaatcgactcaccgtgctccttgcagaggccagagcgggggctctgcgacctgcgagcggtcacatcgcagagatcatggagacacagtgaaactaaaggcagcccgtctctctcacagtctcactctttagcaaattttaccaaaacgtccatgtgctctgcagaaaaaaaaatggaattttccttctctcctttttttttcaagtggtttgaaattgacctctggcaaaaattaacgagctatataaattttttttgaggaagataatgctttattgatcattttaaaagttggatacaattacgatcagcagctctctagtatataggggagcttgcatatgccacgcacgcaatgagctatataattttttttatttgttttctagcatgtcttttataaacttgtaatggtgcaatgagtatttgcacatatattcactctcctatttttttttgttttaaatatttgtcacttgtaactaattacaatactttgaacactgatgttacaatactttgaacactgataaattttaagtagttaaatcatgatatatacttaattaatggagtacttcaaattttatatgttttcttcgaaggtcaaaatgatcaaaaaatagtatatagactatttggagacagagggagaattgctttagagttttattaaagaaagaaaaatgatacttgctaacttatagaaaaacttcttcaacccttaccgttaggcacacaaacaatatgtcatgactctctgaaaggcctagttaagcaacaaaatacatcatgcgatattgatacatatagtaattgctgtcgataaaagaaaactcatgtatgctcgagaacacgagtcagctatcaaactctgtcaaaagcgtaactttttgaagctagtcctactgctgttgaagatgcagaggactaagaacatccccagcagttccggcatcccatcttccatccagaaaatggcgtatggggggagaaaatccggctccaacggatacgccatctgggcctccatagatggtacatgcgctattcttggcgtttctctctcctcacgccatcctgcaaccaccgctcccatccgttctactgccctcatccgaatcgagatcgaggcagagggtgaagcagtgaaggtagatcgaggagagaggatgaggcaaatcttcgtcggccgctcccgccgtcgaccaccttcggccgcgccgcccttctgctcccaccgccagtctgcccagccgtcggcgagccgctcgcgccgcgccctccgctccgctcccaccggcggtcggcggcggcgagccgctcgtgccacccctccgctcctccgcccttcgctcgcgtctctcgatctctctggagtgacagagagatcgtgtgaaagagaagataatgatgaaaaaagaaaaaaagaaaaataatattaattgatagtagttgaaagatactattaaaatataggaggatgtgatatagatgatgtaatatagatgatttgttagagtggagagaaatatgaaagaggaatcttttttggataaccatctatatagccatatgaaagatcaaatttggacgagctgctggggatgctataaggtgatacaaaatatgaatttccacgctgcctttgcacccctagtagtattattgaggactaagaagactacttgtgttctttagtatggattgggatcgaatcactcgcatacgaaaaacagagtgatatattatagcacataattaattaaatattagttaaaaacttatataatgaatttatatgattttaaagcaactttttatatattctttttaagaaagcacaccatttaaccctttgataaacacatacggaaaagtaagtgagtgaagattgagaaacttaactacagacacatcctatgtttaggaagaaacgtggagtagggcacatggtgtctattttcttgaaaaaaagagagggggcccatcctcaatccttaccaacgaaggggcaaatagtcaaattccccccagctaagctgcgcagcctcccttcctgcctgcgcctgcgctaccgtagtcggcctccctctgactcttttgctcccccctccctagtttaccctagtcgatctccccccccccccttccccctc

SEQ ID NO: 19472 - DNA, 3962 bp, Oryza sativa
catccccccccacccccacccgtgccatagggttggctgctcctgctcctactgtacacagcttgattgatcctttttggtgggtgtggatgttgggggtagcatgccgctgacctgctcggggagatgcagaggtacgcgggtgccggtaacaacagtgggtttagtggcggcggtggcgcgggtggaggcggtagagacagctcgaggttggatgggtcgccctactccgccaacaattatcccctgagctcgaggtgacgcgctatcgctccatttctttttttttccctccatccaacatgatttcttgttttaagccatgtaaacaataagatgccctagtatgctcttatttagttggaatcttccaagttgtaattgatatgatgcgtgtacattttggatgctacagtaatggcatttcttcgaatcataacgattccgtactgttttatgacttgcgttacttgcatgaagtaactgccgtaatcaaactcaccacatgttctacgtataatttcccagctattatcagaatgacttgataaccttgacacaaactgttattgaaccacaagcaatcaacatgtatagaatgttgttctgaccaaaggaaattttttttagtaaatattttctttaactgatgttgctgatatttgtatggttacgacaatactttctctagaaattagataaattccgtcaggctgttcatttattagttaaagaacaagctaatccgtcacgtatagtgattgaatatatattaccatgccatgaatatcaacaagaccatcatcagttcagttttattgaatatagctcatcgcgataaatccctccatcctagttgtatttcgtataaccatctgattatgtagaacatacagattaataggcgtatatatatgacatcatgctttggaaatcagaatgccatagataatcaagtttgtatcattagtatgatattgcaccacttcaatctttgtggtatggttagagaaggagcagtcattttctctttgatatgtgatcgaatgaagtagtgaaagaggttatttactactgcctcaaatcttatacttgtcatgcatatgctttgccatgtttaaaataaaatatgtcataatattgctaaaatatgtaaatgcattttttctgtcatgaaacatgttgtttacctttgatctatatggaatactcaccttaatttatttataactggcaattcatttatattcgactgttgtgtaatattaaggaattcaacgggtaatatataaaaactgcagcgggagtaagtggggtggcagattcactcagcaccatcactccattcttttaaaaagagtagtttatttttcgccgggccagcaaaggaatggtggccaaatttattaagagcagagaggaaaatggttggtttacataacaacaagattgttggatgctacttaaccgctgcagccaaacatacctgacaaaatcaaagtgcaacattaggaagccaagatagagggataagataacagctttgctgcacgccacacccatagctcctccatgattgtctcgaccctcattggggtggatcaaacctcaaccctcacaaataattgaacatggaataaagaatatctgctctgtcaattcttcacctctattgcttgtccaatatcggaagtaatatttgatgaagagtacaacgaacttgctactgtcacaatcactttcttagtatcgattttctgtcaacagaaatgggggtacctaattcaaaccaaacctgtgcaattttatcatcacaataactgaattttgatatgtttttcttcttcattgttgttttcaggcggcagcagcagctagctccttacaagctaaagtgtgataaagaaccacttaataacaagtacgcatatacttcttaccaaagacagttcactcagggagttaagtgggtgtttattaatctagatgttaatctttcagggattgcatttcctttactttctttgcccttcgttttaactttggctgtgctctttgcgtaaaaaaacacatctgtgttgtccaatagcaagttagcaacaaatagtaaaatactacttctttatcctataagatattacttcacttgatcttaggcagtccaactgtacacgatggctcttttgcaggcttggaccacctgattactatcctcaaacaccaaactgtcctgaagagacattgacaaaagaatatgtacaatctgggtataaggagaccgttgaaggaattgaggtgcgtatggagatgaatgttgtatacaatgtattatgagtttgaatccaattagaaattcattaatgtatctatctgtgctatgcttattgagtttggatatagtccaatcttgtatattgactgattcagttttttcttgggattcataggaagccagagagattgtacttagccagatcccgtacttctgcaagacagatattgttgtaaaatgcaaagaggtgaggaaacttggccaatattttctcagtaagctcgtggcatgatcttattttgccattgtgtttcggaagaaatacgaaaaattctttgcaatagcaaatggattgacagttcatggtaacaaagagacaaattgccactggcaccaaccttatattccaatgttctgtatatcaatttggcatctaggcataatttgttgcctggctggtttactacccatgctatttgattaccttgacttactggagattaatctgatatcctttagttataaagtgtcaccgactattaggactaaatctcagaacttattccatcctgcaaggatagttagtctagtgattattaagtctttatcaacaattgattctggcttgcacagttgtaccagctatcatcaggtgcaaacatttaggcaaaaaagttgctgtagattgtgggttgtgtgtttctgttctcttttaggaaatcttgtttctctcgtaatctcaaatatgtatgttgaagatgtagttctttaaatgttgtaagacaccacaactataaatgcatggatacatttaattaacatggttgattggtagcttcatccttttgtttttattttatgatctgttttgatgtatgatatagagtacttagtataacatttaacaatttcttcattatttgctgaaggcactaaagaagcgcttgagagctataaatgactctcgtgctcagaagagaaaggtagttgtgcaatatttcttgatttggatgtatttacctcctgacatcatatcaaacagaccaactaattttcctgttttagcaggctggccaagtttatggagttcctctttttggatcactgttgataaaacctggagtttatccagagcaaagaccatgtaacgaggacacccgcaggaaatgggccgaggtcgacatacttgcctgttatctgttttcacatgcttttttcaatggaactgttggcataatttatgaactgtcatttaagttttcttgcacttttatcttgagcttgtcgctagttaatacttaacttttctgctctagtttgaatcttctttttttaggaattatgggtttagcatacaatcgattagaaactttattttttgcttggtgttgctttgactttaaactgcttattattgtttgaagtcaagggtcaagtttgtgtgaggcagacctcccttaatgcatcttatcatctcatcggttggaacaatgcaagtcaaataacctaagaaaattgagttattttgtttacagacatcattttctacttctgtgatatcactgctgccatgtatctggctatctgcccattttaactttttgattacatgtgccatcgccatgcaggccctttcccagccaaacaagcgactgcgttcattatctgaacatgttcctcatggttatcg

SEQ ID NO: 19473 - DNA, 1467 bp, Oryza sativa
tcatctaaaaataccagcagtataccattcatacctcaagttgctggcggtagaatgaacagtgccgagatgagtaatatctctccatggtttgcttctgcacacccttatgctcctgtagctgcacagccatttttaccatctagaggagaacagcctcacccagttgagacagctgctggaagtggaacccagaggatcattacatccttggcagatggtgtccagcgtggaagtgatccctgccgtgctccagttatttctacttcaccaaccatggtttttcatcctcctgcgtatcaatatgcaggattcccttttactcctggtgtgcaccttcaagcaccggggttttcaattggctcgacatcttatgccaattcagcacctgcaggagttccatattttcctagcattgctccaacactgttagggccagcaggtgcattacctgctcaacatactaggcaatatgcaataaaccttcctgaaggaagcagcactgttggacacgacagtaatcggaaatggggaaggcagggccttgatcttaattctggccctggaagtgtagatgcagaaataaaggacgaacgagtatctttaccagttagacaaaatttaatcacgccaccacatgcctttggggaagagcatacaagaatgtaccaaatgccaagtgttggaataaagaggaaggaaccagaaggcagttgggatgcagaacgttcttcatacaagcaattatcatggcaatgagcttttaactgttatcatttctcatttcacagtgacttcagcttccagtgagcttgtatgtacttgtattccgtctccaacaacctgcttgtttctcacttgcagctccttttcttttgaaattaaggtacggtgcttttatttgcagaggcaactgcatgtggaacttgggctctggtgtgttgcacccttgctggaatatacagttcatacatgaccctgtgatgatgtgaattgtgagaggaatgatactttgctgtaaatgttcatcatatttcatactttcctggaaacatttttccttggcttcagcagttgcactgctagattttcgtagctgtcaggcatatgcttctaatttgctccgatatgactggagatggaatggtatagccgtataggtcctgagccacaacaaacatctgaagccgttgtaattagtccagcttgtttgtttaaagtttcttatgacaaaccattttcacattgttgggcaaatctgcagccttacatatgattttagatgtgacatgtatttttcgtgtaaccgttgcatcagtttgctcatgtaactttatggactatccagtagactgtctgcagttcccgaatgcttgcaaggggcattctggtgtaaccatctctgccttgcagtcataagaaatttagtagaccaagaaataatctatttctgtatctttcgttatt

SEQ ID NO: 19474 - DNA, 1118 bp, Oryza sativa
tgcagcccaccattttttacaattagagcaccaaggccagttggatagccaaatatctgcaggtttgccaaagatatcgatatcaattggtgacttctgtaggaccaagcatttcaaaacacaacaggtgcatgtggattaccttgtagaaggaacatacaacaaaatcagcaggatacacagttaaattcggtggttcagtggcacatccttttgcagcatctatcagaaccatccatttacccctatattaatgcatttaataagcatgctaaagacactagagtccaaggaaaacaaggcaatgatcctgcaagacaaattcaatgcatcttactgctgctgcaatgggatttttccttccttgatgagcttaaccaagctcagactgaacttttgtcctgaaaaattgcattctgacgggaatgcaaatatattccaattgttccctacagaagaaatgaatggggagtgagcataaatattaagcatcgcactggaattaatcttccaaatgagagcaaaccaaaagttttgctatcaatatttctagttatccatgttcattccacattgcatggtcatacaatatgaccatgtcaaaccaataaaccaaataaacaaacttcttaaggaaaaatccaggaatgataaatgtgttcccagttaactccctcataaagaataaaagaaagctagagaaaactgaaaacatcattaacagattggaaataagacaatcaaattctctgtgtaaattctacaatattgatcaataattgaacctgatcaagaatatgttattcagcaattgtaaaggacaaaaataaaaatcataagggactgacctgaaatatctgaaagacttccgttctgacaattgtgtgaaagcacatctttgcttcttctttggtttgtgcgtcttgaaatcttatacaaactataacttccattgtcttttgccagatcagcaccctcctcaacatcaacggccaacacagtagctcctttactcagagcatatctagaaatttgctaagggaagacaaaatttacaagatactatgtgccaatgtgaatttcatgatcctacacatagactgacaggaataaatgga

SEQ ID NO: 19475 - DNA, 1824 bp, Oryza sativa
gctctcgtctcaccgaggattaaaagaaattgtggcgcgcgtgtggcttcgacgacggcgagaggtgagcggcgcgaggtagacgacgtaatggctcacgcactcttcggttcggtttggttttcttcggttcttcgagattctggttttttttttattcacaggagaaaaatataagccggattaatttctgttggaaaaaacaaagaaaaaccacgcaggcgttgctgcagtgcagagggaaggggatggaagtaaaagatggaagttgggaacggccaaggtgaagtacgacaagtctacaacctgagtttatctagtttttttttcccttgagtactctctcctccatttcataggctgtgtttgcatccctatgttcccagcccatctccctcgttttccacacgcacgcttttcaaactactaaacgatacgttttttgcaaaaagtttctatacgaaagttgcttaaaaaatcaaattaatctatttttttaaaatagctaatcaaatttgcttaaaaaatcaaatttgcttaaaaaaatagctaatacttaattaatcacgcgctcccatcactagactccgaacacagcgtggagtactatacactttaattttttttctttaattaaattttaggcttgactaaaatttaggtcatcatcatcgattgctcatattctgtaataaatcaaaacggtttactagaaaataaaaataatttattaaaaattattaaaagtcaatacttaaaaagaaactacgttaaaaatatttaacatcttattcgttaaaaaaagttaagtgttttatagtattaattataaacgaagggagcacttaagaaagaaaactaaataaacgaaaaaaaatgttcaattattattccttatagtttttcggtttatttctgaccacctacaggacgcttccgtagattaatgacgttgaaactgtttcttaaacatgtaaaaggacatgcaaacacgtatgccacatgcgccacctacggcgtgctgcgtgcacggtctcacacatatgcttatcaagtgcgtcaaaattgatttgcaaattgcaacattcaaggacacgcacccccatttgtcccgttggcagtgacgtgatttcgcagcgttctatcgtaaatgccagaaaactagtaatttaattttgatctgattaatgtcaacgaaaaaaaatgtgtcttatgataaaaattttcttagcatatgtttggtttcgggactaagtgggatgggatgaaaccatccctgattttggagttgggatgattccactcacatgtttggtttgtaggatgggataattccaattttttgtttggttgaaaggatgaggaagagatgggatggacgccgtttgccatcaccgtcaacgaccgtcgcctgcgccacctgcatccacgcgtggaacaaccggatcaagcacagcggcagcagcaggacggccaccaccgccggagcacccaacccgctggcccaccgtcgtcgccgcggctggatcgggagatcccctgcgccggatccgccgccgccgctctccctacctccaagtttcgccgccgccgagtcccccttctctggatccgccgccgccgccctccctacctccaagcttcgccgccactcgagcccgccgcgtcgacatcaccgcagctgccgcaaccgctctcgtcgagcatcacgatgagcggcgggatggcgccgagcatctcgctcgcggcggcgaccggtgttaaggcaaggggtcgtggaggagcgcctgcggtcgcagaggtggtggcaggcagtcatggcgg

SEQ ID NO: 19476 - DNA, 583 bp, Oryza sativa
agtgagacagccgatgtctcgtcctggtgaaaagaatagaagatctcgtttggagcagcgtcgagttgtaagcccttgttgagcttaatggtcggcaggtctgtaaagccaacttacacgcaacttgggataaccttcttcctgtttctcaatccagcgtatcaatccaatgaaagggggtacatcgacagcccgaaaaagagcgcaatcacccactctgaactcacgtccgtcctgaaaaatcaataaatgatttattacctcttgtaaagaaaatagccttcgcacggcacacgatagtttagtacttcacaagcatggagcaaagcaggtctctatgactgagggatcagttgttatgttatgcaagaagttagtatcttacaagcaaaaagttgcatacaaaaaaaaaaagcaaccatgtgtttcggaaacactatacaattcagttttataacatgattgtgaacccaaggaacgataactatgttaaacatgtaacaagacgttggttccactagaacatgtgtttttaaccatgccaatgaccttggtcgactgcaaggtatagagcatgcttatt

SEQ ID NO: 19477 - DNA, 4007 bp, Oryza sativa
agcggttgccgctgttgcgtgattaaagggggcgtccagagctcgtcacatcactctcctgttgccttcgtggcttcgtgtcagctagcgagtgtgccccgcctgcccggggaccgcgacagcgaccgtccgtgtcctttggcttggcatttcccttccgtttcgtgcttcgttttctcttccccttcggctcgttcaattgctcataggagtataatctttctttggctttcctgatttcctcgccaggttagagaaatttgtacagtagtcagcagactattttagccaggttacagaaatttgtacggcaatcacgaatcagcagactatttgatcattctatggtcggaatggaagtaaacattccgttgagttgatttttattggtagtattaattagtagaggaatcaggttaattaagcttaccaagaactaaaagacacgccatacataatcgagccagccagcaaggagctagccacagcgagatgtcaggaaatatggacaacagcattctagtcatcaaacatctacacagtaggaagcgtcatggacgaggacgaccaacaactttggaggtaatcaggtagaggaaggcatgcagcaaataatataaccacctgcatattgaactatttcaaaaacaaaatatttttttgacatgaaaaacaaaataatttgcctcgcagaaagcgcctagaaaccatcagcgaacctcaatgactgaaaaatagcaacagatcattgcttatcggtccactaaatttcttaaccattgcaaggcaccgatggatacaccagaatgcgctttacaggcattcaggaactgcagatcgagtgtcatcccccaggatagtccactagagttacatgggcaaacagatgtaacgtttccacataaaatacatgttacatctaaatcatatgtaaggctgcagatgtgctccaaaaagagaaaattggtctgtcataagaaactaaaaacaaacaaactgaacctaattacagcggcttcagatgtttcttgaggcccaggacctataccgtttccatctccagtcataccctcccaagcaaattagaagcatgcctgagtccctgacagctaagaaaatctagcaaagcaactgccaatgccaaggaaaattgtttccaggaaagtatgaaatatgaacatttacagcaattacatcaaagcatcgttcctctcacattcacatcatcacaaggaaagtatccatgtatgaattgtatattccagcaagggtgcagtacacgaacccaagtaccacatgcagctgcctctgcaaatgaaaacacagcaccttaatatcaaaagaaaaagagctgcaggtgataaacaaagcaggtcgtttaaggcgagaagcaagcacatacaagctcattggatgccgaagtcgctgagaaatgataccagcaaaagctcattgccatgacaattgtttgtatgaagatcgttcggcatcccaactgccctctggttccttcctctttattccaacacctggaggcatttgatacattctcgtatgctcgtccacaaaggcatgtggtggcgcaataaaattttgtctaactggtaaagttactctatcgtccttcacttctacatccacacttccagggccagaattaagatcaagaccctgtcttccccatttccgattattgtcatgtccaacagtgctgcttccttcagggaggtttattgcatattgtcgagtatgctgagcaggtaatgcacctgctgggccaacaagcgtcggagcaattgtagggaaataaggaattcctccaggtgcagaattcgcatatgatgtagacccaattgaaaaccccggtgcttgaaggtggacactaggagtaaaagggaatcctgcatactgataagcaggagggtgaaacatcatagtcggtgaagttgaaataactggagtccggctgggatcacttccatgttggacaccatctgccatcgatgtgatgatcctctgggttccacttccagctgctgtctcgactgggtgaggctgttctcctctagaaggtaaaaacgactttatagctacaggagcacaagcattggcagaagcaaaccatggtgatatgttactcatttcagcactgttcattctcatgctagcgacttgaggtaggaatggtatgctactggtatttttagatgacagactccttggtgcatgttccgtaccagcttcatcaagagttggtccattattaagatcaaaatcccttgagctatttgcatcggaactagagaaactccaggtaatggtcttgataataatgggacttcaaccctgtggttagtgttagacacaatttgcccattctctgcaacttcatcggccctattcaagtcaagctcaaataccaacactacgtacaggaccattgcttcttctagtgttgccagattcagaaccagttgtctgaacagaactctgagagacgtcttcctcaagaaattgctcatctgcaacatttaagtcaatgtcaagtgctgggcggtgtttatctgcagcatcagaaactggaatgccaggtgcgctgagagtcatctcaaaaattttccttggttctgcaggacgaaatgcacttgtggctgctgaacctttccagccagtctcaggctgaaatcttagtaggttctcaggaggaacaaagggacctttagctgtagcagctacttttatcggagcaggtagcccacttgacataggtgatataaatggagaaagacaaggtaaattaattgcaaagaacacacagcaggagaggtttctgcctcagactgatgcacgtcgtctccaggtattccttcattcaagtcaaaatcaagcttggctgtagcacttggcctgatcttggcagcaaaagaagaaccatcatctgatgagacaaggtcctcgttcccacttgcatcatcactcgacttctttgagctgcgccttgcactacgttcagtatcctgtgagacagtagttccaggtcttgcatgactacttgattcactggaattgtcttttaattctttagaactaatcccattttctggaccaaatggtacacctgctggtacagctagttttgtagcatcagctgaagtggaagaaggttgttccttcttttcatcctctctcagcactgcgttaccaaccagcaaaccatcagccttattcacctccacggtcgaagatgaaaatgaaggctccacatccaatttaacagcagcactgtcaccagatcggtcatggcttctgaattatctggtagacactggcgattcttctgatctgttgactttaacaaaccatgagattgtttatctccaccacgtaattcacttgtagtagatggatatatattcaattttgcgtcaatcttgatatcaactggctgttttgtgaccgacttgtcaccatcaccacctttatctgtagtcctcacttcatgattttcagtcttagcaggagattcaacagccttaacatctattccaggtggagagggtagcccagaagatgtgaccttattgtcctttgcatcccctaggtgttgttcctcctttgcgaccaaacctgcaccaattttctcacccttatcagagatgattttctcagcatcatttgttggccctgcatgccgtgacaagcccatatcactttgtacttttagcttcccaatgttatctccttcacagccctcttcatttcctggtgaatttctaggtgaagcagatgaagaaatcaactcagatttagatatttctccagcaacactggcaagaagattcattgctgtatcatctccagcttgcaaggaatgactagcttcagagtacttgatttcaatcaaagcattcatagggttgaacgaatttctccccccattttcacttgagcaagccgcctttcattagcatctgagcaaacaactcgggaagcacatgcatctttgc

SEQ ID NO: 19478 - DNA, 694 bp, Oryza sativa
tcaagcatcagcagcagtacacaggagagcgaggaggaggtatctataacaataggtagcctcctcgcccaagcaaagaacaacagtgggcatagtcttggaaggcgcctctctcaattgggttcaatcccggtaatatacagtcatccatatttttctttgttccccccttggcatttgttcccttgaactcatcttgagctgtaccatgattaaatataggaattctctctcaattgtacataaatattccaatacagtactcaatataataactaatacgataattattacagtttttaactgcagattgttaaataaaaaaataaagttcttaatttacaatagtgtgccttcggctatgttttatgacaagttactaatgccctcatgtatggcagcacactcctcgagttaatggaaaaatccctaatcttgataatgcaactttggatcatgaaagattgtcggaaaggtaaaaaaaaaacagacctctctctctctctctagaacagtatggccattgcgcttcttatatttctcatttgtcctgatccttcttgacaggttgggaaattatggtttggccgagtttcaaatagagggtgatggaaattgtcaggtttgttttaccattgaacctaaatcatcatttcatttatagatacggtgccgcatcatctacactatttca

SEQ ID NO: 19479 - DNA, 655 bp, Oryza sativa
catttgcaagctgcaccagcattttatcagccttcaatatgctatattactgggtctcttgctgagttgataacttcaacgtgttattgacatgcattacagcatttttcctcaaaatagaattttctgtgatagtgtgatggcttaatatgtcctgtttcaattccagaccatttgggtgatgttgtgtatgttgagcttccagaagttggttccacagtatcacaaggaacgaactttggtgcggttgaaagtgtgaaagcaaccagtgatatcaatgcaccagtatctggagagattattcaagtaaatgatgaactaagtgaaaaaccaggatttgtgagtcgcaattgctacccttgctagactaatttttgagtaatcactgctatgttcagttgacaatttgcttctgcaattttacacagataaatggaagtccatatgagaagggatggatcatcaaggttaagataagtgatccaagtgagttaaactcgctgatggatgatgagaagtacaagaagttttgtgaggaagaagatggcaaacactgatcaatcccctaactgctggatttcaagaaactatgcagcaactcaccatcatgacaatgagccatctcgcctctcctacacattatattattctggat

SEQ ID NO: 19480 - DNA, 12675 bp, Oryza sativa
caagctctctcaaactaaatccaccacgcttgatgaattcaacttcctgaaaatacacataatgttaaggaattgcatttaatcttaacatgatgataaatgggcagtacatattgctttcaatatcttaataaaggatacataggaactgacagaatattgagatcccacaagtggttcaaatatcaagacacaaagatcatcttcattgtcatctccattgctcgttgtcttcttgtgagggttcaacgttatctgacgtgcagctacactggaacagacgcacttgattaaaacataataaatattaggaacttggcagacattggatctatgacgtggataaagatcattatgctatttgcagggagattgtatcagaaacactgatgataggaataactaggaaagtgggagcgggggctgcagggttaaggctttgaaattagaggaatccataaagacatggataaagaaacattactacttatagctacaactaagttacatctagacagatagaaatcatgggccagagatctaatttgtgcagcctagaagcagagaatgaacatacatacataacaaagatggccacaagaaaacgtacacaatacagatcaaagctgaaacagtactgtttgtggttgcgatgaataggacaagatcaccagataatggttatggtgaagtgaataacagccagtttcttttgctaacctgttccaagcacgcagtagcatctcagagccgccaccaccttgttctgcctcaagtccgatatgtgttacgagatcaacaataaggtctgataagctacaagttgatggtacattaaatttaacgaccacctatcagaaaaagaaacaagttgagtcagagaaaattaacaataattatcaaatgagcgactgaagattacacattgttgtagatgctttgccaatggcagagagataagctatgcaactgccagaactgtaatcagaataggcatgtcaaatccacaaccttcattgttgtgatctagaagcaaccacgcacaattacaattttttttaaaaaaaaaatcatacatcacattatccttgcactgatactcagacttaactaactcaaattttagtgtgtctacttcagtagtcacgacaatacatcccaaatccatatatcattaatcactgaatcaattgctccaatcacacaaagttccaaaccaactctaaagcctagtggcccaatttgatataaagtgtaaaattaactcagatttataaaaccgctgaaaaaaaaaagatattttccagcactaacaagcaacagtgatatggcctaaatgtttgggagaggaggacaaccttttggcccttcactgccacatcaaattgcgggtatgacccgtgtggcatccctcggctctgaatgagctctattatcctcttcctctccttatgggccagatcctcccccaccgccacatcagagctcacagccgcatcagggttcacaggtttcacagccgcatcagagcttacagccgagtctacaacgccctgtaacacaaaatcaaactcagcccgtgcaaaatctcacctccaaaatgccgccactaaaatttcaaacaggaaaaataaacaccacctcattggcatcggcgtaggccaccggcagagacgcgagagcggcggccgcgccggcggcgaggaagccggccgtagtgaacgccgaagcctcacgcgcccccggggcacctggtaccccattcaaaaaccctaaacgtgatcccagcgcgtgggaaggcgacgcggcggcgggacggttctggagaggcggcggtgaggaggtagtggaagccgccgcctcggcctgcagcggccggaggaggcgggccagcgggaggcggcggcggagaagcatggccatgccggcggcggaggcgtggctgggtttgcgatttcgaagctcgtgtcggctcgctcgagaggctaccggagagttcgcgccgcggcccgcggggttgttttggcgttgcgtttttgcccccccgcccacgaaagaacaaagcgtaacgcagaaatacgccttcatgtgattctccaatttgctcgctctcgctccgagttccaagcaggcccaaaatgggcttaaactatatgggccgaatcaacaggcccagaactataacgggccacaagcctgcagttcacgagcccttacaaaggcgcacacacatacactatctcaacgagcacctcagctagcgtatcttaaaattgacgaggtcaccaaagatattttagtggtacgtcgactacaactaaaagaataattaatcgtaaatgcgagcacatatgttaagtataagacttaaaatctaggtgaacagtattacagtacaccacaaaaaactcaactagttgagctatactcacttcgcaacctgatagtttattcaagagtttatttgcaggccatttggccttagtttgcaacttttacatgcctctaaaatgatgtgattcgtctattgtatctctatcactctcgttctaaaaagaatcaagagtgcaaatatttcttttcctcttatagctaactttagctgccggcatgcatcatcaatagtacgagtacgtgtatagtattgctacgatatatatcaagatgaattagcgtaatctgcatcaagaagaaacaagctgcttgaagttaatgggcgaggcgaagcccatctgcggcggcgcggagtagatggcggcggcgcccttcctggaggtggcctgcgtcccgtgcaccccgtcccagaacaggtacccgttgcggttgccgcagtaggtggagttgggcgccccgcacccgacctgcgcgttgagccggccgccgccgcagcacgcgctgttcaccaccttgaaccccgcggcggccgggttcgccgtgaggtaggacaccacgttgtacgagctgccgacggagtacctcatccccgggagagcaccggagccggcgagcctggccatcgccgacctgagcccggagttgaaccccctggcgaggtcgttggcggcgtcgacgcacctggtggcgcccgcctgcgaggtgacccgcaccgacggcacgcacccgatgggcggcacgtcgatgatgccgaaccgcctggcgcccaggctgtacagcgcctggacgtgccgcgtgtagttggacagcaggtcggcgtagaaggacggcacctggctcgccgtccggttgctctgcctcaggaacgcgaacaggtcgttgccgccgtcgctgatgaggaagagagacttggacagcagatcgtcgatcgccgacgccgacgccgacgagctgttgccatcgccgccgccgttcgacatcatctttgacttggtggccgcgaagtacacgatttgctttgtcagcgtgacgacggttgtcccctgatcgatcgacgagtacacgaagataatcagacacacatgtaccaagatcggtcgcattcattcaactatacactcactcaaatactatattaaccaattattgagtacaagaaaaggctaccagtagtaaattccttgcacagtttctacaagaagatgaaattttcttgctgtatccaagcatgtccttacagtggtatcgagaatgccggatcctccagaagcgtaattggcgccgcggtagcctcgcatgagctgacggctcgtctgcggcgtcagcgacaggtaagccggcgggctcctcttgaatcccaccagtttcgctgaaccaattgttcatccatgcacacacatcgtgagttccattattagcagaaattttacattgctccaaacaatttgaggcgaaatatgcacggaccgatgaagtcggcgacgttgtagccattgctgaaccttccggtgggcctcgagtgcgggaagtcgatgccgtaggggagctgcagcggcgagttccccggcaggtactggttgttcccgacgtccaccgtcgagtcgccgaacacgtacaccgccggcaccaggtgcacctcctccctctggccggcggccgccgccgccgccgagatatgcacgccggcgctgagaacaaatgctaccaccagtatcgtcactttcagcctcatcatagcgcctgcagaggtaggctgtagctatccaagcgagaacaagaatctactgtttatgtgtggattcagataggtgggattggttcctttgttcttcagcgagctgctacgtagcaactgggtaatattactaagaactttactgccaaaaggatgaattgcaactcaaggtagctagcagggtgcagggaatatgtgcttggaatggctgtggggcaaactgcaggtgaccacagtgaagaagaagagaggcacgctgctatcaatttatacacacacaaagtggtacacgtatcgtatccgttcataacaacggcaagcggccgctgcatgcgcttccgcttcccacgatttataaaacaacatctactttgaagaaactatggtaaaaattacgtattaaaattgatgtaccataaaaatatagatttagtatcaaatttgttatgaaactatagattcaacacaaattaaaacaacatactccctccgtttcacaatataagtcattttatcatttcctatattcatattaatgttaatgaatctatatatatatatatatatatatatatatatatatatatatatatatatatatatatatatatatatatatatatatatataaaatactagaatgacttacattgtgaaacggagagagtatttagtaaaaacaaattacggaactaaagatctagtgtaaatttaaccaggaaatataacattcaatataacagtggtgctaatgataaaattttagttatacgatatttggtcttaaatatataattatatgataacattttagttttgtgatacatggttttaaattttgtagttttataatagtttaaacaaagtaccatgattttttatactaggtggcgagaatataagatgaggccttgggactggagatttggtttcaagccccatcgcatagatttttcttcctcccattcgcatgcacaccatacccatatcgatcagtgagacatgtatgcatagcccggcctgtgcgaggctagcttgaccatcaagggatcgtcacttgttaattttttttcgtgatttattgtcaattagccacacttcccccacctgctagctcgctttgcaattgcaagtggttaactggtgacagcgacatatatcaaaaccatgaccatttgtctctgatcgaaagaggagtccttgatacttcctccgtattttaatatatgacgctgttaatttttttgacaaacgtttaacttttcgtcttattcaaaaaatttatgtaattataatttattttattgtgacttgatttatcatcaaatgttctttaagcatgacataagtatttttatatttgcataaaatttttgaataagacgagtggtcaaacgttggttaaaaagtcaacgatatcatatattaaaatatgaagggagtacttaataggaatttaatcggtgatcagttactagctactacagtactaccacatgagagcaagttcaatagtatagtcaactactagctccaattcatttatagccaatctaatagctcattcatacaatagttacatactactccctccgtttcataatgtaagtcattctagcatttcccacatctatatatctagattcactaatttccatataaatgtgagaaatgttagaatgacttatattatgaaacgaaggaagtacactattaatacctggtcccacctatcatacacacactgtctcttagagttcgtgctacagctggctataaatctgtagcccgctgcctttctctcttctaatttatgttcttaaaatatgtttacaactggcttatagtctgttattggacctgctctgaagaagaacaaacaagacaacctcgaaaaagcggaacatgagtactacattcggagttgatctttgcatggcatgcaagcaacagaggagctagtattggctacgtacatacgtacagtacttacctaacggcgtattgggctattgcctcctgaatgcgtgctaagcactccaaatacctgtacgtgtgtacatgtgtgaatatcataagatagtcgtatatatcctacagttccatgcatatggtcaatttttcgtgcaagtctggccgtcggagcaaacacagtcagaaatatatcgatcattgaattgtactctaaggcgcatctctcagagcatacgtaatttattctgtagcaatgcgtccacacgtgcttgcataacagcatatgtgtatcgatggtgactaaactataaagtgataaggcagtcgaattatatttgaccactactcataagtcataatcacaactcatggctaataactataacaagtattttaggaactactaagatagtactgtttgatggagtatccgcttggaacagatgatgatttcactagctaccgatgaagaatcacgcaacgagtgccatgagcgccaccggcccatgccatgcgcccatgcctcgatcgttgccgttactttctataaccaaccgatatgcaaatgcagtacagcaataatcgatcgatcgatcggaaaagggaaaaaggctagagcctttgggcaagtgcctaaatggactagtggtcatccatcgcacgatagataacatagaccaatctgttgcttgcgtgcttccgtattgtcgatagaataaggatcagatcaggatatatcacgattcacaatgtggtagaccggtagttggcgaggtgatcgagcgcccccacacgcaagaaggttttatggtcgtcaccggcgtgatggtgccatttggcggtgagcactaccggtcgcaacacacaatcacaaattcgcaatgccatggcgtgtacgtgtctcgttctcccataccgttgtccttccaggcccttgctgcacatgcacgcgcgcactgctgctctgctctctgccggcctcgcataaacggagagacacgcacctatgacgtcacgatgcgcggaacccttacgtgcgtgcggccttacgctgccttcatggaggattgggcgtttgggcatggtgcggtatgtagcgtgcggcggcggtggcggagctagaaaggctagaagcatcaagctagcatggcaagttcgttggggattgggggcttcgaccgcgcgcgcgctcgtgcgaaaggatggcaacttggcattttggcaagcgcggggctcgcgtgtgtcgggtgccgactgccgaggaagttgtgctcgcgcggcgcgcgggcgcgttggacgaggattcgaggaacggaggcgtagggcgagccggcgccgatccgtccgactgagtcgtcgtcatcgtcagcgttttcacaggtgggcctaaatgataaggccgacatggccatatggccgataaggccgtcgtgcctcgtgcgtgacaaccttgttgggcccgtttctcctcagtttggtcttcgaaagcccgcatcacttgggccaagtttgcactcggtcaggcgcaggagacgcccaacccactcgatcgtccggtgccccaccgccggcggcagcgacctccgtccaagtgccaccgccggcgccggtggcctcgcagatgcaaacgcacgggaacgggacagatcgccgttgtacaaagtacaaatggcgccgccgccattgcgagcgaagggaggaaaagggcggcccgcgagctacgtgcttacgttggctctgtcgattattccagactccaaacaattgtgttatctgactccccgaccactgcttccttcgtttagggcacccgcaatagttatctacaggttctttacaagagatccatatcagcatatttttctacttgaaaaaataggaaagagattaaataaagagagagagtaaaactatctactaacatggagatagtctataaagaaaaacgagtcaataaatgagagaactatagatatacatgtagacatactattgaggtggtttactattaatatagtatattgctgagatgtacatgttttatagagagcaccttactttatcattgcgggtgctcttaggctaacataaaccaatgttttcttctcgttcctacctgcgtcgacgtgtgacacccaaatcatcggattcagtaacggaaaccataaactttaccctaaaaaaccacgagttcacacatcccaagaggtaggcaaggcagcggccacacgaatcgcgcaaaagatggccacgctggtatgccttgcatgctctcacggttacgtgccgagattctcttctgccacgttgcaaaaagagacgcgacctgtcttccctcttcagagttcagtccccaacattttttatgggacagataccagcaggcagcagttgcagttcctcaccaaaacgccatccccatcctccctgccatcctccctgccgtgagtgccttcttgcgtcgagtttgagcaaagttgaatacagtatctgctgtgttttttaggacaagttgatactgtggaggagatgaagaggttacttgttcgtgggctgttttcttctccatccaggggtttgttgggcaaatctcctgtcaggcctgcactttgcaacgatgctcttctctccagggtgagttatcttgtcctcccgcttcctgatttactttttggatctcatgccttctccatcattgtattactgtcgccaaatactccataaaaaaatactgtgatttgttcataagagggcatatttctaagctactgctcaaagccgagaggccaaaatgttcagttaacaactcagatttacggttccagtctaattgatgagtactacaactcgatttgtagttgcagtcactacgcggttgaaaatttgcaatctaatttatgacgatgtcaatttttgtagtatcgactagtgtgtttataatgttccattttcttgtaatattgtcagttcctctcaacggggaaagatgagaacacagtgaccgaaatcggagagaaggcaagatcaacagcggaacaattcctcaaggtggccaaggagaagactgacgaggtaagcgagaaaacaaaggaaacgatgcacgaaacaaaggaagcagtggtcggggagtcagatgacgagaaggagaagttcaagcagagggttgaggaggggaggtaccatcagaattaagtggctagtgctcaattatactccatcttgtagcttcagacttcagtgatggcctctgtcaaaagtcctagaacctgcagattgtccagtactactaggcttggcatgtactaggtagtatatgttgtttgtttcctcctgttcaatgatctgttgtagaatgaataaggtcaactttgaacttcatagtgaacttttgatgccactacttgtcattttcgcagaataaataagatgaacctttgtgaagctagtgaatgctgaattggatgtgcagtttgcaagaatttaactggccatctagtaaccaaaagggtataggcaaaaagagaaaaggatcggatggggatgacctatggctgtgagcatcaaatggcgatggctcaagaatttggtctgaactttgttgaaacaacgtttcagaggagagctggcaacgtctgggacgctggatcttaaaatatttgtaatactaatatagatttgcaagtagtgcaataaaacaagttaggaactgcaatcagctcatcatgcaggaagtacatggaaaaaggaaaccccaatgcttacgctgggaaatgaagatgagtgaactccacatcagctagcacctagataatagccatatcagtgggaacagatgttgtcctgtttgcttgtcttttctgcaatatgaatttcactatcagttttttcagggaaatttaagtagttaaacacatcacatagacagatcgattagtagtacatggtttctcttttcataagatcagtacatgagttatggtggtgaaattttcagctggtatcgactggtaaggtaaccattgacactgaagaatgttcttcttttttttgtttttccagctccctttaggagttttcggtgagaaattagtgttgttgaggttaaacttatccagggatcaacttacctacctacctaccatatgtccttttcctgttagtttctccatcccaatagtgctattgccccattatgaactttgaaaagtaagcatatatatgttcgtctaattcgaaacattttagtgctgttgttgtacagtactgatttggtattcaaatcctaagtatatactatccatctaattcaaaactgtactaaagtgctgaactgctgatgttgtacagtactgatctggtattcaaagcagtactggaattctgatgcggtaccattcatagtttttccttgacaaaaatatgtcatgtcgatttcactcgttatctgctttctgtgttccaccggaaatccacatcaccggcgccgacccatcgacagtcgaccacaggtgaaggcgaccgaaggtcaggtactcagccactcaggtgggagcaggttaggccggatggtttagcctcaggcaaagattcagttttgaagtgtcctcgcaaatcatcaagctacatcttgcagaacagatgaaagtgaaaatgatcacgacgcatcctatcttttgggtgatactacggtgttgtaagttgtaaccgatcaacatcaaaatttatcatatcaaccgagagcgatgcgctaaaaaacaacgaatcaatcgatattgattcacatgtccatctacatgaaggtactccctccgttgcacaatataagttatttagcatttctcacatttatattgatgtaggtagacagtctagatttattaacatcaatataaatatgagaaatgctagaatgacttatattgtgaaacggagaaagttactgtacaaaatccagcaaataagctggcatgccccaactattattatacacacatgcataagcacaaccctacgaataaaactgcgtctacctaatcaaccaaccaaatcgttggtctgacagtaaaaacagcctagtacccagcgatccccgattcctcgtcagcctgctgcttcttgccgccgccggcgttcttcttctggcatttgtccttgatccactggaacccgtgcgccgtgccctccttcaccttcctcagccccgtcgccgccgccgccttggtcttctccacgccgccctgcttcttgccgccgccgtggccgtcccgccgcgccgccgcccgcgggctcgggtcgccgccatagtcccactggtcggcccacgacgtgccgaacgagctgctccgctccatccagaaactaaacgaagatcgatcgatcgatctaacgcggtatcgcctcgagtaatcgatcgatcagggaaagaaaactgtgttgctctcctctcctcgcgaaaaattgtgaggtcgcagtttttatagtataggtgtgcacccgcgcgcgtcccgtgtacaggtcatccgcgaagaattttcggtgcacgcgttgcgtttgtacgtgaggtggatggagagcagttgcgattctggatgtgtccggagattggcggttgggttctgtggtttctcgcgcggctgccggccgtatgacagttttgaccggaaagcttccagcaatggagagaccgactggtggggccagcagtatgcctggcccacatttctgtggcgtgcggatatctggcgttgcgttgaagagtctctggagtctagaatgcgttactactttgaggtgcgagaatcggtcgcacgacatttttttaggtggtcgtccgatttgatctgatcaatagaagggctgcctgtttgacaaatctggaacgaggaaaaactcaacaagtggaacgttttttgaatgtctgtgtttggaattgcttttgtgatttctttgtttaataaggtgcataccacttgaccaatctctaaaccactggataacgtcaacaaaagcaacatgtgaaagtttcatgtgtccagtcatgacggctgaaaattttaactggctcagggaagataaattgtatatctataaatatacatatgtttacattgcatgtaattataccaaatgggtacttatagaaaattattgtgttataagaataaatctaagccattcgggtgagaccgaattatgacggtttagatcaaacaatagtgcattgtagatgcaacatgataattattaattcttgaattttaaattcattagacaaagaatttttttaaagcgtagaaaaaactaaataatcttgaataaaaataactcgataattaattaaatcataaaaaagtgtaattgacaatctaggctaagtatacaatttattagttctaaatttcagagctattaatttaataaaaacaataaattgtgactcaaacgtgaatacgtttttaattcttaattcataatttactgtagcgcccgttccgtcgtggcgcctagcgggaaaatgtaatttctaaaaaaaccctaattgcgaaaattgtttcttcgcttgcgggctgcag

SEQ ID NO: 19481 - DNA, 1938 bp, Oryza sativa
ccgtgctccgtagcgcccgctcgtcgccggcctcgctcgcgtagctccgcccaatccgacgctaggaacgaattcccggagtcgcgtagatgctctagctcgcccgaatcggtctcccgtcgcgccgtcgccgtttcccccttctctcgccgccggttgccgccgccgcaatctgccgccgtcgagcatcccccggcgaatccgagccgttggctcgtttcccctcgtcccgtgcaacctcccggtgtgctcgctttcgcctgtatcgccgtggttcgctccgccgctcgccgccgccgtccgccgtccgttccggccgacgtcgtcgtctacctcccgccggcccgcgtggcagccatgtaggcgccacgtcggcgccacctcggccgcgaccgggtcaagctgaccccggtccgccgcttccctctgccctccccgtgcgcgtggtccacggtgagccgtgaggctgcgcgtgggcccgccgtacccgcatcctccgcgagccacgcacatgcaccgcgccccgctccacaccctagcgccgcgccgcgtgctccctccgcacggtgagccgagccgctgacaagcgggtcccactcgggaccacgcgagatggacccggtccaccggctccctctctgccccccccccccgcgccctattgggccgtgtcctctcgggccggccggcccatttagctcggccgagccgccccttttctctcgggccgcgccctagccgcccgagggaagtttaattcccctccctctttcttttcttttttccaaaatggtttaattaaatcttttttcctttagaccaaaaatccaataatcttagaaattcaatatcttctcaaccgtacatctgtttgactccgttcaacttccaaaatttctcaaatctcgagatctaccaaatggcacgcttagaggtcaataatagggctttattttcgccgttgttgagtcgtctcattcgtgtgtagcttcggagcccgaagaccctgagtgcgcagatttcgaggatcaagctcaagatctcgagcaaggcaagtcacctttgatcatcttgcacctatagtttaaatctaagtatttcttttttgcaagtattgcatgaataggtttaacacaagtatttcggccgcggcttgtgagatagcatgtcggtcccaatcctaattgctgcaattaccctccttgaattattgaacacttaaaccccctttgtcgactgatgtgcttcgatgcacgggccttcgagcacgggcatcggaacacctcccctcgaatttaaaatatccaacgatgggtaaaacttgaggttttacaaaagacttggaaaacccgacacatggatcggtgcttgcgaactaaatgaatttctaaaatcgcggaccggggaacataccgggcgtacggtttcccgctcttgcacctaaggaccgtttccttggaatttcatccgaacataaggcaagtgcgaccacatgggtgtaatgggacgcccctggctgagtaattagctaatcaggggagccatgatgccaagagacatgtggattcaacggggtggtgtcggggagaacccccgggcttcctggcacagtatggtctgggacctaacctggtgttggtctgggacccctctcattggcatatggtaaacctgtgtcggctttcgaaatgccttgtcatgaaagcctcaaggtctccagacgtggccgttctgcacgggctgggtgatccgggttagtaatgtcgtgtgggtaaagtgtaccccctctgcagaggttattaaactgttcgaacagtcgtgcccacggtagtgggcggatgtgaggtgattcctagcgtagttttgtttgactactgctttgtgaaattgatgtcgtgaaatgggatcgaggtttggaaaatctgccgctgatgtgat

SEQ ID NO: 19482 - DNA, 1920 bp, Oryza sativa
aattaacaatcgccgagaagcacggcgcacacgggacgacgcaaatcgctctcggcgtcatgtttcttcatggcgccatgatcgaggaaaccgcccaaacgaggaccgagaatgcaacgatcgcgaacggcgggggccagacaatactagtcatggccgtcgccgcaacgacgacgacgaaggagatcggcgccgagataacaacgagagacaacaacaagattctcgggatccaggtcatcatcctcgtaatcgtacgccggagccaagcgacccatcgtcatcgtcatcatccgcgtcctcttcatcgtcagacagacatccacgaaggtcacgcgaccgccgacaacccaccgccccagcgctgggtgtagggctttcggtcgttccctacgtgatgtccgatggcctgagagattccgacccggggccattgaaaagtatgatgggagcaccgaccccgaagaattccttcaagtctactcgatagtgctttatgctgccggagcagatgacaacgcattggcgaactatttaccaactgcgttgaagggttctgcacgttcatggctgatgcatcttcctccctactcaatctcttcgtgggcagacctgtggcaacagttcatcgccaatttccaaggaacatacaagcgccacgcgatcaacgacgacttacacacgctaacacagaactcgggggaatcattgaggaatacgtttggcgctttaacgagtgcagaaacacaattcccgaaattatcgacgcttctgtaattcgcgccttcaagtccggtggtagagatcgctacactacccaggagttggcgacaagacgcatcacaactactcgaagattattcgagattgttgagcggtgcgcccatgtggatgacgcgctaagacgcaagaacgacaagccgaagactgggggagagaagaaaccagccgcagacgcctctgagtcaaataagaagaaaaatcgcaaaaacgggaaaaggaaagctcaagcggaagtcctcgcagcagaatacgtgaaccctcccaagcgcccagacccacaaggcagcgatacaaagaaatcatgatgccccatacacaaaacggacagacattctctggaggattgccttgttttcaaaaagtcgctcgagaagcacatggcgttcaaaaaaggcaagcgagtacgtgttatcgagaagaacgaggagacatcttctcacgaatcggattctgcgtacccagactccgacctccacgtctcacacatcttcggcggctccacaacgtactcctccaagcgggaatacaagaaagcggaacgtgaagtctgttcgacatggcagggggctgcacccaagatgaagtggtctgagcagaggatagagttctcggatgaagaccaccccaagacctctgttatcccaggacgatatccgattgtggtcgaacccactattcggaacgtcacggtagcgcgagttctcatcgacggtggcagctcgatcaatctcctcttcgccagcactctagatgcaatggcaattccgcaaagtgcgttgacaccaaccgatcaacccttccatggaattactccccaatcatcgtccagacctctgggcaagattacgttgcccatgaccttcggccaagccaacaacttccgaacagagcagatcaccttcgatgtcgctgaattgatacagcttacaacgccatcatcggaagaactgcacttgcgaagttcatggccgcatcccactacgcatatcaagtgtcaagatgccgggaccgaagggaacaatcactatttaggggaacgcaaagctggcagggtgcagtgcgacaggcggagcctcgacatggtcgaacaaacgcccaccccacccgccacgtatgagccaccggagaaagtgagca

SEQ ID NO: 19483 - DNA, 2468 bp, Oryza sativa
acaagtgccaccagttgatttggagggttgctccttcaagttggttacagcatttcctggttgcatatgttgcaattttgaagaaccagatatcactggactcgatttcgcagcagcatcggcggctacaggtttagaagtcaaggccttcgatgaagaaagctgagacactgggcttttcagactagactcacttgagccacttcgtctgtttccagcactagaaatttctggaaacccaggtttgcctggccaggatacagcctgacctgataccactggtttcacatcatttgacttcatttcagcatcaacgcgcttcttccaattttcgacaagacactttgccttcttctgtatctccggatttttatggcttcgcagatgattaacagacttcccaatactgcaactttgtaaagcagtaagattaataggcaatttcgccagtgcacgaagcagggccaggacaagatcttccataggcttatcagtttctttaggactaccagcttcaccagacttccctttatgagcttcttgaagccaatcatcaaacacaggaaggcctcgcagttgcacaaacctaccaaggcagtcaggactttctgtagctgcaataatatcagctagaattacccggccaggcaaatctatctttcgctcagttcgatcaagttgcatgagatgtaccagcttctctacagcttcagcatgtggaagtccacctttttctgttatctttgtaatttcagactttagattctccaccttaaagttgcctgattcgccatcctcagcctttaggggacgctcacggtctcgcttagctggatcagttccttgctcacccctgtccctcttcttccctttggaaagaccgcagttttgggcaccatcagaaccagacttttgctgggcagacgacggtccattgagccgctttggtgagcgcccacctgactgaactgctgcatgcatttctagctttgttctgtgtagaagccgatttacttcttcctgccgctcctggtcatgagttgaacaccttagcacagaaaacgattctaataaaggaaggtaactgtagaacttacatttatataatcctggtcggtaagccaccataaacacttgttgtcaatatcatacacgcgccgacacacaaatgaagaaattccagctggaagctcaacgcctttacgcaaaaaagcaactttgcaaggatgcagcagtgagacagcggatgtctcgtcctggtggaaagaatagaagatctcgtttggtgcggcgcacagctgtgttcccttgttaagcttgatgtcagctggtctatacagccaacttacacgtaacttgggaaagccttcctcctttttctcaatccaacgtatcaacccaatgaaagggggaacttcaacagcctgaaaaagagcgcagtcgccaacacggaattcacgcccgtcctggatattcaataaaaaaattatcatgtgtacaagggacaaaacacaattcatgtatccaccaaaataacattgggcatatgaaaacactgaaaaatgcatgttggcatagaagaaatataagcatacttgtataaagaaagaagaaagaagaaaatggtatcatggtgttgttgaaacatacaatacacactaaaaatcaaattgcaacagaaatagcaatagttgccatgccattgaatttgttcgatctgaaagtaaagatcatgtaaagttgatggttacataattcaatgcgagctgtctacgccaatacttgcacccaggcttaattgtgatattccggttgtttttatcttatttctaactttgaaaagaataattattattattattattatcttgtttttatacaatacattaatgaaacaagtattagaagatgtagagatagatggtaataaaccgtaagttacatcatgggctgcacacggatccaaaaataatgccacatgcaccccttagccatatattctttggatatatcatgcccagtgattatccaagaaatgctactcctaaaaaatagacaaatgaattgttcgaatggcttttgagatgcacacaagcaagaacacgccttcacacaaatcttatgtaggggtgccaaaaattgtcaaattgaactgtccaaaagactcaatcaaataatacatggaaaaccatcttaaactactttgatgatagcacgacccacccaatacatccatcaaatgcatcccatatttactcggtgaaaatttgctgatatgccacaggttaccattcaacgatataagtaactacaaacataagtttatctaggcttaaaaacaaaggcgaatttggtcacagcaacatgctcaatttcatataaatctaattaacctttgtaaacatcaaagcgaatcccatcagaggaggcacctttaagaaggaatctgatgaagctggacggggaga

SEQ ID NO: 19484 - DNA, 6950 bp, Oryza sativa
atcatccccgccgccgatccctcctcgccgtcccccggcgccgcgccgcaccatcaccagatcgcgcccgccccccgccgatgcagccgccgcctcttaaccctagctcccgagcagcggatccgcggggccttcctccatacgcctcggatcgcccgaattcgcctcgcccgcgccggtatggacgaaacgcctctcccgcaaccgcagatcggagctcgaattcgcccgaatcgactccaccagtttggtggttcaactgcaaatttggggattcggggattgggtcagaggaggagacccggcgtggggtttggtctcgatctgtggtggggtggtggagaaatggagaaaaaaatcgcgattcgggaagagagagaggcggatttgggaggagagagatggttatatggagcacggcagagagagacgacggcgagcgagattgggatgaaggggaatgcgcgatgcggggggcgtcctcgggagaggaaagcgggggcatttccgtcatttcgcccgcggcccacctcgcccgcacgggagacgctctctgtgcggaccgccgctccgtggccccacctgtcagtcgcggcgtgcggccggctcccacccgtacaggtcaccgacaggtggggtcctgttgacttgcgggtgggcaagtggtggtgtctgtagtgatttcctcgcacgctgatgtggatgcgggtggacggatttgacaagtggctggctcggtacgcggtgccctctccgctcctctcgctcacgtgtcactgacgttgcgggcccaggcgtaggtgggccccacttggtagtgacgtgagcggtcgctgtgctcgggctgcgacgcgtgatgccgggggcgcgacacgccgtggacggcgggggcgggggaagttggcaacggccaccgagttgccacgggttgcttttcactggaaggtgggcccgtgcttttctctctcggcccacatgcgccgcggggctgtgaagtggacttctctcacgtgttgttcttttttatttttctctctctttttggttagggagtggagcccgtactgagatgggccttgtgggctgcaaactggtttcccgtgttttgcggttagcggatctgcagatggctgtcagcggcggagacgggcttttgcggcagagtgtctggtcgcacactgccataccgtcatgggacataaccatctccatcgctttataaacttcagaacaatttttgataatttaaagtagggtccgcttgtagtaaattcattttttttgttaaaaagaacttgatggatctgttgtccttcattagggtatatccccttcgtccctaaaaaacaacctaaaatagaatgcgacattttctctattatactaggaacgccacaatcacattttaggttagtctttctataggacggaggaagtagactattcttaggttgtgttattaactcaaggtttccaacttccactcctacacatcccgaactactaaacaatgtgttttttccaactatatatatataagtttttatctagtacttaattaatcgtatgttaatccgtcactctattttacatatgaacgggagaagtccccaacccctctaaaagaacaaaatcatagaatgattaaagaaaactacgtaaaataccacctcaaatgtagagatttattttttagctatagtcgattggatatctgcataactattatttattcccaatgatttacaggttgtacgtagaccatgtcttactcaaaccgaaaacaaaatatctataatcaacgtccaaatatctataatcaacgtccgattattatgttgatcaaatcacatacaccactccccgtaaaaaaaacacacacaccactgccagcaactgacattgaaccaaagcaaagtatagtatcggagaataacttagttgtagtcactcactcggatcttgtcacaggtatattcatcgaaactgattcgacgggaaatgcatccaccaaggaagccataccacatgtaacctccaatgcggcacatccaggaaggccacaacatttaaagtgtctttgtcgctatttcgaccatttgaaactaagttttcaccccgaaagcccacataccacatgaaggtacagaagaggacgtcagcatcgtatttggaaaggtatgtggcacccataggagtcacctatcgatgctcctagcgagacatcgcccgccccagatctcaacttgagcttgaccttcaacattgtgctggcgatagagaggaagggggagatacatgtgtgccaacattgccttatccaaccatctttgatagtttgaagaagccgatggcaatgatgagtagggtgacacctttagtaccagtgaggccaagcgtcaacatggtgaggaggctcgtcagaggaagctcgctgaaaggaggagaaagggggccgctgaaggaaggctgctaacctaagttttattttctctattggaggaaacttgccggagagagaaggagggggctcactagaggtaggctatcaccgtcatgttgccggaggaaggtcgctggctcgcgtcttgttttcttaccatgtcacattgtaagttcaagtgtcttaatttggtttcggtgattaataacaaatctaattatatgagactaacgtttttatgagcctttctttgactagtcttatttggatatggaagtaaaaatgatgagaggtatgtattaaacttcacatattctaacttggcctctcttgtggatccaaaatatagtgtgagcttcctatttaatctttgttgattatgtgcatatgcgttccttcatatccatatgtatgcacatcttgagggggagcttattctatattttgtttattataagatttctatcttgatttgaaatcatttttcatctcctctctctatattgtttatatcgggttattatccatcaccaaagagagaaaagattgaaagatcttggattaaacaatttgtgtaattgttactttggtgatagatgataaaccgatgtttatgggattaacctctcttttgcataagttgtctactaggttatttccgataatgagatgtggaagacatgcattcttttgtgatggaccttaatcatgacaaggatgaaatgcatggagataaaacgatatgtaccactttttatctcctactttttgataggttcatatatatgatttccatgttattgatatataagtgtgagactaatgtttactcgaatgttatcttatttagtctcatttacattgagaacatggagatcatgaaggtatatgttttatgttgctctacatcattactacatatgccttctctatatgtataggataaacccccattggtcattctctaattatgcatacacttgcatctcttgtatatttatttgtatgcatatatttagggggagcaaatcctatacatttattgtgcatgttctagatccatgttgttcacctattatttatatcggatctttgcacttgagattgcatacgagtatatgacacttgtgatgttaatgaatactcaacaaacatatccatatctttcatatgcaaccggttggtcatcaagtgaaggatgacaaccgatttgttgagactaatattctcctttgaggtgtgaaaaggaataggtcccactacgatgaggctaatgaatgacaccatgggttagtggtcaccaagccaaggacatcgtcatgttggcaagaatgaagtcaaacttgtgatgagaataaagtattgacaaaggatagacaagacctcggcataaacatggttcaaccggatggtcacaagtgttgatctcggctcaagcttgaccccaagatggatggcgcaaggcaaaggtataatgtagctaagaatgttttcttagtcttttcccggtcttggtgtttggtgtagtccggatttactagataggcgctgtactatcaagaggggtctatgaagcgagcttgtggatgatcttgtgccatattagttcatatgcatgcaggtgcattttgtgggcttgtctaaccaagtgtgatgagttttctcaagtcctaaaccaagagagaagtgggcatgtccaataggagtgagtgacatcttgtgggtatgtccggtggatatcctttggagtgtgagccctttatccttgacttaagttgtgtttcttggatggatttttcatgggttggatggccctttgaataagctttccatagagtccaagaacgccaaattccgagacccgagtcaagagatatcgccgttttactaacggtaggttgagctgaaaagtgacatgcggtctgaccgtgggccttaggccagtctgaccgggtctgttagccggtctgaccggcgtggcaaggccggtctgaccggccccattggtctgttgcactggtctggtttttggtggcgatacagagccgccagagccgcaaccggtcagaccgagcagacggcggtctgaccgagccgtggacggtctgaccggccactacactgcggtcagaccggccaggttgagtgggctcaatgattgccctgtaacggctagttttctagccgttacaaagttgtccggtctgaccggcctcacaacggcggtctcaccggtagagcacaaagttggggatttcggttccaacggctagttttggtggttgggggtatatatacccactccccagcagcaagagtaaggttttggcactccattgcattatcttgaacccttgcaagagctctcacacccttgtgcacttagtttatctagtgaggtgttatagagtgagttaagtcaatgctgaaaaagaaactacgttgaaaatatctcaaaatcaatctcaaaattaagtttgaaaatttaaaatttagctttttctttaacttattaggacatccgatgggagtctttttaaaggatagacttttaaatcgctaaagatatacatattttatttttaaggattgacttttgagccgttttggcttatgaacctatggcgaaattttgcgtcatgtctcgctcaaatgcaaagctcaaagggaccaaatactccaaagcaggaagaggcggggaaaggaaaaaaaaaaagaaaagagaaaagaagagagaaggaaaaacaagcgggccgagttgtgagtgactgcggtgcagatttttttcgccagcaaggccgagttcttcgctgaacccccaaaatctcacaacccacctcccctccgcctctcccatctacccaccggcgggcggcggcggcgacatggagggtggcggcgaggagttcgcgatcggggtgctgatctccgtgaagaccaccctcggcgaggagttcgaaggccagatcgtctccttcgaccgcccgaccaacctcctcgtcattcatatcctttccaaatccctccccatccggttctcccccccccccccccccatctcagtgctctgccactttcgctccccgtgttgttcgtgctttttgcggttgtttttgtttccatgacggggtagatcacaggaaggcgtggggagggcagagagaggtgagcggaggaacgtgcgggtgctcaaggcgaactacatccgggagttctccgttgtaggcaaggccgacgacccgctcgacccggccggctgcgtgctcgacctcgccgccatccacgcccgggaggaggccgctctcaggtgcgtcacactcccatctcgaccctgttctaccactgtgtgctccctatcagatgtgtttctcaggctgaagctggagtaattagattgatcatacaattcttgatgacatgtgttacatggcatatttttccagatactaattactgcaaatgtgaaattcagttttttttcctgtgataatcatcgagcgacttatgtcatagctgtcgcaacagtggacctgacctttctagttggtaaaagtgatatactccgtgttatgtggatatccagtcagaataagtgatagcaagtgaacaaggacacataggtgcttgaaaacaggaggggagatagaagaaaggccatgctatctagaacagaatcacactgtttaaactgttatgaagttcttggtcgttcatcaaaatattaagagtcgaaattgaatctgtcaacaagcagccccctccccaccccccaaaagaaaacctgtcttggttcacagattataatagcttagattttgtatttgagttggagatttatagtttgttgccttctggctttccatcaagaactgtagctactctggtcattggacaatgaagcgaaagacatgtgtgcaatgcaatttaaaattccgggatatgggctattagggctattatggatttcaagagagcattgaagactgtaaaacttggtttgacagtgtgtactttcgcttcttcaagactgtagtgcaccctgtagaattacagacatgcaatattgcaacagccaacctgttaaattgcttatgtatcagctctgagctcatgctattaacttattttagaaaccaggtttcaaaactggcttgtcatggtttggtttcttcaagcataaactgtaatctaaatgttttcttttgcttctacgcttttatgaattgttagggattaaatatgattttttataggaattaagtatacctttttcaagtttaaaatttatgatatattttaaatattttttgcacttggtatttggctagtgaactcagaaaaatgtttgctttatctactaaaaagataatttcgagatcttctgctgtttacttataataggtgatttttgcatcgacactgaatgttaagttactattttgggggtatttatgttttgatggaagcacagtacatggggatattatagtttgttggctggttagtg

SEQ ID NO: 19485 - DNA, 8370 bp, Oryza sativa
gctgcttccaggtgtggtagaatggtctcttcacgaattgatactttgttttgactgggttctgttaggtgattattgtcagcatttcgaaatttattttctgtttgttttggagaaaataaaacccatgtgagtttgacatgtcagttctgtttattattttccgatttgtcagatcttggttgtgccattgtacaatttgctcctgcttttagttaaagaatacaacacagtgatattttctgtacttaaggcaagcagacgctggcttcatgtttttcacagcaataaattttctttctttttgtttgattttattctgttagtgtcaaattgttttctgtcaatgtggcttactctaatttgttcgcaacaaattgcttttgacaaatcttgtaaagcttctctacatcatggaactatgttatatgttttgccagttttccacctgttgtcctcgcatgttgcattattagcacaactttttggtatatatgtgaaaatgtaatgaaacactgtttgttttaaacgtaaatttgtatgcatataacaagttatattcttctcaggcttccagttcagtgggacaagactgacattgttgtaatgaaggaggttcgtgtatgcaatccatacctgcctgaaaatgtcagtggaggaacatctgctgcaaatgaacgggttaagaaagtggtaatgcatcgatgcttgtgaaccatatttgtactaataatataaactactgcctctgtcccagaatataataagaagttttagagttagacacggttattaagaaagtaggtagaagtgagtggtggagggttgtgattggatgagtagtggaggtaggtgggaaaagtgaatagtggagggttgtgattggttgggaagagcatgttggtgaagttgttatattttgggacaaatcctaaggtctaaaagttgttatattttgggacggagggagtagtaaaatggctaatcattatgtatctcatcttttctttttggggtgtgtcttgcagcttgactttgaaaggaaaaggctacatgtgcgtgtacctggccaattctaacttattcggctgcttttcacctgaactccccctttgtactctactttaagggctgaatcatcaatagatttttctaaaatttgtttctgcaaaatccatgccataaactatctcatcagctagctaaatctgtatcctgttatagatatctcatcagctagctaaatctgtatcctgttatagatgtgcccttcgaataaattgtcatgctgatgttaattcagctgctggttgtaagagggctttgattgaggcaaacttagaaagtaaaatttgattgatggcattgaaagaaggtgagttatagataacaaaggaaagatggggagctacaatggaaaatgcttcattgaacttatgtattttgtgtgagatttgtaactccagtttttttttcttatacttcttggggaaacttatacttcatgggtaatcggggtaacctttttatttctgactgcagaattaatatagggagaatggaggcattttctagaccacaggaactgaaacttaaattgtccaatcctgtactatgctgtatctttaatttttttgttcaggttaagaagttgctcatctgttgtcgcgttcagtctgatttgtgatataatgcatagagaattgttgataccagtccactggcgtatatattctatacatgttctcacataattccttggtgtgactgaagaatgtgtttaccatggcaaaaataggctctcattcttatgctggatattctggagtcacacttgcatgggaatggatcttcgctgtcatactgtggaaacgttgttattatacctgatttgttttgctcaaacattgttgtaagaacgagttttttttctgacattaattgatttatacagcacatgagtattgctagccttttctgaacagagtatgaggcctggtttagttcctaaatttttttctccaaaaacatcacatcgaatctctagacacaaagcattaaatatagataaaaacgaaaattaattgcacagtttgcatagaaattacaagacgaatctttttagtataattagttcatgattaatcataagtgttacagtaatccacatgtgttaatgacggtttaattaggcttaaaagattagtcttgcggttttcagacgagttatgaaattaattttttcatttgtgtccagaaatttattttgatatccggtcatttgatgtgataatttttttttcttttcgcgatctaaacggggcctcaggtggtgtttagatccagggacttaactttagtccctgtctttagacactaatttagagtattaaatatagactacttagaaaactaattacataaataaaagctaattcacgagacaaattttttaagcctaattaatctataattagagaatgtttactgtagcatcacataggctaatcatggattaattaggctcattatattcgtctcgcaaattagtccaagattatggatgggttttattaatagtctacgtttaatatttataattaatcttcaaacatccgatgtgatagggacttaaaagtttaagtcccatctaaacagggcctcagtagatcgataagggaatatcaggctttatcacatgttgctgttgactagcagatcgggcctggccagctggaaagcccagctcgtcctatcattagcccagcaccacacggcataggtactgcatccactagtactggtgttttctttggaacaaatgttacactggacgttttgtctgcacgtaccggcgcagtactagtacggagtagtgcattaaattggctcgatgtgtttttactcctacccgcacggtggttttccatgcagggtaaaattagtcaactcataatcataaatgtggaaagtatagcgtgagagccattaatatgtgcatttatttctccaagtcccattcactttcatgtttgctgcagcatctgctctcgctcgcttctcttgtactcgttcgagggcgagagctccacatgccaatttgccagccagctgcctcattggtcgtctcaaacaaacaaatccccaggcttcacacgaattctcgcatggtcgagatctccatgcaatccaatctttctaatttaatgcggccgtgtggtacttaaacatgagtgcttctagttctagaatgccatctgatctgataataaatttattggagttagttggatcccttgatcacgcacggtcaggtgccccctaccaaaactacacttttgcttaatgcttatggtaggcgacgactactccggcggccaagagcccaagaagccaagagtacaagaatgatgccctctttgattcaaataaaattcataagaattttaaaggatttcatttctataggaatttttcctacaaagccttttgaatcaaaggaataaaccctatgtaatcctatgaaattcctatggaatgtctcttcctatataagttttggaggaattttaacgagaggtagatcctttgagtctttatctctcattaaattcctatgttttttctgtggtccaatcaaacgatcattcctacgtttttcctgtgttttgcaatactctgttttacacttacattactatcagaatcctatgttttttctattcctccgttttttcattcctgtgattcaccattgcgaatttcacgtacgatctgtatgttctgtgaacccgtgactaatcattctcaccgaaaaatggcgaaataaccaagtcccggcgaaaaaaagcaaagcactgtagcggtgagagaaaacaaccaagtaacacaatgatagggaatagtacggcgacgcaactttgcgtacaggtcgaaagcatacttgcctcctcttttcacctctcttcccttggaacgagacacgggaaagcgcgaaaaaaaaaaagagtatactcatccattttccattctcgctcctctgccctaccccaatgccccatactactatgccacaataattcactcacaataatactaatgctagtactactcacatggagtagccacatttctctcctatagcctgattgaagaagcttaagcaactgattagtagccgctccgagaatctgaaaaagcttcgtttcttagtttttggcttgtgatttgttttctgattttataattatagcttttcagaatgtaaaaaaattaaactgtttaagaatgctttcgatcctgagataagctgtaccagctaaaacttccgaaacatgcctcttagtctcccctcctgtcccaacggaaaagaaggtactacctccgttaaaaaaaaaaaacaaaccctggtttccgtgtccaacgttgaccatccgttttatttgaaaaaattataaaaaaattaaaaagacaagtcacgcataaaatattaatcatgttttatcatctaacaacaatgaaaatacaaattataaaaaaattttaaagttggatacagaaaactagggtttggcttttttttactcacttctttaggtacggagagagtactgctaaagagagacgagagtcccactcatctcttcactgtgagaaccactgtgctacgccatcgtactcgtaggagtgatctgcaataagaaatctttttcttcacgcacaatccatgaccaactcgtcctttccctactgcccaaactcaaaacccacaaatgcacagcaaaccatgctgcgcaaaacggcaccgtaccaaaaagctcaggcgaatcaaatccacaccacaacccccctgaatcaaatgtgaattatcccaaccttccctttacccgcaaaatttgacgcgctgagagagagagagagagatgagactggggagattcgcacggctcgaacacgcacacacgcaaaacaacacgggcataaatgcggttttggagcgctgcggggtgtgcgtgaactgtcctcccacaaggcgaagagagaagggggaaaaaaaagagagaagaaaaacgatgcgtggtgtggtgcggtggtgggggtgagaagagaacaaaacaaccgctccctgctgcgcccctcctgccacccgctgcggcaagcgcttttttgaccgcttctgccgtctccctcctcacacggcacccggctcgcgtctctcctcccccctactactctgatccaccgggtagtactagacgcgctactactgccgctgtactgctctgccaccacttctccactccactccactctcctctactaccaccgccgctctcgtctcgtctcgtctcgactcgactcgcattgcgcctgtgctgtgctgtggtggtggccgcgcggggggcgagatggccggaggaggtgggggagggggaggggcggcgccggcgccgaagcacgacgagctgacgccgcaccccgtcaaggaccagctccccggcgtctcctactgcatcaccagccctcctccgtggcgtgagaaccaaaccccctccctacccaattttttctccgcacgcttcccccccccgctcttgtcggggtttatcgttcgctctctgtttccggttggtcgatcgcgatagcgatggttctccgcttcctcgcgtcgttttcgcgaggctcctgcttcctcgcgtcggtggtggtggtttgcgtgcttgcgtttactactacgcgggggtgcttcgttgctgcgcttgagttgttgctgttgttgtttttgcgagggagtggatagatctgctcgagctttcctcattaggaacttgatacgctttcttaaaagcgatttgccttttcgttttgttctcccggctatttaataacacctcgcattagtttatttagtgatgctgaaaaggtttgactcgtttgattctagtcgcgggtaccaaccatgaacggatcaacccaccagatgggacctagaattgttggaaagcgttgtaggaaccggggttttggtgccagtttgatgctcattcttcagactgattccgattctctcgatcatgtttcgctgttgcctcgatttatatcaatgtcagcgtgatggagacttgtgtggatggaatattcaagaatccagtaatactatggaattttgttgggtaatttcagttctattaaattttgctttgacttgctccagtgttttcacatgcaccgtgctctttttttgttaagtactagtatacatattgttgctatccatagttggcgtgttatatgtagtggaattcgcatgtactttcttgatagttactagttccagacgatactgtccatatcgaaaaatcgttgtcgctttgagttccattcgttctcatgtttttttaacagagattttatctctttgtgcatgatttcacgtatttattagataagtccctgtcacgtttttttttgaatttgtattcccaaggcatgatgcatgaacttgaacgaacaacactcgcaagagttctaaaggatgaaactcatctgcactgtatgatgtaatcgttagttttgatattttttgatctttcttcaaaattggcttattgtcttcttatattacgttactttttctttttcgaaactacatacgttacggttaactacagcatttttatatgttgccaagtatggcttcttcctctatctgctatcccactataaaagttgtttgttatacatttccaccttatgctgtttataacatttgtatggttttagttagaaacttggttctgaagtattttgttgtatgcaattttttaaaatgcagctgaggccattcttcttggtttccaacattatctggttatgctgggaactacagttatcataccaactgcactcgttccgcagatgggaggaaacaatgtgagattacacatttacctgtttgtgtttcttttgacttgagccatcaatcaagactaacagtatttcttactgtgttaggaggacaaggctgttgttatccaaacattgctgtttgtggctgggattaacacccttttgcagagtttctttggaaccagattacctgcggtgattggtggatcatacacatttgttgtaccaaccatctcaatcatccttgctggtcgttatgccaacgaaccaaatccacacacagtatgttaaaaatcagtagctacttactttcagatattgtttttgtgtttcttgacctgatggatcacctatttttatgtgaagaaattcctccgaatcatgcgtggaacacaaggtgcattgatcgtggcttctgctctacaaatcatatttggtttcagtggcctttggcgtaatgttgcaaggtactgaggtgaaccattggtaattggcattgttttttctcttaatcaagtagctgcttcagaggtactcaagcaagaaatgatcttgcagaaaaaaatatcttgttttcagtctcattactatgtactggatttctttcaggtatctgagtccattgtcagctgctccactggtgatgctagtcggctttggactttatgagcttggttttccctcggtaaagtattgtgtttccactcaagactccatatttgtttaaaatattgtattgctcatcttagactaactgctcaggttgccaagtgtgttgagattggtcttccagaacttatcctcctggtgatcttcgcaatggtacgcatttatttccatcatgtagttgtcaccttcttcacctagcatcgctgtgctccaactttcctttttcctttttattgtttcatttttgcagtacctgcctcatgctatacacatgatgaagtctatcttcgaccgttttgctgttctgttcactattcctatagtgtggctctatgcatatctgctcacagttggaggcgcgtacaggaatgcaccaccaaagacccagtttcattgccgaactgaccgttctggaataattggtggtgctccttggtaatatttttgaaaaatatgactgttccattggtgccactctcgttgtaaaagtaacatgaccgcttcctatcttctgtacaactacaatgacaggataagagttccctatccctttcaatggggtgctccaacttttgatgctggtgaagcttttgcaatgatggctgcttcatttgttgctctggtggaggtatggccccatgctcttgggaaaatcaaataatacttcagcacttcatttcaatctgaggattctgaagtaatgagttatgaactcctgaactattatttttgtagtctactggtgctttcattgctgtttcaaggtatgctagtgccacacctctcccaccc

SEQ ID NO: 19486 - DNA, 6150 bp, Oryza sativa
ccccccccccccccccccccccgcgcgccgtgcccgggcgggttggcctcctgctcgtaatccgcaccgcgacacgctcgctcgctcgcgttagctgctcgtagcctcgtagctctgcccatgcgctgcctgttacgtactccctccttcaaaaaaaaaaaaaaaaaacctgttttctgtgtctaacgtttgaccgtccttcttattttaaaaaattataaaaaaataaaaagataagtcacacataaaatagtaatcatgttttatcatctaacaacaatgaaaatacgaataataaaaaaaattcatataagacggacagtcaaaattgaacacggaaacttagggtttgccttttttaaaacggagggagtagggataaaaacgtattggaaatttttcggttatcaaacttgtttttgaaaaaaaaagggaaaatgttcgttgttgagttgttatcatattcaataatatgaggttttctatttctattccagttaagaaaagtatgaaaataaaaataaaaacattagaattattttcgtctgttttttaaccattttgaccccaggtaggtggtgggttgccgctactctgtgatgcacttgatggtgcagaagtaagagttgtgtgatttcaacttcgagatcccgtgtttaatttctaacacataatttctttaaattgtttggagggacctcccctctttaaatctcttttttttttctgccgcgactcgcaggtcacgaccacatataggagcaggcggcgcgtttgagcggtaggtgcgccgaagacagcagcgggggaggaggtggatacatacaggatacgtgttggtcaagtccactctccatatataccactacaccacctcgtcgctcgggcagttgctgctgcagcgctgctcactgtgccgtgtccacctcgcgcgcgcctccctcccgttcccgtatagcggtgggggctcggctagctaaccgtgtgtgatcgagcgttgcgggggggagaggatggggaattgccaggcggcggaggcggcggcggtggtgatccagcacccgggcgggcgcgtggagcggctgtgctggtcgaccagcgccgcggaggtgatgcgcgccaacccggggcactacatcgcgctcgtcacgctccgcgtcgccgaggagcgccaggacggcgacggcggcgcgcgccgcaccgtgcgcctcacccgcgtcaagctcctcaagcccaaggagaccctcctcctcggccacgcctaccgcctcatcaccacccacggtatgcgtatacatcactcactcgccctttaatctccttcttccttcgcttcggttaattcttcgtgcgactaaaccgaatgcgtttgttgtgatttttgttgcagaggtgaccaaggcggtgcaggcgaggaaggaggagaaggtgaggaaggcgcagcagcagctggaggagtcgaggcagaagctgcagagcaaggcacgcgccgccgcttcggcggcggcggaggtggatgaggccgcggaggagaacgacaacgacagcgacaacttcgacgacgaggcggcgttggatgcgagtcttgatcaggtgggtttacatggatcagagtggtagtaacctgtcctgctttaatccaaccactttttgttcgatgctcccatgcacgtccgtggcatgattgatacatgctcctactacttctttaaggctgtgttcgcattcaccttttcccatccccttcccctcgttttccgcgtgcacgtttttcaaactgctaaacggtgtattttttataaaaagtttctatacaaaagttgcttaaaaaaatcaaattaatccctttttaaaaaaaatagctaatacttaattaatcacgtgttaatggactgctccgttttccgtgcgcagaagttgggttcccatctcccccatccgaactcagcctaaattgtctctctcagatgctgtcgttagttgttcctcgcgatcaccgtgtccttccatgattctctatctccttttaacttctgtctatctgactttatcatccaaaagaagtgttctttttttttggttttgggatttccatttaagatttttgcaaccgctgaatctccctagtaatcacggaaatcaagagtcctcgtcttaatgagcccagttgagaatacagtactacctattcccaacctccaagtgacatgcattcaataagattataaggttgtggccctatggggccaactggttttaatagttggtttctctaaatttagtgagtggagtagcaactagtgtcaggtttccaggaccatattgcgagattccttaccacttctgagaccgcggcaacatgcaaaggttccatcttttctgattactctactgtttacccacctgattgcagttggcgcgtcaggacagcaaccggagctccagcgcgcggcaccggcaatggcggccttcgctgcacagcatcgacgaaacgacggggagctgatgccctgccaatggcgtcaagcatagaacacgatcatacgatggttaatcgtcgagcggtgaatctgtatttttcggtgtttcacccggccttgattagctttgcaaaggttggcgcgtttgcacactgtgaagttgagtttgacacctcaggatgacagggctgctcgggaaactctggccctgatgaatccgtgtaaattttcaggctttgatggggccttgttgtgaggttgctcgttttttctttcttgatacatttgcacctggaatcagaacaatgttgctccagaaaaaaagagaaaaaaaaagccagaaaaactctgtacttgatgctctcctacaaatgggaatcgagcgcatttcatgatcatagttttttaaggatgttaatctgtttatacaagtataattcttgatgccaaatttcgcaatcataagctcagtgcccagtgacagatgccgagatgcacctgcagatggtggaatcagcatcatcagagcattcggaggttggaaactcatcatgctgattcgcgtcggcgattgcctattgggatatcaaacatttgtttaagctgttcctgatgtcctaacaggacaagtggtaaatgtctcaaatcaagatgcccacaagccaaggccaacattacctaccactctaccaggctgagttatgcattgacgcagtagaccagttgtttgttttcacatgcatgcctcagaagaacacatgagctgacagtctcactgtcccactgtatattaacggcaagccacttgttagcgtaggatataggtagtcttctggctctctgctagcaacagctcgcagaaattaaatactgtcagctactaaccacttgttaatgcagctaattagccccaacttctagagcgagtgagtgcctgatggctggtgcttaccagttaccagccaccacaggacatcccagccattgcacgctgcggcccctcgccggctcagtgcctctactttaatttgcagtgttgctcctgcagtaacactgtacaaaagcaccaaaatgtatctcctcggcacttcatcctccaggattcaattcggccgcggaacaaaaatgatggatgacgaaacatgaacgactggtactatttggcatgtttccttcatcttatcatcttggtatggacgtcccaggccaggcttcagggcccttgtgctggtggacatggcaaaagcttgcccggcacgtgcagtccctgacatcagatgagcggcacttttgattttcagttaaagccacggaacaaacatcaaccgtagctcgagaatcagaggaatttggatgatccttatccatggaatttggatggcatcacggcacatctgcagtgtacctgggccctgtttagaagattagcccagagctaattttgagagctagtacttagtcatgaattggtaggctaaacattagcctagggtggtacgtttggatccataggctaattcaaggctaaaaggtggagaaatagtagaaagagaggagagagaaggagatagagctgccttttgatggtcaccacacaaaattagccccattagcaccccttgaaggggctaatgttttaaggggggctaattcacattagctcaaaattagcccacctgtttgtattcttgagagctaatttgaggctaaaaggtgaggggtaaacattagcccatgaaatcaaacaggggcattcacctgtactgaatcctgcatcctgcaatgcaaaagcttttagggcttattcgtttctaaggaaaaccaaaggatttccaaaacagaggatttgaatcctgtatacagcattcggtttacaggattgagctataggaaatttgaaggaaaatttccttttgtgccagctgtatcggtaaaacataggattttttgcatctagtacgacctcttggaaattttcctggcgcgaaaagagcgcgccacgagcgcaccgcgcgcgtaatcttttcgctctcacgacaaaaaaggtaggtaccggcgctgaaaggaaaataaaaaaaaatcacagggggcaaacagactcgcatagaagccatcgcctttgatcccatctcctctaccacttcctctcctggctccatgattgggtactggacctcctctcccacatcgatcgccggcaccggatgcaccttcgccgcccaggtgacaggacgcaacggcaacaacgagaagagccacggcagagatcggcaaggacgcgttgattgcaggtttggtgcctcctcttgcgttgttatgcgtagatctgatgccccctgctgcttccttgcatataccttagcatttgggtcgccgcgaatggggtcgcagctgtaacacacaagggttcatagcgcctgcccaatggcaatcttgtttggttcagagaagttgttgccggcgggcggcggcgatgagcagcaacaagtagtatttgcataaccagcatctacgagataaaatttaccaccaggaacttgaaaaccatgattaagtgcattatgtaaaactcttgcatctgaagctgatccctcccatccaggatgtatatgcacaaacttcaaatcaaaatcacaagcaaccatacaattctgagagattgtttgcttcctatttctatatggctcttgctcatccaatggaagtttcatagggatatgagtaccatctatagcaccaatacaattctacacagaaacaagacatgtcaaagttatttttgtccagttcatgaaaaattaggatattcaaaatatgaaatcagaacaacttaacaagtggccatgcctgaaaaaaggggtaaaattgtggtttcctcaagattggatgtgggtgtagggatggtgcacgaatgtagacagatgtgagatttgtgattgcttccagcactgctttgaaatatctatgtattgtatctggactatgctgaaaccaatcttgaagtgtttcattggttgcattttttgccactgtatataagaatatagcaatatgctcttctactgaaacatatagtgccagttaggtactctttctcacgtaacttattgactagtgcatgaaaaatgtcgacctccatacggaagtttcttttgcataatctttcatgtcctgttaaaatctcatgtacacggcaaccccctgtaagttttgacgtgtgcattggtctcctaatacaagatgattgtgatgaatctcctaaagtaggcagaacaaaatgaatgaactcatcatcactttctgatatacgtcggtagcttggattcatggtgtgcagatgttaccaaactgatgctgtaaactcaaatagaagagagctaaaaatcaagacttttgctgaggaaaaaacaattttggtgcaccagatgaacaagtagtaccttgttgttacacgagcaagtaacgtccagctatggtggctagacgatgagtaaagcttctggaaaaattatgcagatagtgaagagaagagcaaaggatcagcaagcttcttccacagttgatgagcaaatagaaagaacaggggaaaatggtgcacaaggctaacgagggctatttatgcacttcaaagctaacggctagttgagggccgatgtcagttgatgcaaac

SEQ ID NO: 19487 - DNA, 2422 bp, Oryza sativa
cttctcctgcggtatatccgaatgcacactttttttaaattcctgacgtttagcttcccataggattggactccacagctatccctattccttcatttttcctaatcctatgagtgaaaaaatcctttaaaacgagtaagcccttactgtgacgatcagtatttatcgggaacggggtctttccttttcttttggaggctttaacttcttccagcattttgaccgttccgtaccaactaccaagtgagcttctgatggttttgtctaagaaaaccatgatttggcgatggcagcctttattgaaagacataccaagcgctgggtggtcacatctcagggcttgtttggtagaactctaacttataaatttagcttcaagagttgggtctggagtgaagttgtggagctgtctaaacccagctttacctttctagttcattttatgagagaacactagctccgctcccatttcaggtggagctgaaacggtttggttgagctccagctccgggagaggtggagttggagctggagctgtgacaaacaggccctcagttcctagatttgcattgacgctccaacgggaatattcgtgcacaagtaatcgagttttgtatatttaccgacgaatggaatacgcatatttttttttctttacttgaactcccgtgcagtgcactggagatgacatcattagagcatcaccaagagattacatataacctctaaaaatttgtttttttttcataaactcaaaataggaaacaaaataagtaatatcttaaagaaaaacctaaattttattaaaaaaaatataaaagtgagaccttattaaactaccaaaagaatttccattttacttcgtcagcgcacactatctcctggcgctcccctgaagccgcgccaggagaggaggaaggtgggagcagctagattggaagtgggcaaggaagccgctttctcccgtatatcaacagagcaaatatttcgggaaagagaactccaaaaatcatgcaactgagtaagggactcgtttgagtgctttctttcactaaaatccctcaaaattgattttgagatgaaatagggataaaatagaaggactgttggtgatgcttatttattctcctgttttatagggttttaacgaattgagatcaaatacagtagctattaggactgcacacaatctgagccctctatgtctaaatctaacggccaaaaaggatttggcacagtacaattagaacagtacccttccacagtaaaatgctacagtgttttctacagtctcagatgtatctcggacgtccatttttaatcatgcgatgctagtgtgactgcttatcttgcatcacactagctactgcacctgaatcgggtccggtttaaacatgtgaaactcggaaacggctttttagacgaagacagcccacaaactcataggcctacacgccacagcccgagaaacagaagcccagcaatccggcccaaacaagtcactcagcagtcagcaggtctcacaggcccaccagatagtccatgggccttgggccgagcctatccgaccgccttcacgcgtccttccttccgacctatatttctgcctcgccctcctctcgccccttccccttcgcgtttgcgtttcctccgcctcctcactccaattccattcgccttccgccaccaccacccttggctcctcccctccccgcggggcgcgcgacaaaccctagaaccttctagaggctagagcggtagagccatccgcgagggccccgggcgggctaggggcgccgcctacccgaccccgcacgcggcggcgatgccgctcttcatgtcggaggaggagctgcggctcttgggcggtgacgtggccgccgtcgccgagcgggccgacgccgccatccgcgagctccggcagcaggtggacaccgtccgtgccgaggccgacgcggcggccatcgcggcggagcagacgtgcgccctcctcgagcagcgctacgacactctctccgccgaggccgatcgcttccgggccgagctagccgagctcgcggctgcctccgagcgccgcgccgccgatctcgcctcttcccagtccgagatacaccagctccgcatccaagccgtacgaaccctagtttttatttgggttcagctcagtttttcggcttagctgaggtcacactgatcactctgtgctgctgatggggtttgcagattgcgaaggatggcgagattgaacggctgaaagtagaaatctcggaggtgcacaagtccaagtcgcagtcactggaactaattgagcagagggatgcagagataagggagaaggatggcatcatccagaactacctcgataaaatagtaagccatcctgaccattttgtactcccacttctagtgatgcacagcatcc

SEQ ID NO: 19488 - DNA, 1882 bp, Oryza sativa
tttcgcatttttgagatatctatgccctttcatcctgggaactgggaagattttgttttgcattttgttgcataaattaactgtagttgttgaatcggtcttcctgtcaggtaaatctggcagactcttctgctagtaaaggggcaaggatacaagaagttgaagctaagtttactcatctgcaggccacatgtaaccgaattacgcaggtatgctataaacaatttggtgttattttgctgcgtaagattgtagtataaggtgatgcaaagtctttcttgagttgtagactactacctaatctgttatccatggagttttactttaattgtacctattccatatgtttgcacagagcaaccgttggttcttatttagtactttcctgtttaggagaaagatctgcttgaaaagcataatctctggcttgacgaggaacttaaagaaaaagtgaagaacttagctgaactaaggaaatcaaacatggatgaggaggctaggatgtcagcaaaggttgccgaggtgagtcctattccaaccttgacatgtgacataatgcaagcagaaagcaaaacctgattatgttggtttcagcttgaaagagagacttctgaatcatccagttccttgaggcgaagcaaagaacgggtttctgaattggagcaaagggtatcatatatggaaaaggtaaattgtcagatttgttagcttttgtattattgccatcatctaatttttgctttgctttgcttttatgatctaaaggagttgtgctcaacaaaggatgctgcagctgctaatgaacaacgcctggctgcagagctttcaactgtatggtttacctttattcccattaacccccccttgtttatttcacccttactgctcccactccctgcttgtttaaattttagaaaggaaatggaagaaaatgtgtgctgagctatttgtactagaccagcagatcagtccatcgttattgtatatgcacacggcacaccacaacttaacccatctagtgtatctaggatatttctttttttttaatggaatgcactgatgttcctctctataagccaagtcgatgacgcttttaattattgccttttgttctgtttcccttaaaaggtcatgaaacttgctgaacttcacaaagaaagttctgaggaatggtcaaaaaaagcgggggaacttgaaggtgttattaaagcattggaggtaatgcctttacttgtatttaattttgccccgctcatgaacatgaaaatctaattattcttattatttttttcggtgtaaaccagacacatttgaccaggttgaagatgaatacaaggaaaagcttgagaaggagacttcagccaagagggaccttgaaatggtatattgacttattattttggatggttttcttattgaaaaatcagtttgatattgtgagtttcttagttgatcttttggctttcatgctattcaggaagctacctacttaaagcaaaagcttgaaaagtgtgaatctgatctggagaatacaaggaaatctagtgaattgagcttcactccattggttgcatcagacccttgtgatctagcaggctcaccgatgaaagaaatgtattatttctgaaactgtatacttttagtctagcgagatatctaaagcaggcgctattagcatagctaagtaacactttctagagagcattgttcaaggctttttgatattaattgtgttttgctcattaaagcttatcttattgaatgatgttaacttctgtttgtgctgtaccgttgtaaacatgatattatctttgtcccaacaccaatagttcccaaacattttgtagtcattccttattgtgttgataagtactgatcatat

SEQ ID NO: 19489 - DNA, 3390 bp, Oryza sativa
  unsure (1)..(3390): unsure at all n locations
atcaataaagcctatttctaggtttcataccacgaccaaagtgttttcactcgacgatcccttactctgataacacctaacgttgaaacatatccttatgaccctttacgccgtctcgacaaggcctccgaggaacctaagggatcttcggctggggatgcccagaaccgataaggccttgtcagatccttcagagacgaaagaccatgtaagatctggtcgtgtaagagttctcgccgtgcgtattaaccaagccgtgtaatcggaaaccgagctttccaacttcacggctgggggctaggatcagagcttattcaacctaggcagatcaagtgtccaagagccttatcatccaagaaaatttctccgacgacaaggctgggggctagggagagtgtacgactcaaacagccgaggtcgttaactaagaacacactctaacacataacatccagagtaagatgcatttgtttaaggaatatttctttattcacataataattcttacttgttttttacatagatctcccactacattacactttttcctaagacatctatagcaggccacgagtattaccaagagggccaatgccagtccatagactggaataccttctcggctaacggcgtcatcgacctcgcaaggtggtctatctccgccggagtcctccgagaacgagcaaacccttcatggaggaattcgagatccaggcgcgggcggtgatctcgcaggcaagctagcacatgtcctccggcatatcgactcgctcgacgacactcttgttaaggcctcatcgatacgcctgccgatgccatcgagttgggcacaggccccgttgagccacgagatgtacccggcgccgattcctcaggagtgttgcggactactcgaagctccccgcatacccgggccattgaggtacagcaactctttaaatatgacgcaaaccacacctcgcgtcctcggagcgtttccatggcttgctctttcttcacggctagcatggttctcgagagttccgccacttcaaattttgtcttctaatattggatacgacgatcttgggttgcaagggcatcctcgagatctgctaaacataacgaccactaagacaacctggaaaccactaacccaacacgggttaaaaaggctactcacttgaggtggttgtccccatctcgacctccacatcaagagtttggtcctcgacgtcatgtgagacgcgtggttcaaactcaagtaccgggattatcgctagtgactcgggctacccgcgctgctgaacatcctcgtcaccagcatctctacaatcgacaagaaaaacttccgaaatcaacactgaacaaggatggtatcatacgcccgaaagcaaccagagttcaagatttgcaaattataaaaaatacaagaagtcctactcttcaaaaaggggaggacagactcccccaggtcactgacttcttccatcacctccttacgcgtgtcgcttgccgccccctgatccaagatatcacgcagatcgagttcagggcgcgacaaccttacacacgcgaggatgtgacacgccccggtgtagataccgttggacgtctcctccgcgatcctggccgaatgcttggaggggatttcccctatcaccgtcgccagctccgcaagagaagaagtcaacaagaactcgtcggggttcaccgggatcgtggacttgacgccgcactcctcggcgagctggtgaaggccggtgtaggtgacccgcagcgaaccacggatctcagagagattgtctccaagttccgacatgcggtcctcgagccctttgcgttggcgctcgttcccggccaccagctccctcatcttcgtgaggtcctcacaggcctcagccagttcccgcaccaaccgctcggcacgcgcgtttgccaccgccgtctccaccctcgcctctgagatctcgcggccggtgccgcgagcaccagcttcgagaaggcgccccatttcgacttggagctcttcctaggtgaggacggcctctgccagactacgaccctcagcgggatcgctaacagggccgcttggcgtcgcctcccgactcccgaccacgggcacgacatctgtcgacaccgtggcaggggatgcgctggacgttcctctggatttggcccgcgcagccttcgcccgcgcctccctacaaataaccacgaatcaaaactccatttgaatagaagacacgagaatccaaaagtctgtttactaacttctcgccgatcgtcacaatgcgctaacgtcgcggaggtggaggagacgcgtcggaagcctgcaagacaaccaatgtggagtgagaataaaccttccttgctacacaacatagcgacgaggtgaaattaccgagggagtcgctgccttgcggcgatgtccgagcacatacgagaatttcctcgccttggtcggagctttgccatcactggtggtagcagcgtcagacgcctccttgacgaccttctccttcagagatgccgccacctgatgatccgcgagcggtccgacgacatcagtcaaaggaagggcctacgctaaatcatatcataagctgatttgagcagagaaggcgggacgctatcgaatgaactcacattgattgcttcgtcgcgctccgtcgcacttttcacaaaggggtgcggggatgtcgctcgccgtggtcgggccgctgatcatcacctgaccaacacactgctccacggcttcgctgctcagacctgtcaaaaaggaatcaatttttgataagttgaagagtaacgcgagtacaagcatgtctaaatgaatgcgagaaagataccccgaggagaaacncaggtcgcgtcgtctggcccggaatagtcataagccggatgggcccgagcctggagcggctggattcgcctaccgatgaagtctgcaacgacttcatatcccaataagccctgttctcggagatcatcgatgatgtcgataaacggttggagagagggggtcaaggagggtttggcggtccagaccggaatcttgtccggttgttcctcgggaacaacgaggaccggatttgaatccttgatttcaaggtaaaaccacctgttccgccatttgttgcgagaagagggacattggaaggggacataatgcgacttcatgccatcacgaagtcggaacccgacgcaaccggataccctattggattccatccagcgcaactcgtagtaaaagcggaacagatcaagaaagggctctaccccaatgtaggcctcgcaaagatgcacaaagacgctaaggaaagcaatggaattggggttcaaatgcagaagagaaagcccatagaaattcaaaaccagcagaaggaattcggagggtggagggagaaa

SEQ ID NO: 19490 - DNA, 1719 bp, Oryza sativa
gatgtgaatttggttttgaatgatttggcatgtcagatattgttcggacttcggaatgtgatatgatattggatttctaatgcatcattttcttgcattggttccatcgcgtggatctgaataatgtgtttttcctttgctttaccgtcacttgatcaatatggtagttcataaggctgctgcttttttttttttctaatctcagggagacaggtagctactccaccaaggcctgctcaagttaaagtggtggaggagagagcagtttctactttgcccaaaccaagcactgaagtacgtagaccaggaggaaggagaccacttgttcgaccttcacttgaacgagttgaagaaccccaagctgatattgatacaacagtagttgaaggttccacagagaaaggcggcttgttgatggagcgtgaaactcctggtggtgtatctgcgttacagccatcaagtcgtaaacgtctaattccatcaccacaaacgagagatgatgcttcacaaggagagacaacggatgccaatccaccactgaagaaacccaaagaaggatcttcacaatgtactagtgagctaaaaactgaacagtcacctcatgaagatgtcatggcacctgttcctgtgctaccatctacagagttagatgagcaacagcctggagaagagatggacaccgatcagtcttccttgccagttgaagaggttgaggaaacaagggaggatgacttgggtgataaggatgacatggaaacacatatagacgcttcaatggacatccaaggacaagatgcagaaactggtattgataatgatgcaactactgtggaagatgtgccagtcaagtcagaagcggttatggaatcactggaggaagacctgaaaactgaggatgggaaggaagagggtcagtttactgcaaccactgatgttgaagatgagagggaggagggagagttgccagatgaaccagaacaaccagacagcactccccctgtgctggatgttggtgagcaagccggtgattctttcagggcggcatctccagcaggaccaactgaaaagagtgatgttgacatgccagaagaaactggagaaggtgatggtaccatggaatcagaccaaagccctgtaccacaatctggtggagcagatgcgtcaccgagccaaatggctgatgcgtcaccaagccctgcacgtgaaccttctcctaacccagtccaagctggtgcacctcctgaacagcagaatcccacccctcctaacccagtccaagctggtgcatcttctgaacagcagaatcccgccactgcagcagaaggtgttgaaactcgtagtaccagaacaatcaacctaactgagagagcgaggcaaaaccggcaagccaggattcttcgctcagccactcaacagaatgcaaggggccgtggcaaccagtctcttacatacagggtatggttttatactacaagactactgagtttatttctgttgtgttctatttttgttatatccagtgttaattctgatggagaacaatgttttctatgtgcagaaagatggcggccgaggaacacggggtcgtggtgggcgtggtcagtcgtagagaatttaggtttgtctttgctcaagcgcggagactagttttttgcaaaggacatactgaatcagggcggcatcatattcattttgtagcactatcagaattgcgagcgt

SEQ ID NO: 19491 - DNA, 8202 bp, Oryza sativa
atgttagtcggagtaaatgattttgaaccggacgataataagatgaaggctacagtttcacgattgctcatagctaagcagagctagtagactcggggtcaaaagatgaatagattaaagccaataattagatctgaacaatgaaaaatagcctataatcccctacatttgagataagtttgcacccaggatctacaaaagccgcgtcgatctacagcctctagtttggttgtaaaagtaaaatcggatgagacgagccagacacatcagtgtattattaataaatcgaagttctctttcaaaaaaaatccaagttttttttaaaagcatggcaaaagaattttgcctaatatatttatggagtggaagattgataataaatcaaaagattacatcagcaaagaatacattaggagaatttgcatacatgtttcattctgcgctaacaactgggacaacgactttgctactatcattctgttcgattagctatatatattctaatgtacagaagtaacaggccgaggccgtccagtaacgttcacttttttgtgctttaaagaatgggaaacagtataatctccacagaaaaaaaaaagctaataaacccccagccacaagccgcagtagccagccatactgcaagttcttctcctgcatgatacggcctccactccacagtcatcatcggtcctgcatctgtgggtaggtaacacgtctggtacatggcatgcactctcccacggggagccaacgctttgccggaaaatcgtttctggacaaacttgagacgacaatgcgctcacacggaagggttggctgtcatcctgaagataagtttttggtatcattgttcatgcaagtaaggaggaactgggaacagaaactgggatattaccttaacgaatgtccagttgctgggaacatgcgttgtcgggattatctcgtgccatgtgctccttattggaagggggtgaccctccgtggtaaatatgtaattttggttcctcaagaatgaatcatcgtagagaagaaaaagatatttgcagctgcaaataatttgtcatgtgactcagtcgtcagtaccagtgatgactaaatacttagtaccagcttttaagaaataattggaagggagcaacagcttacgtttctgaaagaaagaagctatgttgatgatcttcaagtttcattgtcgaaacatccctgacactagcaaaacctccatccactttagtatagtaattaagggatccaatgatagcttcaccaacttctagataccaaggatctacaggaagagcatatgtcagcctggggaaggagaatgagggaacagaaaaggagaagagctaatggcttctatgtataggaaatctagctagatataatggctgcaatttggcttttcttgttgagcaaacctttagttgcttgataaagataaaatgtagactcagcaaactctggacgtaaaggataatacttctctgtaggatgcaacattccgaagtccaaaagatatctgcaaaatacagtccgaaacttgtgtcagtacagtttagtatcaatcttgaagcaactttttgccttatcacttaaataataagtctttccccccattaaagatgatggtactaatatgtgggaaaaacagtaaatggtacctttccggcagaacaccaaacctttgccatacattgtaaaattcacgatgtgatatatttgcagcagcaacatctcctagaagtgtctggtcatgatcacaggagtagataaacaatgcatgattaaaatcctgcaataaggtgactgtccatcaatttatggaattcagcaaacctgaagacctggccagaaggcttgaaggctagttagttgccagtgtgttgcttctccggtcctcatatcagctcatgatacctatcatgccagatgatcattagtgcttggtacaatcacaacacagtgacaggccagttagctgagatgaaatgccaagaaaaataaaagggtgcaccatgggccatgtcggaaatacttctgcactgcaaggtaagctgaatgaaacatatcccagtattcttcgcttccgaaaagaacatacgctttaatcaaatactcataaaatgaatcaactcctgcaaacatgatacaaatgaatcattattatgtctcaaaagtatgttgtgcagtgacaagatgcttaccgcaggatacaaacacatgatcagtaaatcacatgggaaaatgtaaagagtagtaccagcaccaatgcctgacgaatattcaatccacttgccagtcaagacatcaagggttgtgcctacaagatttagtgaacttctcatgctccacaacttacgaagagcacgaagagctgcagcctcatatctagaatcacccgtcaaacgtgataatgcacccatttcaagaatcagagaacctgtaaaaatgtatattacaaaatagtaagatataactaagagtaatgcatttcccctggaatacagtagaacattctatcacccaccacaccctgatgtgcttgtctcagttgtttcattttccatcactccatactggaaaaaatagttacatggtcatggaattagaagaaactctcgataacatataatatagtaaaattataatacacgacttgtggaaaacatttcgtggttgtagcttgacactgatgttctttgcaagactcgtactcattcagtcatttgttttttggcatgaactgaagcatcctgattggttagttcttctaaagtagttattatcaatactgtacatgatgagcatcactgatttagctagaaatattccttctgtaaattggagtaaaaactaaacgcatttcgtttgctgagctgtgagctattgcctccaaaacccaaaggttcctttctcaatctgatatcttctacgatggttttcaagtagccttgcgtaaaaatacaaactgaaatttgccagtattaaaattctaatattgcctaccctgattaaccacctttgaaatagcaagatcagaggatttgtaaatgaaccttaagattgatccatgcgtatggcaatccagtaggtgtctcaaaagctggtagaaaacgacttcctaaattttcagcaagatgtagtaactggtcctgatatggtccatctttaagatgactgctgtgctcctttgcaagaatatgaccagaaataagccccccaagaagtcttatgttgcactgcataagattaagagaaaatgcatgtgtaactcagtgtcctgaggccaacatgtcatttttaggtgaaaacctgtggtagtaaccagctagcattacctcaaaaagatttattcgagcatcaacatcaaatgttaggttctctgaaagccagagaactcctctttcaaactccgtgaggttacctaagacaacaagactgcatgagccaaacagagaggcattacctatcaaccttgcgaataatagtgttttctgaagaaactatatcatcattcacattctgaacagcaaagacagaagtacagaaccaaattcaaagtagtgaaaaacattacaacttcataaactgtaccttgacaacgattcgactagtgtaagtgcagatccattgtaatcatttggcaaatgttcaagctacaagttggaacaaagtgatgacatcatgacctgctatctcaaagcttttaaaatttcaattaaaatttgcaaacttgttgatactttaatacatttaggttgccaagctcactaagggagtcagtgaaacttttggttagaggcttcaattcatcatgctgaaaagataaagagaataatgttagcttgtactatttcatgtgcgtttaatcgaactgaacattgtgtgagaattcttaagatagctgatggacatactggaaatgcataagtcatatagttgtcataagcatggtaaaacctgaaaagaatggtagtgaatcagtaatagaaaataaacattgcaagacgcagtaatgtgcaaatggtggattaggtgatctaagtatagcgccacaatactaatgtatgatcatactgagctgagatcctaccttcgcatgcttttgtatgtggatagaaaattttatgctggcattattttgtgctaaccttcatatgcagagcattcaggctgaacactttggtgaggcgcatgcatggttcaaaccgtctcagtttgagacaccaaatataatagaataacttaagcatcataaataacgccaatgctcctaggagcaattttgttttccctgttggacagtcagggcaactatactctgccttgtaaatgcaaagttagactagattttcagcatttccctattttacagagttaatgcagtgatttgttgataaaaggttcaggaaataccttggtaactcgagataacatcagataaacaatacaccaaccaaagcaatccttggtaactcgagatgacaactttctcataattgttttataacatgaaactttttaatacttaacaacttgggcacacacacattatccaatcaaaaaccccattctcaatccttctatagcaaacccgtgccttctttacaattacaggcttaagttcgaagtgggggcattcgtctcaacacattgaacaaagctttgcatcctttcaactaaatttacgacgaatttatcgtagacctcgcgaacaagtggagacgaggcttaacaaaagtgcggagatgtcttcgttctccgcgatgtagccacaaccaaaaagaaaaaaaaatctaaccaatcgaccgcgcaacgaaagagagaaaagtcaagagagcatctgagcatgtagcttatggcatgtcgagcacactcacatctccaggaccttgttcctcatgtacagcctcctgccgcgcccgtacccatcgccggcgatggcggcgcccgccgcggctcccccggcgagagccgagaggaggaccgcagcggcgacgagccgcgccggcactgggcggcgcggccggggaggaggtcgcatggggttttcgcgcggggtgcggtgccgtggggcgtgaggatggtgttggatggggatcgggcccgggcgagttcgttcgatccgaaccagacagctcgttgcttccgagattttgctacagggcaccggtctctctctctctccctctctccctctctttttccgcgagggtaatagtctgccacagaaaaaggtagggaaacgctatactcgctcctccgtaaaaaaaaaaaaaaaaaactcaatctaaaattaagatggtacataatctactataaacatgttcagatttattgtactagattatggccatgtttggttccatggactaattattagcccccaccttttagccctgaattagggctcaagaatccaaacaggtgggctaatttgaggctaaagtgaattagtcctcctcaaaacattagcctctccaagagatgctaatggggttaattttatgtaaggaccataaaaaagcagctatctctcctctctttctactctctctccaccttttagctttgaattagcccatggatccaaaaataccaccctagactaatgtttaacctaccaattcatgactaaacattagctctcaaaattagccatgggcaaattttccaaacagggctaattaagtacttttggagacggagtggccggagacggagtggccgagtgggtacttcctctctaccaaaaaaaaaacaatatctttcacaactacacaactacagtacattatactgtacatattcattttcttaaagttgatcttagtgaaagttaatatttaatgaaatatatacgtgctaaaaaactatactaatatattttcgaaattcattatgctccataaggggatgtgttttttcttattacacagtagatgcatacacacaccattatacagacaacattgcgctcacacaccggcgaactctttgcatgtcatgtagatgtttatgaaaattaaaatttgataacatagataattgtataatatattgctcaggaaagtattctaaactcttgaggtgaaagtttaaagtcgacctaaccagttgaaaataagcgaatataactatgaataatgtacttgtattactcattgtgtaatttatatgtttgtttgtttcttattctatatattacatctcaattggccttttcgagagtatcaatattgttaatcttttcagacttttataactatttgattggtgtttttttgacttacaagacgaacaaatgagaaaaaaaaaagttccccctaataaatagtagtactccacagttcataaatattttctagtgttgaccagaataattttaattatgatcattaatatttttgaactgtctaggctaggatgatcgaaaggttaacgattattatatttagaataggacacaccgtcttttaagaattttcaggtctcttatacaatggtatattacatgtgttgtgtaaactgttgtggaacaagatatatgatctcattcatatatatggatagatcggcaaccaactcagggacacgacagttgtgtcatgccccacgtcttctcactctcgtggcgatcctggcaatgggcgcaatgtttctcaaaccatcgtgtctccagttatcgcctctctctcccccctatatattgtaaccactgtgatcgataaagaatcgctcgctcattcgctctattgtgtcgtcaattctctctcgctccaatcaatttcatccactttcaacataaaccttgtgcagttagcattgtgccgccttaggaaatacagtgacgcaacttctacagaaaccaaccaatcaaaagaacgtgcacattctgacgtggatgtattgcaggcgacaatggtctggtctaccagaggaagtatataagttgccacatcagatttgtgcttgcgtggaggagagatgagaggagagagaacataagcgggctacagatttgtagccaactgcagcacgagctccaataaattatatgagagagatgtgtggattatacattaatgatgtagtatatttctgcagctaactattgtatgagtgaactatattagattgactataaataatgttttaaattttgaagctagtagtgagctatattattaaacttgctctcatgaaaaactttgatttgtccatttgaactaatatcattttgcctggtgtgtcatcgaaaaatactttgtcttctaaacaatggtttatattgctacaaactcaaatggaactttgattcaaaagcaatgtgatacaggagaaatcaatccagagaaaggggaaaaagaaacagcttgtacaaataaacaacacgcacgcacatagagagtgacctccagttctcgtacgagcagaaattaaattactgaatcgaacaggaaactcgagtactcgacacaaatctagcttattcacgaatgttaacaaaccaacgatgaaaaataagtcacgcacgcaaaacaaaaaaatacaaatacaaaaacgaacgaaaaacaatcgatttagcgaatcacttaattatgatatgacgatcatatcgtcctcgtaaaccgggcgcgcgcgagcgggcgatcgatcgatcgatcgatggatcggatcagatcagatcagatcatcacttgggcatgggcccgtggttgtaggtgtcgcagcgccgcctgatctcgccggcggcgccggtcttgacgccgaagaggctgagcttgtcgatggcgcgggagaagtcgtcgaagaaggcggtggggttggacgcgtagagcttcacgaacggctgggtgcgcttgtccgaccacatctcctcgtccgtggcgaggaggccgagccctcgctccaggttcacgaagtacatgttgtcgaacttcccgggcgtcatcacgtcgttgaacgccgcgatcgtcgggtccttgaggtactccttgcacgccgtctgcaagcccttgctcagcaccgggttcatcgtcgggtccacgttcccgggcttcccctggtagtcgtagatcctctgcgcgaactccttgcagtgcgagaatcccagcgtgtggccgccggacagcgccaccatctcctgcaccgtgaaacccttgtcctggaacaacttgatcacctggtccatgg

SEQ ID NO: 19492 - DNA, 2639 bp, Oryza sativa
agcttgtcgccccccaacggctgccccgacggcttctcgcccaccaacggctgccccggcaccacggctgccccggcggcttctcgcccaccaacggctgccccggcaacggctgccccggcaacgattgccctggcaacggctgccccggcaacggttgccccggcggcttctcgcccaccaaaggctgccccggcaacgattgccctggcaacggctgccccggcaacggctgccccggcaacgattgccctggcaacggttgccccggcaacggctgccccggcaacggctgccccggcggcttctcgcccggcaacagctgccccggcagattctcgcccgccaacggcggccccgcgcgcgccccgccggccaagacgccggcaaacacgacgaggaggaggaggaaggacggacgcatggctgctgctgctgcttcttggtttctcagctgggaagtcgattgtttcccttccctcacatagagtttgaggcgcgcgcgggtgtggaatggcaggtcgaagaaatgcgaggagaggaggggggaggagttgggtttgctgttcttggaggcggtggagaagaggaaatggagggggagggagcggcgggaagaggtcgtagagaggaggaagaagaggagaggtacgtactatttctggatcaacgtgcaatgctggtttgccctttaagtaggggtgttagtgtccgtttgcccttcagtagcagcctctggttgtaaacgtgtggtgtgattgttttttctatttctggctatagcattttagggttatagactttaaattttttttccctgctctatcaatagaaacgttgcactaatgtacgggttgcttcaaaaaacgtgcagtgctggttcaaaacctgtcccttgcattgccgttttcagctccattaacgttcctcgagttaaccatggacgttcatttgtaactccgggtttttcactttttcgtaaatgcaatgattattaattagctcggcagttgttgagtatgttgatggagaaaccagccaaactgaatctctctatgacatgtagctaaatcagaaatgtgtaacttcacaagataggaaaggaagttctgttagaaacttttcactgcctccgtttcaaattacttgatgttctatgtttgttataaatcaaatattttaatctttgatcatgaatttctataaatttatataatttaacatcgtatcgtttatatttttagattcagcataagcaatacttacataatatataattgaaatactgttaaactatacagattttaaaaattaatgatcaaagataaagataagacatatttaacttaggataaatctagaatggtaagtaatttaaatgaagtaatgaaaacagagttgctgaagaagttatgctaagcatatcataattcatgacatgcccatgcaaaatggtcaattattgatgtttaatcgattgcgtagatataagatcataacttgcccatttccctaagtgccaggtagtaaaagatcaacgtagccatcacctaaaaatttgaacgaatctgaattggattctggctgcagtgtacaacataagacagtttcttgaagctgtatacacacatcattaaccattttggttccgggtgaacggatacagcgccagtaagatccccaaaagaacactacatgtaatattttacatcatttctgaaactgccgaggctcctgacttttcaggaaacaaaatgttacgtcacaggagaaaaaataatttgcgagggtgtctttccgaatgtcaaactgagattcctgcctatttgatcccatggagtggacgacaaagaaaaagatatttcttctcggagcaactcccttgggttccatttcctgggagtagtaacttgcagggaatacctaaagatcacagaggaagataactaaatactgcagaagctacctcaaatcaaaatatgttattatcaaataacacactaccttcctcagcagggtcttctcttgtctactttcaaatggatgttgaaccatttcttccttcgaagtcgttccttaggtttcttttcctttctaggaccatcatcatcacttctggatccctccatggacttgctcttcgatttcttttcctttttcacagtttggtcatcatcacttttggactctttagaggatgttttccctttgttgctactggaactccgttgcagagttgtgttgttggtgtaggatgcatgaattgcattcctttccttgagaagctcgtcgatctataaagaaaacatgatatcagaacaaggtcagaagcagaaatgaactaggagtatttcacaaatacaaacagtaccgtctgcatttcttgagcgtatctgctggtcatctcggtgaacttcgctaagacctgaaaatttcagctattaacaaaactatctcttggatttgcggacacaaacaatttaaaaggttggattatacctctctatactcagactcaaatttagacagctcagatcgttttgcaagtatctttgcctccacgcatcgtagtttcaccttttcagtacaaaagggttcagcacatacaacctctatattataggttgcactcttgaaga

SEQ ID NO: 19493 - DNA, 15737 bp, Oryza sativa
gatcctttgcagcagcaacctggcagtaactagagctggtaaagaggcaccaaaaacaaaaacatagagaggtagccagacaatagcttgcatactcactgaattattttgttcaaagcgatagactggaaagccaagaaagaacattccagcagaagtaactttccctgtctttacactgtcttcctgcactaacatgatacattagctgaaaccatgcccaaaacatcaaaagactagcacaataaaaatatcaaatccttgtcattgggtactggatagaatgaaaattggatgaaaaagcagtattggtgcaaagcaacatgttaatagtcaatcccacagaccagaatttatttcaaagggaataatataacttggaaggccttcggcaaaagatgtcagttgcggatgtttgaatacagcacgcagacataaccaggattaatcccgtttcattacctgaatttgtcatgctagtgtcttttcaagtgctctgctaatttaaactaatcttctatggtgcataaaaccacatataaacaagaagcatctttccaggttaagctaaacagagaaaagctttttaatgtcgaggaccctggattcctaaaggcatcattaggcagtaaatattttgtatcgtacaggccatccttgcaacattgactacacaaaatcataatattcgaagtttactagttatgccaatatggaaagttttccatctatattatgagaatgaaggctcacttaagtattttatttacagaaagaatagtcaccaaatacatctaccaagaggctttctgagtttgtcttgctccacagttgtgatggaacaatagtttgtcaactgttactagtggagtagtggtgcactcaagattacaggaaaattcacagaaaaagaagtgccagccaattgtaacatagggttaggaatggttctaaaaaagggaggtatatctctggcttgtgcaaaaaatagagtaaatagttcaaacttgtcaattaaccagaatgtgctgtggattatattgcataaacactttacaggatgaccccgtgacaaaacaatatccaactcagtgtgttttggattttcatgctagaaacttacgcagataataagctagtcccaaataggagtattttttgtaacccatttttagtttgtttctaggactagcaaaatataagaacagactatacatacctgtaaagcaaggcttaacccaccattttcttcaggctcgaaatatagcaactgaaagaaagagaaacttaccttagaatctgtgcatggcaaaactttctaaacttacagtataattatacatgtatcaagtacttgattgtttttactttcgaatatcataattagatatcatggcaatctcagaagaaacagacagacggctaaaccaagttcattattatagcaattaacattgccacctttggccgtaaaaagtttttcaagaacaacagctcacatcacaaccacatttcttgttgttgagaagagaaaatagaaagtaacagctaaagtcagctaagcttttcaacatacaactaggaggcggcaatgctcatcagacaaagttgtataatggagtagttactgtcgaaagatcataacggacaaacactaacaacaagttagcaactaaccttgaatttacttttagcagttgattgaactctacacactaaccccattttggcttctttatctgttatgtccacagaataaaagtgagctgattgcttttccacctgccaatatgtgaaatctgaaacattattcactgacaggaaaaaaatggaaagtaaattatgggagatagttgaataccttcctaaagacggactggccaagctcgagttgggaaattcccaccgacccattcaatgcttcctctaaaactgttgcagaaactgtggtcttgattggtacacctagcttgctacacaaacataagcataattaaataatcgattaagtaagatcaaagtaaatggctatccttaacaacctacctaaacagggcagcaaacactgtatttacagtgttcagacttgacaggtccaactccagttcctgactatctgcttcaatggcctgaaagataacaaaagcattacaggcagacaaaatcaagcagatcaaacatcatgcttttgtatgccataaattacctcgaatcccgaggaatcatactgccgcctcttatcgggatctgacagtatgttgtaagagaatgtggcttcttgaaacttgtccgaggcaacagggtcgtctgcattcttgtctggatggtacctgcagtaccaaaaagcagaaaaaaaaaactcacttcattatcgctcagtcgttctgcaacaattaccacacaagcaaagcaaagtaccagcatactaccaactttttgaacgtaaggtaggagaaggcttttttttttctttttgagcaagggctcgaggcccccatttccattaccagaaatgagacaggagaagccttggtttggtgtttgaatctaatacacggttctaaaagctcagtgaacagctcttgtgctggtgttacaggagatgaatttattcaaagtgagccaatttgaccaaaaagtgcactccgttcttcagaaatttgaacaaaatccttccctcccgaacataacaacagcactcaaaagtgaccaaatccaagaagctttacttacttgagggccatgcggcggaaggcgctcttgatctcctgctcggtggcattacgccccaccccaagcacctcgtatgggtccctcctctgcgccgccgctccggcccccgccgccgcccccgccgagctccccttctccgacttgaacgacccaaacttcgaccccgccatgaaccccctccgcggcgccgccgcaacaccaaacaaaccccggcaacaaccctaatcccacccccaaaacctcagatcttactgcttgttgaaccggtcgtcgtcaggccctgccccaccacccgccgcggccggccggcggcgagcggcggcgcagcctctagggtttcccccgcggtctctcctcgaagagcgcgcgaggccagctcctcctcggcgcggacgtgcgcgtgcgcgtggtgcgcggcttctgctaatttggggaggtggcgagggaggagtccaggactcgagagaggccgacgaaatggggggaggagaaggcgaggaggagagggagaagagaccaagacgaaattattttggtgccgacatgtgggccccaccgcgcagtggcctcgtcgtcgtcgtcgggcggtgaggtggcggcgggtgcggtgcttcgctcgagtatactcctatgtgtgctcctgattaaccgttaactactctactcatcggctcatcgctcgcaccgatttgatttcgaaatttcgaataaatatagggtggcccacatctggtggggcacacccgtcagtgagatgactgcagggtcgaaatggtagctgaagaaagagttttttcgtcgttcccgcgtaaggattatcaatttgtggaaatgtgggttgttattgaagtgttgattacgctgtactctctgtggccgaggtggggatgggacggtgacaggtgtgggaccagagaatgtggatttagtgctcaggcccagtggccagtgagtgagaggacctgcatttaggatgcagcttcggagtatctgaccggttacattttcgttggcattaccaccgttgaagctaaaaatcatgcgcgcagtagaccatttctccaccatcacaccaaacgtgtaataacctttttgaccactgaaacaattcacagcttttagtcagttttttttaagtggaagcggcaaatattacaaaatagagttgaccctgtttataagaaaaaccggaccaaaaactatacaactatacggtttgctaaagtaaaaccgataaaaaccttacacatagagacacagaaagcctgaaggcaaaaacgactacggaccgcagaaggccgagggaagagcaaaaaccctaagacgaagcctccaaggaggtgaacaacgacataagccgttgtcgacacccgcccatcagctggactaagttttcacacaaggaggggagagtccacaaggcaacacctccaaggaggaaacagcaccggcaggcgtcgatattgccgatcccggacgactaagcagggcttttgcccccggactcactcaaaagtgcaggacctccaagaagtaagaggaaacaactctcgcaccatagaggtaagcacaccgcttcaaaattggcgcttcaacaagttcacacagccagcaccaacgaggcctaagagccctaactacagacagacaagaccaacaccgcggacgaacaaactcctcaagcaccgaaagagcactgccagatctgtaagcaaatagccaatggagggggcaccaaggaggcatggtcggcctggagaggaactgagatatgaagagagggcacatagacatcggtgtcaaccatatttccggcgaagaactccgggcttcgcgggacaaaccaatcaacttcagcgaccacctgcgacttcaccaccaccacagagagatgagcactagggggaggggaaggaagagagaaaggaaggcagagagaaaggaagagaagaatggtggtttcataggggcgtgggaggtggggaggggtggcggaagaaccgacgccccccccaagctggtcgacgcgctgccgactcgaagccggaagccgctgcccaccatcagccgccacccaagcgctagactgccggccaccacgagccgcatcgaccatgccgctacgcgccggacacgccgcctctacatcgcgtctaccgccgccgtcatcggagaagatcttatggctgcggggccggatctaccactgccggcgaacgtcgcttcccccgcgccgcatcgtggaggccctgttaccgccatcctagctttgccggtggcggtagggttttgcccccgtgtcgcttgcgcatgagtgacgcggggggccgggggcgggaccattaactgaattatgtttaattagttactccatccgtccaaaaaaaacccaatcctgggtttgaatctggatatagtgtatgtccagattcaaacctagaattaggttttttttgagacggagggagtagttcttaacaatatatgattgatgatttcaccaagtacctcgtatcaatcacatcgagtaattcctaacgacgaaggccttttatactttcattataaaagatcactttacttgcaaacatccacctgaacaccgacgagtggttaactaacacgtagtaaagcagttctctttttttcatcgataccatgttcaactccccaagcaaagcattcaatcatggatagctcaagatgtcctccaaaaggctgttacctcgcatcagatcagatgttcccgcaaacaaaatagtacatgagcaaggccctaaaacaagctcagaaacagtagccagacgcacactattcagctacagcaagatcaggacacgcattgcaggctgtacagattgatcaaaggccccactgcctgcctgtgaaattgtccggttacacaaccccaattgcatatgatgatactatgaagcatcagatcttgaaatgattggcatcgatgtggtccacggatcatcaggcagacaaaaacacgagaccacatcaaacgggcgccttccacggacaccagcagaggcagcagcgcccgagagcattgggcccagcgagaaatcgcccgtgggccgacgtcacatgccgatcccgtttcggcctaaattgccccgcatgtatgttcgtggaaaaagtatacttggactccctcaactatcgaccgagtatgattcacgtcccctaaccaaaaaaccgggtatatggacttctccaactattaaaattggtgcaaacaatatccctcggtggttttggggtggttttggctgacatggcacctacgtggccggtcttgaccaagtttttgtcctacgtggcgcttacgtggtattagaataaaaaaataaaaacatatgtgggacctatatgtcattctattaacagtgaaatttggtaagcccagagtagtcatcggcttagagtcagcatcggcttcgaagtcctgagattagccgatgagagttttcaagtcgtcagttgtcggattcttgctatattcggttaaggaaattgatctactaaaggaagtttatccagaagagaccgagttcaaagagaatgcggcatggcaagttatttattaattaggaatagtttgttagtttcttttatctttaggaaagtgtgtttagtgtcctataaggactttatcttttccttttatctttaggaaagtttctttcttgtccgacaaggacttgtatcaacccataggtataaatatgtatacccggggtctatgtaatctatcgctacgatcaatacaattcggcgcatcgccaccttttaccttttctactttattttatcgttcggcgggacttggcacctgacgtggggctgcatcggtgttcgatctccagctaaggggtaagtccaatgttccgccggtccagacaattgtatcgtttacgtcggcatcgttcaagactgcatcaggacattcgacctcttcgattactctggtttggataatatatttgcctagctatttatcatatgtctatgttaatctagtcctagcatctcaatttagctctatcggctgtctctcgctttagggtttctgccggtatcggctaaatcgtcttgctagattagattagcctaggcatctaccacccttaaaatcagtcaacggcttaattgtctagatattatgtttcttttcatacttagtgctgcatcagttaagtttgatctactaagtcgtgcttagaaccattatctccaacctgtttcttgattgccaataagggtttcatcggggtttcagccgatgagttatctggacgttgcatcggcttacaaggattgcatacatattggatttagccgatcgcaataagatttaattgtttaatataatcttgtggattttatgacatcggacctccagccgatgtatgctttaacctttggatcagtgcttattatatattgtttctagccgattggtttctactcgattatattgttattttattacatcagccgattgcctttatatcatcatctacattggacatatagccgattgcttaaaccctatcgctattggctggtatcggcatcggctggaatcactacatcggcttgtcagccgatcggctattttgtctgctgtttacatatcttgtcagttgcaagatcaaactgactggcacgcccgcatctcatcaatctttggacctgcagaggagttaagcagatctcccaggccggtgtgttcaatttttttcgtcaacacattcacacaaaaaaaatatagtgggacccacatgtcattctccctctcctttccttcttcctccccctctctctctcccttatctctctctcccctctaggcctttctcttggccaaagcgtgggggagagcggcggcggcggtggcggtggcggtgaggagcggcggtggaggcggtcaggagcggggacgggtcaaggacctccagtccctcctcgtcccaaagggcgcccaccacccaccgcatgccgcgttgtcctcctctccctgtcgccgccgcacgtcttccaccgcatccgcgtcaccgcgtgcgcgctgcgcgtcctccacacctccaacccgcagggtagcagccgcaagctggggccgccatgtggagcaagcctgttgatggctatgggccttaggtgttgctgtactacatgtcgctccgtgggacctacgaggactaccacgccgtgcgcaccatcctgtgggggctccgcgccgccatcgacgagcgggacctctccatggactcggccttcctcctggagctcgccgcgctcctcccccaacgccgccacgtgaccctcccccagatgttcgtcaacggccgccacctcgccgctcccgaccgccgccgctgtcgctccccgccgccaccgctcccctccgcctcgtccccatcggccaccgctaccgctgccgctcctgagtcctgagaaagagagataagggagggagagagagagaaggggaggaagaaggggagggaggatgacatgtgggtcccacatattttttatttttgtttttaatctagtgccacgtaagcgcaaagacccggtcaaaaccaccacgtgggcgccacgtcagccaaaaccaccgagggttgttgtttgcaccgattttgatggttggaagagtcgatatacccggttttatggttggtggtcatgaatcatattcgggagatagttgagggagtcaaagtatacctttttcctatcttcgttcacattgccgttttgggccaactcgtccggtaggttcgtgtgtataccatgacagttggcccaagaagcgttcgcaagctggactcggcttgttgctcgcaaccacggcgacttgtctgttcggcggtcgcctgtcggtttgagaaagcaatactcctgttgcgagatgtgaagacacggagagagaacgacggcgttcgtttcttgctcccgggctggcccatgtcttctccgtgtcattgtacatggctacatctacatgtactatattctcatcatagtctcgtttaattggatcggtaagtgtggccctacggctacgtctacgggtaataatagagttagacacgagaggagcgaaggacgccaacacttgcacgatcgacgacccagcatgagcgccaacgcacgtaagtcgtaaagccggataacacgtacgcctgactccagccaagggccataggtttgtgcgaaggcgcgtcgcatgcatgttccgttttgacgatcgagagattgctgaagaagcttattaaagacgaggttggcacttggcagggaaagggggagacagacggctgttgtccgagagagagcttatttagtggagatgaacgatgtgagaaacaggctacccgtaggtgacggcatgatgtttcatgtttgttactgaaaaaaccaaaaatatgactaaaaaatggtcttaaaaaatgtatggtcgtaggtagatcgtgaggagaattggtggtggtgcatcatccttaagagacgtggacagaatttacaataaccgtccacagaggacaacgaacacgaactagctacaaacatggaataaacacgctccagatcttcacatctccatccagggctccgctgcaaacgagggcagaagatccctccgacgagcacgatccatcgtcgtcgcgtccgccgcgcaccaatgccaggctcttcacggccgcgccatggctttccatgacggcgaggcaagtgtagccgttgttctccgcacctcccctcctccacaccctgaccgtcctgtccgccgagccgctgcacaccagctcgccggccgccgccaggcaaagtatcgctctcgcgtgccctctgagcgtgcccgtggcctccatgccgccgtcgccgccgccggcgctctcccagacgacaacggagcggtcgcacgcgccggagtagagcaccttgccgttggctccgagagcgagcgcgttcaccgccgacctgtggcgctccatcgtgccgaccagcgcgtgcttcctctgcccggggccgcgggtccacgccttgatcttcttgtcggccgagcccgtgtacacgcgcccgtcgggggagaccgcgagcgcgttgatggcgtcgtcgtgcgccgccgcgatggactccacgcaccggaagccgggcaggctccacaccttgatgctccggtcccacgacgcggagtagaggagcgcgccgtccggggacaccgcgagcgcggtgaccgcgtccacgtggtgcacccaggtgcacctcctgtgccgccggatctccacgtagctccacggcagcaggcacgtccggaggcggtccacggcggtcgggagcaccgcgcgcaggacgagctgcggccgtgtctcgccgtccctccgccggctaccggcacgccacgccctgatcttgccgtcctggtgggagctcaggaggagcccgccattgcccgtggcgaggagagacttgacggagctgtcggtgtcggcgaccgtcgtgctgctgctgctgctgctgcaaccgtcatcctgctgctgctcctcctgacttctccttgcgccgtccagtgcccacagcctgatgctcccgtccgacgaggcgatgtacagcgagtcaccgtcgacggcgagagcggagacgtacgccgacgccgacgagtggcctttgatcgtggcgatgaattggtggagcgaagggcttgtgttcaggtcatggacgtcaagggaaggaagggaacggaggctcggctgcgacgcgagcgacatggctcccgagagcatgctaccttctgcagcctcatgttggatttggcttccttcctgctcaccagaagaggatttcatggaacgggagaccctactagaccagaaaatcaaatcttctccagggaaacgatccaaacacaagctagagtttcatgcaatataataagaagcggctactcagatagcatgctaggatggatcatatagtttttttattattattatttttgcgcctggttttaaacaggaaaatgaccccataggccatagaccaacacaaaaaccaaataatcaaaaatgcatgatagaagctcaaactcatgtttaaaggcaaaagggacaacctagagcgctctagatcacgatcgagatcgaaatcttggtagagtgtcagtatcagataatcagatagagagaaaactagcagcagtcaaaagtaaaatgatcagaagttcataaccctggaggattcaatcctcgcacactagcctttactgtggagagttcaggtagacgtcatacgcgcacagtgttgtccaataagcaaagatcgctctagctagtggggtaacaattgccaccgttcgcgtgcagctaagcgtccgtatccatggatgttacctaacaccagcatctgccctaccatttttggagctcatcaatcttccttttctatgacactttatccactgtgcttgcatatgcattctttgaatctattctagtacaattctacacaaaggtagtcttgtaatgatatctcacccaatccgccttttatttcgttcccatccagcgcatgtgctgccgtgtccccttaacgttctaagcaatagttatatctatagcgctacatttttcatcgaagataatcaaatcgtttttacattgtatattaactatatttactgttggaggtcgtcgtaggcagtagctttgcaggttccgaagatgtcactcgttgccgaacgatgaacagcagcttcacgccggcggcgctgtcttcaaggagattcacgccctcgccgaggtgcacgagacggacagcggctctcctccaagatacaatgatctcgtatccttagccgtgcactcggccaagaacgaaccagtggactttcgtgggatgtaattctctctatgcaaaacaagcagatggatgtgggcaaaaacttcgtgcaacaaatacagcagcagtacgtgacttatatagccttgtatagcaacaagaaaatcttatccctaagccggataacaaacaaacaatagattgatttccgtcggcctgaaaatctggaacgataaagacttatcttccacatacagctcaaaaaaccaacaatatcaaaactgaaaaccgaaatctgaagataaggcaaaagttcagatatatttatctgaaccaaactgaagaatcgctggtacaaaatgaacagaaccatagagataaaatctgaacaaccatcaaatatcgtttgtgactttcattcaaatataatcagaaggaaaaccaactgaattccaacatttacaccctaagtttcaataaatacactgaaatttttaatacacaccatataagagaattatggttaaaaataattgattaaaaaaacgcgaacgcgcaaaagaattgcacgtcaatatattagaagaaaagaaattttgttacacgatgcaatcagccaaaccggcttatgccaagaaaagggggaaaaacataaccaaagaaaaggaagagactactacgatagctaaacgcaactccaatcagctgggacgagggcagaaccccgctacactcccaagaaatcccaaaaaaaaagcaaagccagctaatgaccacagacgacccttcaagaggatggactctagaaccactgagaccgaagagagtgcatagtcgaaaaaaattgattacatatagcaaaaatcattacaaagagaaaaaggtgactgaaatcaagtaaaataatatggtgccgtttttttagcaaaacctataatagttgcttgcttccctgtcagccttatcaatgtgtgtaggtaaaaaaggacaaaaaaagagaaagagagaaagaaatacaataaggatttttttttttggttctgagtaggcatgctaaattagtatctgaattcatcatgacaacagtttcagcaccaagatgggacgaatccccagctgttttctgaagaataattcagcaccgacatagtcgctcgattggtaccgtgcaattgtgctgcagtactgcaagcgacaacacacttatccaacattgtctgggagaaactccatcccaaaatcctgaacctctatgtgatgctgcggaatcaacttgtacgtgcaaacaagcattattgggttgtgtggttctatgctccgagtgaaaccgagcgatggcgcacatgttgtactgtgttgctgtgatcgcactcgataacaacaattatcaattggataatggaattgaatcacacatgctgaaatcagtgataaggttgttcctctgtcataattctgacagttgatattcttccttcggaacagagggcgtaaatgagcaggaatatgccggtcgtgtcaatagcaacgcgagcggtagactcgcattcggtgttcccttgctgggccagaggaaatcccatgctgaacatgaggagacaagcagaaagcttagccctagtagaagccaaagccagcattgtcgttgtaactgcgattacgtctgccctgcttatagacaaatcaaaggaaggtagcctggtagatcaactgggaccaatatggagtatcttcgaacaggacactgcgtctgcgtgcctatgaattgtgaggcactagttctgtgccctggtgaatggtgattgttcagagaatcagagctcaaattgcagatagttttctgattgtttctgggtagttccttcgccggcccggcaaaaaacaggattgttcctgatcagtacacttctccgtgaaagctaaggacgatccttctctgtgcccgtatgtgtcgctttcctgataatacgatctttttgctaggcaagttgcagactcgcggtatcatttttttacaagcgggccgccattcttgtcgtctcgagatgatcttttgtctgtactgtagctgataagtcagaccactattctggtaaagaacttgtccgtagcatttgtaggaggttagatactgaaatattctaatcgccagttgataagcaaattgctcctgaactatcgaagaatatctttgtctcgtcactgacagttccagttctaactgctgatatgcctgtcttgtaagtctattactggtccttggaccttaacaactgggccttcaggggaaatctgtgaatccggcccataaggtcaatgggccgaaattgatcacctctggccggtcggcacgggtttgatttcagcccaataaaatttgaagctggaaattttgcttggaaacagtcagaaagagagtagaacacctccctttgtgatgaccgcatcttcggctttcccatttgtttgtcttcgctgaggtggtgaaactttgtgaaatagggcaaaaggcgtatcttaggcagcccagctaagagatatggcttcctcaactgaatcaaggccacctaaatacctacttcaatcacctgtcgaatagtcgaacacctgtattgcatgttcaactgctcagagccgggtcagtgttttggttcttgctttgttcatttgtacactactaaattatttctttgtttatactttgtatttcgcggatggttcaaagccgagatagcagttatcaacttgtcatggaaagagaaaattgatttagaatgtagaccattcgtgaggacaaggtatatcagaacattctttttccacttttcactcgtcgtgtttaaatgagaaaaatcgagattccaactgccttgagaagagcatctcgctttggaacaaccgaaccccctgcattcccactttgtacgccatggtttctcgatttcttcctccctttcttaaatggagcaaatataaagaaacaatggcatgggctaaaatgcttcctgtcccaagtcaagctagccagaagattatgtttccctacattctgattggcaagttggttattccttttctgattggttaggttggtgattcagagatgtcgagacgtgtgttcttttgcatctcgtgtatgctttggtggtgcagttggaagagatggcgtctctggtctaatatctgaaaacggcactgatgacaataattgctggccatggtttcagcctacgacccttctataatcgtcagattatctcttgcgtgttgcgtgtagctcaccggaaaacaacccgatagaagcttcttgccaggtcagactgtaagcataaagaatccaatcacgaactctttgttattttgaattgacaaaaggtgcttgaattctaaacacgtcctatcatgtcacgtagataatatgacacgagttgacaacaacatgaaacagacgcaagaccacacacacacatacacatccgctgataatctcttgaccaaaccgatccaaacctaccaaacacgcgctaatttttatttagacatttcgttcgacgtaacctgcggcgacgagcgagcgttcccgcctcctggccggctgctgaccaggcaatccgtgtcgtagtggtggactccattgaaaatccttaaatcttacgtgacagcagctggattttgcaccgatcgcaccacgtctccgtctgtttgcggctcaaggtttcagcgatgggcgcctccacctcgcctcgtctcgccttgctagtagtggtcgcggcggcggcgttcgtcttcgtctcgccggcgatggctttcccgatgggattgccggcgacggcgaacccgttcccgaacccgtggtccgctttccagaacctctctgggtgccacgccggcgaggagagggaggggctagggaggctcaaggattacctcagccacttcggctacctcccgccgccgccgtcgtcgtcgccgtacagcgacgcgttcgacgactccctggaggccgccatcgccgcgtaccagcgcaacttcggcctcaacgcgacgggggagctggacacggacaccgtggaccagatggtcgccccgcgctgcggcgtccccgacgtcatcaacgggacatccaccatggacaggaactcgtc

SEQ ID NO: 19494 - DNA, 2124 bp, Oryza sativa
cgtcggtgccggactccatcatgtacccgacgatccgcacggggacgaggaaggtggacctggagtccgacgatgtcctggggatacagagcctgtacgggaccaacccaaacttcaagggtgtcacgccgacgtcgccgtcgacgagcagccgggagatggacggcagcgcggccgccgccggcatccggccgtggagtgggttcgttggattagttgtgccggcagttgtcctgctcttagctccgtagactttctagtccatttttcgtgcctcggtgttgccacgtccatctctggttctatttcttgtacgatagattattgttgacttttggacagattcttgtgtacataacattactgaagaattatagatatcaatatcatacatatttttttgatagagaaattgggaagtacttctcttttcttttatttaaagttacttctcggctagttcgtcatgctctggaaaatgagcatcaaaacgtactgtatgtcctgtttagtgaggtaattaaactctaaattttcaagcaccatggaagattccattgacacgttagtcgtctgtccttagcaattagcattcattagtagtatattccggaagaaaattctatgcggcggtgccgcaccagacagcccgggcaacaccgtgtaccctagtgacgcgtgtccaatccctgttgcaacccgagccgatgtccaatctcccagagctctacagtatcgagtcatatctacctgctgcatgtaaaatctaattcatttttttaacagtgctctatttgatgcgagatacataatgccgttacttttagacacatatttaactactcgttttatttaactttttttcatgattattatttatttttagacacatatttaactactcgttttatttaacttttttcatgattattatttattttgtggtgagatgttgtaatcactaaaaatattttatgcatgatttacatcttatgtatgtccacaaaatttttaaataaaataaatgatcagacatgtgttcaaaagttaatgagatcattattaaaaaaacggagggagtaatatacagggggtttttctagggtaatatacattttactaaactttattaatatgcctcaactggtcagaaattattttttcatttgaatagggttgggaaattccattttgatgacgtagaaatcacggtttgaaaagggctttgagattacatttttgttgacatataaatcacggaaagtttataaggctgcgttcgatcaactccaaaagagagaatttttagcgcacgcaaaacgagaaaacgtattagctcattattaattataaatttaaaaaatgaatttatttgaattttttaaacaacttttatatataaattattttaaaaagacgtattatttaacaatttaaaaaacgtgctaacagaaaacgagcaagatgaagtttggagtagaagaaaataactaggcctaagtaataatcttgctttgatagtcatgttctggtaattgtatatgcaaacgctgctacaaagtacgcatggaaaaaacaatttcatttatcaatagttcaagaaattaaaaatcgatagttataaaaagcggactatacgacctagctagcctcaccatttctaattatttgatattaggacatttcctaatatttacgtcttattggtagttataaaaagtatacataatctatcgtaatactttctttagtttatgttttcttaatctatactacatattgtatcatgtcgtacttatgatgagtctcaatttagtatttatttccgctagttttgctaagaaaatggaagtcccttagtctaaaaaacagtacttttcttaatttggtaaatgtcacgccccgaactagccccgaatggaactagcccgtgacgctccaaattaacctgttaatcgataccagtcccaggaaacagtgctggtatcataggaagacaaaatatcacagcaacagaggtctctttattttagagtaggattacagtcatgttgggctgcggacagatctcgagctcacaactgcattacaaaagggaaagcggaagccaagacatggaccaat

SEQ ID NO: 19495 - DNA, 699 bp, Oryza sativa
gtattttgacgaaacaacggcagatgtgcaccttcaagatgaagctttactgacgatccaagtcgttgagggggtctaagatccagaatccataaacactctccagaacacatgcattgcaggtgaggagccggacgggacatttcgccgagcaccccgcgttcattgtactctgaggaaaagcggcaagcgctggatgatgggttttgtttcagaatgcatgatgaatccggatgaacctccacgatgccaagttccggactggtcacctgctgatgaactgcatgatgagttttgttcaactactcacctctcacgggattcacctgctgctcccccaccggcaaggaactccatagctgcagctcacccctgcgatgcagaggggattggtggagacaggcgatgcagaggacggcgcggtggctacctagcgacgggagcacctcgtgcggcggggatcggtggagcagaacggcggcgacgacctggcgacgggaggacctcgtgcagcggggaggcggaggatcgtggagggcgagccggcggcggggatcggtggcagacatgcgatgcagaggacggcgcggcggctgatacggagcggagcactgatggcggaggtgcaggagcggaattccggcggagggcggaggtgcaggtgtggtgggagagcgatagggagggggggggggcggt

SEQ ID NO: 19496 - DNA, 652 bp, Oryza sativa
gttatcctcatatgtccaaaaccttgctaacattatggatataccttttaacttgttgcacaggtaagtgttgatgttcctgatgtacgcggaaggacagagattcttaaggtgcacggtagcaacaagaagttcgatactgatgtctctcttgaagtcatagcaatgagaacacctggctttagtggagcagacttggcaaatcttctaaatgaagcagccatattagcgggccgacgtggtcggacagcaatttcctcaaaggagattgatgattcaattgacagaatagtggctggtatggaaggaactgtgatgacagatgggaagagcaaaagtcttgttgcttaccatgaagttgggcatgcaatttgtgggtaagagataatctgcatatttgctaactgtgcttttgtttattacttgcatatcaaaattccgtgcaactattcatatctggaaatgtattctttgtagaactttgacgcctggccacgaccctgtccaaaaggttactttgatcccgaggggtcaagctcgtggtctcacatggttcattccaatggacgacccaacgctcatctccaggcaacaactgttcgccagaattgttggtggccttggcggtcgtgctgctgaggagatcattttt

SEQ ID NO: 19497 - DNA, 1424 bp, Oryza sativa
ggtttcttttgacgaacccaggccacttggattcaaattctagatttgatatggatgctcgcacttacgcgtggtgacttcgtcaatctcaagatatatcgctccagtcttccggaggtgctcataagggtaaggtaagtgtgtgtgcgctataataagcgtctatgtttgtaccgtgtttctaatcctatcttactataaagttatctcccactaattccttaagcttaacatgtaaagatgacacatcatctttcactaacaagatgccgcatcatcatccactaattaacaaaatgccacatcatcatccactaacaatcatcacatttaaacatcatgcaaacatgctatatttttatagtttttataatttaagagcttttcaaatacaaacatgttaaattatcgtccaacataattaacataatgtttcaatgtatatatttattatgttttatgatatcctatatacttatatagtttatccttatttagttagtgcttaaatgattaatctacggtccaaattatctttctcctttttttcctctaattaagccatatcacatcaattgtttgtagcctttagatgattaatctacggtccaaactatcttcctattttttttcttccataaaatcataccaccttaccttttacgtttgaatcaccattccacatactatttgaatttaaattatcataaatcacattaatttacttaatctgatattatctagctatcttacacgttatttttttttgttatcagacgaaattcccgcagcaatgcgcggggtttcacctagtaaaaaaacaaaataagtgcaaaatatttggaaccatcaatccaagtctagaaaaaggaataacgaacaacaggtgaaaaatgcaaaagaattttgcctcacgtccccactggccccacctgccagctacacagcttcacatgtctctcccccgtctacggacgcaggctagaggtggccaaacgggcggcccggcccggcacggcacgggcacgggtccggcacggcccgtttcggcacggcccgttaggcacggctgatgaaacgggccgtgccgtgtcggcccacgtgccgagccgccggcccaagcacggcccgtggatggccgggccgtgcccgtgccggcacggcacgcccgcggcccacgggccgttcggggcacggcggcccgtgaaggcaggccgccagcccacagtgcatgcacagtgtttttttttttaaaaaaaggaaaggaaatgtataaggaaaaaaaaattaaaaatggaaataaaatgtttaaaaaaaagtaatgatttactaatgttaaaaaatgaaaaaatggtatttaaaaaatggaaataaaagttttttaaaaaagtaatgatttgctaatgttaaaaaaaagaaaaaat

SEQ ID NO: 19498 - DNA, 1092 bp, Oryza sativa
gtaaactactataaggtaaaacaacttttaacattaaatacgttgcattccaccgatgctctgcatcggtggcaaacttacgagcttccacaccggccgcaatgcaaaacctcttccatgcagcaatccgcgggttagaagcagttaaccacgcgattgcttgacgaacagcatcgatgtggtcacctaccctcttcatgccagtcttaacaatcaaattaattatatgacatgcacaacgctgatggagtagaaaagattgagcatacacacaaaataaaggttgcaatatttcaatagccctagaattagcagatgcattatctagggtgacagcaaatattttatcagcaagattaaattcattaattacttccctaattctttcagctatgttttctcctgtatgtgagacatctattaacctaagccctaaaactctcttttgtaattgccaatcatcatcaacaaaatgaacaactacgctaagataatcctctctagctctactactccatatatctgaagtaacacaaacagagaaagtacatgtactaaacagttccttaagtgcagttgcttccttgtgataaacattctctaaatctctagttgatgtttgcctactcacagctttaaacctagggttatgagattgctgaatgtaatgttcaaaagcaggggactccccaaagttcaggggtaaatcttgcctggcgattaaccggacaagagattcccgagcaaccatgggatcgtactcccaactgcgtaccgtaccgtctgggtttagcataagttgctgctgccggagttgtattccttgcttcttggcacacgactccgcatggcgcttgaggtgacctgtaccaccagaagaacgagcagataaaatttgcctacatattctacaacgggctttcgatacctcccttccgtcggggcatgtttcctttatctcgtcgaagctttgccacacaccggaggttctcgatctcttcgagccggtgtgtgtcgaaacacttccgctcgcggttccggaaaatccttccgaagctgtcgcctcctgaaccggtacctcctcaacgacag

SEQ ID NO: 19499 - DNA, 1335 bp, Oryza sativa
aagcccattattctccctctttctctctcggaataagtttacctgaggtcccttaacttgtcaacgaatccgattttcgtccttcaaccggaagaccagatacaacgggtccctcaactatcaaaaccggtgcaaagcaggtccctcagcggttttgatggtggttttggctgatgtggcgcctacgtggccggttgacttggtcctcgtcctacgtgacggtgatgtagcactagaagcaaaatataaaaataaaaaataaaaacaacaatgtggggctcacatgtcagtcagacaaaaggaaaaaacagtgggacccaccatcctctctatccacggcgacgggagaggagcgaccggcgcgtccttctctctccctcccggccatccttcctcgtcggcaagcgcgcacggagaggggaaaaggcagcggatccactggtcgtttcccgccgttggtgttaaacatgatatttacaatgggatttgatccagtgatagaggtgaatgtaatcaacatgagcatgcttaacgtagaataagcatcaacaatcacataataacgcaatgttgacattgcgatgaacattaacagtaaaacttctaattgaaataatgtaagaaggttatacccaagaatggtcctccgctagagtttgaggcagtgttgcctccgttggtgttgtcgggagcctccttctccttgtctccagtgttgccgttgtctccagtgttcgacatgttggtgaagatgaagtagacattgacgaacaatgagtagtcgcgccttgcgctccccaaaaacctgatcacccgcccgtccgtgcaaacgtcgtagcagtgcatggtttgcatggtttcggaggcctactctcccaacgcgtgtgcacacactcgtcgggatgggattattgtagcagcaacagccttggaaatggatgaaagtgtgtctcacttcttcttagggagatcaaatccattctcattttatagaaggaatggaagatgaagggtaagagtcatggaataattaattctcatcaattagccatcaaccatcctccactacacaaccatcaaccaaccattaatgaggagtaattgatgtaggttaccaatggaataggaagaggaatagagcaactaattgtcatcaactagccatgaaccatcctccactacacaaccatcaaccatccatcaattaggagtaattgatataagttaccaattccctagtcaaatggattaattctcataaactcttcatcccattgatatcccataagaaaatgaatacacatgaattcctagcataattcctagcataatgag

SEQ ID NO: 19500 - DNA, 607 bp, Oryza sativa
aacacgattcacaggcatgatagttctgtcagaaaagatcgaggacaccattggtgggataaattccgatcatacaggactgacacaagaagcgaggagttctattccctgccgttcaacctgaacaagttcttcccatcagtatgagcataccgtggctaatgcaagagtaggttactgtgtactgtctgtcccttatgaacaggtccctggaagtggcaaactgttggcctgaattctctaggtatgtggaaatcgtagacctttaaacaaaagggaatcctgtggtatgaacaaaaaaatattggtggaattatggcacggatgtatattttaacctatctgggggcaatagtaggaaattttggctactcatttgcacatgaaaatggctcttgattcttacatcatgtgggctatctcacctagaaaggagttgaatggattgacaacgccattttaatactacctctatttttttttgtttgacgttggatgtcaaataaagaaaaatggaggaagtatcattgtatgatcataccagtgaagctaaaatctgtatgtaggctttagtatacaatggaatggtatctaatattgtggttgg

SEQ ID NO: 19501 - DNA, 551 bp, Oryza sativa
caactgctggggtaaagttaggagatactccccaacactggtcacatatgcctgcgggtggcactgaagcttggaaggggaaggccacctggttcctccaccgatgaccaaattgggaggcgagcaacctcattgagacgctgtcggactttagatatgagcacgtcatagacgagttcatttactgtgtctgagaaggccgcaactctttgtgatgtcagaggtagagcatggaaccttggatcttttgactgtataacagaaatgttatctttaaattagccatgaagacaaacaaagagttacttgtgatacttgggaaattataggtcaaaaaataggttctatgccacatatgagtagcttaaaaaaatgcataatagaaaaggaaagctaaaaaagatctccgaatttcctataaaaccagataatctagcttaatactaccacctaagtttgcaatcaggctgttcaaacaaatcagagaaacatgtgataactctagtgttgtgacactagcaagataatttaaaaatatataacttgcctgt

SEQ ID NO: 19502 - DNA, 1800 bp, Oryza sativa
tcagctctataccctgtgcacccacaccacgagcaatggccccacggatatctataccagccatctcagcagaaagtaaagcacgctccatttgcccatacctacatagcatgaaacaccactggctgagtactacagcaatagcaacaaaaaaaatctcaccaatgcagttaactgcatgcaacagaatttttcacaagttttttttttaccttgctttaaaagtctcatatggggaataaatagctttcaatgtattcagcagaactaaaagatctgactctgaaaataaatgttggatgttccgagcaaaagtgcccgtcatgttgtgcaggtcgatcagtgctccaagatgcttattctgcaatttggtactttttggcaagtcacctgataaaacatctagtatacctgggtacagaggacataaaatcaatttattgttacgaaagaagtacgcatatgtggcaaacaagtaatatccttttttaattgaacagagaaaaataaaacatgtaattcaatcatgaaattagtatagacatacaaaaatgaaataatacgagaagtttatgcattaccttttgcaacagatctagtttcaggaacagcatctccagttgctaggttgacacgagagacaaaacttgaattcaactcactcatggtttcaccaagtacttttgggactagtgatttgtattcttcagggaaagcagtcaggcaccttcagcattagcattgtagaacatccattaatttttggtggagcaaaaatattgtccgaatgcagctaaaagatgctgccaaaaactggcttctgtttacaagggcaaacattgctgattcagaacaaaagacaacagggtacaatgaacataccacttccattcttgttcaaggtaaagtagtgtctcatcatagaaatttggaagccagctagcaaatgagagactgtttatgctttctccaccatacttctccatctctacccgcttagctctctgttttagatcaaaatcttcccaaagtttctttagaggcttgacatggatcttagtatattgcacctccagtgacttgaatctgccaatacgtatcagtattccacgaagatcttgcacagcatcgaccttccaaccaaaatttgtaggctttagatgaaatagagatgcctgtactactgtttaacaaatataaatgagattagtaagaaaaaccttgcggttagaaagtgcatccaccaaacgaggttgaaccatgtcatctagccgttcttccaatacttcaagctgctttctcacattagcgaactccgcaacctgaaagcaacttttatataagcaaaacaaatagcttctgcatataaactcagtgtactgtgcatgtttgtgtgagagagtacaatacctcaccaactgccgacaagcaatgtctcatggttgccagggtttctgcagcttttggaagatcaccactagaaaatacatcctcaacactttggctcaactgagctagtccagccgcatcctggcattccgaccaacaagctgttaaatctattaaaagataacctaccactgtgagtgaagcatttacttcagtaacatgcaccatagtccacatacaacttacctgtaatgttgcatacgccgcttccattcgttgtttcacagtatcaattcgtgctagtgcagttattgactctgcagatgaaccctcagcctgattgaagaaatcatcatcatcagtaatacagaatttatgaaatgtagatgggactgaatacctagttagttg

SEQ ID NO: 19503 - DNA, 1993 bp, Oryza sativa
ataattagtgaaactctggcacaaagcactccaataacgcatcacagacaagcacaccagttgcatcccttaccccagttcagagagcttgaggtgggcctcggcgtaatccgcaaagaaggcgtcctcatcctacatatcaggcaacaatcatctactttttaagagatcaacgatgatccatttctcttatttcttttattttaaaaaaaacaactctttagaaagaagacgagagaaaataatgcaaggatcaaggggtgtaccgcagcatatttctccaccagtggacggaaggctgggtcagccatgagggctttgtcacttggcagctgaagaaggccttccttctcgccactcacaagctcgctgttgatcgagaggagattttggttttcattctttagcatacaaggaaacaagctgtggctggctgtttatcaacagacaggatgcatctttaaaaagaatcagagatcacgcacgtgaagtaagagttgtcaaagatcaaagggttggacgtccaggctccctcaaagccagatctctccttgtggcatcttccctacagaagatgaagtgaagctgcatgaataacccttccggttacaagatatgagaaacacactagggcaattgcacaagtgtaccaaccagggtgtgaccaccagaaagagcaactatgtccttgtcactcaaacccatctgcgcagaaaagacctgccttaggtggtcagaacctggaccaacagccagaagaccatgacatattagttatctcgcatccacaaattggcacactgttaattaaagaacacacaggtaacatgtatgctccatataagaaagaagaataaacaggaacacaaaacaaactttagtaatgtggtttgcataaacagggttggaaaattttagtcttatgtaggttacacaacttacttaagcatgaaagaattctggtaatggacttgcaatatgaactactccatcagtagcacatacaaatgctggtcatagatctagaaaatttaatcaccaacacattgggaaatgcattgtcataggggtaacttaatacagaggaaatcttaataccttgtgtggcatcaggaagacggccttcaggaggaggctcaggcttgtcctagaaacaaacacatcacatcatcaacattcacaagacagtggagaattcagggaaaggaaacagcggcgtacaagatgacgaaagaaaagaattgacttaagaaaaataccatttgcatctaccagaagaagaaagaagaaggggggagagagagggagagggtttagggatgggaaatgtgattctgacctgcctgcccggatggaaggggacctcaggtccgccggtgacctcgacggccacaacgccagcaagctgccaatagagagggagagactccaattaagaggttgatgagttgagaggaaggaagggaggaagggagggaagtgaaccttacctggtagaagtcggcgtaggagaggatgggaagttggtccttgatggggtcgagaagcctgacggcgatgtcgaggccggcgttggcggcgtgggactgctcgccggggttcttcatggtgccgaagggcccgccggtcctcgacgacacatcgaaggtgccagcagagtgccacctgcagccagccagccactgcaattcaacatctactcctcctactctatcttctggaaattaatcagtagaagaagaagaagaagaaagttacgcgaggcggagcatgagtggggcgcagttcttctcggcgatgaggccgcggagcttgcgcttcgccttgcccacggccgccaggtactcatcgctcaccgtcgggtacgacttgctgcccatgctcccctgcttcttcttcttcccaatccgaatcaatcaatcaatccccaactcaactcacctcacctcaccaaggagggatgagatcttcttactagtatataaaggcgagg

SEQ ID NO: 19504 - DNA, 4193 bp, Oryza sativa
atggtttgcatgtaaatcgcgagacgaatcttttgagctaattacgccatgatttgataatgtggtgctacagtaaacatttgctaataacgaattaattaggtttaatagattcgtctcgcagtttacagatggaatctgtaatttgttttgttattagtctatgtttaatatttaaatatttgtccgtatactttaaaaaaatttggcacacgaactaaacacagcctgtatattatcccttattattattattattattactcccctacttgacgacaactagtactttttttgcggggagacggcgactagtattgtactccttttttcattacataatcgtatactccctccgtttcacagtgtaagtcattctagcattttccacattcatattgatgttaatgatccgtttcacaatgtaagtcattctagcatttcccacattcatattgatgttaatgaatctagacataacatcaatataaatgtgaaaaatgctaaaatgacttatatttgtgaaacggagggagtaatcatcatcatgtaatcagataagccaacggatctatggtattacacttgcacggtacctgccactgccagcaaggcacttcctacatcaccataatgctaggtccatccgcgtttcacgatttgcgctgtcacagctcttcaagtcacgttaggcccggttagtcctccaaaagttttttcgaaaaacattaaatcaaatctttagacatatgcatggagcattaaatatagagtaaaagaaaaactaattacacagttaaaaaggaaatcgcaagacgaatcttttgagcttaattagtccataattaaccataagtgctacagtaattcgcatgtgctaatgacggattaattaggctcaaaagattcgtctcgcggtttccagacaagttatgaaattggatttttcattcgtgtcaaaaagggagaatagccaatatggtccctaaagtttcgctcctaggtcattttagtccttaatctttcatattgtccaaacaagtcctttaaatttgtcatgtgggctgatatagtccttggtcccaccaaaatcaccacatagatatgccatgtcaccttactatgcaaaatatatatgatttgtccaatttacccttacatatatcatagaaaaacaaaaaacaaaaggaaaaatgtaagagcaaaaatatacctcaaaagggtgaaaaaaagagatgtattttttcctatggttatgtctaattcaaccttatatttatttttctatgatatacgcaagggtaaattggacatttcatcatagattttgcatgaatgatgacatggtatatccatatgataattttggtggacccaagtattattctagaccttatgacaaagtttaaggatttctttagactatttaaaaggttagtgactaaactgatttctacaaagaaactttagggactaaattagctattctcccataaacaccttccgacatccgatcaaacatctgatgtgacactcaaaaattttcattttgcgaactaaacaggcccttaatctacttaaaaagaataggctcttccatgactcatatgccccggtttgaaacagttttttattcagcaaattattattaaaataattacttgataaatcaaatataatttacagcacatggtttggtacaaaagtttcttttaagaatacatatttttagagacgtggagaaaacaatggtccccatcgtttggcttatttcctaataagccaaaacggcttattaggaaataaaaataaatttgtaggtaaaacttttataaatatgttcttggtgacttaaaagccaatgttgaaaaagaaactatgttgaaaatatttcaaaatcaatctcaaaattaagcttgaaaatttaaaatttggctttttctttggctgattaggccatccgatgggagccaatatattgtactaataatccaatgaagtagccagaaagaacgtgtggcttcctttcctctaaacccccctataaagtgcaaacaactatcatgtcgactctccctcattgtctattccctctggatccgtttggttgggtaaagttttaggaggggttgggtttagagggattagactattacttattctgtttggttgggattggttaggagacatgaaatttcggtgggatggaaatggaaaattttctaacacatagataaggggtggtaattgtcctcctttattttgcctaaactaaactccttattgttttctaccacctctaccaaacaagagattgaaacttaaaaaaataattaaattctcatgttaatctcaccgtcaattctctcgtcaaatcgtcttccctcaagttaccaaacaaaccatatgtcccataaaaaataaacctagcacaggtgacttcgatttaatttttttacgaaccgaagagagtattttgctaaaaaaaagtcaaatcttattgttgtcaaggcttttctttttcatttttttttgaaagtcctgccagccccaatcttttcctttctctttctcgccagctcccacaatcctttttcacgaacgcgcaaaaggattgcacgtcaatatattagaagaaaaagaatttttgttacacaacaccgacttataccaagggaagagagaaaaagcaaagccaaaaactgaagcccagctcaatcagccagaacaacttacgcaagggaagggagaacccaaacaaccttggtgtcttagtacaaaattatccgttatttaatatagcttgtagaaaatcaataaaatatgaagtgtacgctaaattttctactaaagccaattgaaaacatttggatcgattttcaattttggtaaacacgcatgggcacctagcagttgctatagtagtcggttcaacgtcctaaaaccagacccctttcttaatcgaccgcaaaagctgacattgccaaagataggagtatcgtccagcaacacggctaccaatcttttctttaccctttctctactagtaagcggtgggttctcagattctgcaacgtcctggcaccataaattaaagcgctaaaccaagccattgcgttatggacaatgcaatgtgatgaaccattttacgcatatacaaggctcttacttgatccattgaaaaatccacaagacagaacgtgtcattcgtggttcgtgccacagtggttctgacgaggtttcagccccagcaaggattcccacaatagtcagctacatttgctcctgaacaatgttgtaaacagatatcaggatctccacactaatcaaaattatgataagccattccagaaaatcagacttcctgttctgaaggatctcttgaagaaaacgaatgttgtgctgcaggttaaaagtacggtgaataacataaggacacaatgcaaatatttacaatgcaagtaaataatcaagtgaattataaaacgttctacattacatgagccttacctcaacaaatttcaacttaaaatcaaggttcccaaatctttgggttaactcatattcatctcgaaggtattcccaaatctgagcatagtttgcgttcttccaagcaatgtctgacctggaattgacaaagttctacagtaagtatgtgagaacagataaagctttctaaatagtggcagcaaagataaagtttaaatgcagaactccaaaagattgatccaatgcatgtgagacagtgctgggataaaaagtaataagactgagctaacaacctcagagaagcaatacagctcacacaccgactaccaaacaacagacctaattccagtggacaacaaatactgtgtttcgcatgattctggcatcccgctttaggagctttgcattccaaattaatagtattctaaaccagtttgcatggatacaaataaaaatgtctgaacattgcatgaaataaatagtactctagtctagcaggataaggcaaatgcattcacaaaatatgtgtatttctaagtaatatgcaacagagccaaacagcatgcaaaaaaatgctcttaatatggggaatgaaagaaggaggtttattaaatacatagttctcagtatggtgttctactcacctttcaaaaagcccaagcttgagaataacatctgccaggttagagttagcctttcctacc

SEQ ID NO: 19505 - DNA, 1723 bp, Oryza sativa
agtttggttccttggtccttagttggaaaatcaaaatgtatttcagcagtgaataactccttatccagatatttagtcatttttagctcattcaaattgaccacatgctaccttgtaataagcaagccaatgaagtcaagccaggatgtgaataagaaagcaaatattgtaagttacagctatgtatacattgcaaatattgtaagtcaagccaaacactgctctaaagttgtaacttacaactatgcaagtttgtttgccagctgttgatcaatggaaacagttaaaatttgaagtgtagcctactatggagcagtgctgcggaagacggatgtcggacagagagggtacggccaaacgtttaatcgttatgtggataattaatcggaatttgatggaaatttaacgttttataaatatgagtacatagttgataatagtttgccattttttgagatgtaaatgcatattgaacatattcttactatgtttaaaatagaaccaccatgaagtggcattaattcaacatatattaaagttcataatgcatagctgtgcatcaaacagtgagctgtgggtgggtagttgtcatgggctggggcgtgtgatcttgcccgattatacggacgattagtcaaaaaatgatggattaatcagtaatgatggtgattacatgttcaggaacgactaatgaagaccgtttcgcggacgggagctcgctgactccattttaacagttgtatcaatcgttttccacgacactgctatggaggcttctttcagcatggatatgctctactcaacatcatatcaccatctcacatggactaggaaaacagcaaatatccagtgttccagtactaacttctgattaatcctcaacacaacattgacatgataaggaaggaccacagtggccaaataggacaaatattgaagcactctaccaattcaggaaaaaatgagcatgtcttgagaagaacaagggcttaccatcttttctcatctctggaagtaagcctgatgcatgcttctcaacaattttcaggtatccatccgcttcatgatcagaaacattaaacagcacaatggacccatattggaacaccaccatatagtggcaatgactttcatctatgatgccagccttaaaaccctgaagaaaacacgcaggcgagaagcattagtgcaatcatacttgcatcgttactacaagcaagcaagtactttctctagcatggtttaataaaacaaaaaaagaagcagtcaactcattaggcaaaagaaaaaccaagttgcaaggacacttgaacataaattccggccgcattcagcccaaaaaatccataaaagcaaaaggaacgcttgtgaagctatgttgtataccactaaagcatgagtatgttatcaggaagagcagagtggagactgtctccattgaactaagcacaaactaataatggcattacaactgaacattgcattaactgaaaatatgtcattacaactgaacattgcattaactgaacaattttctcaattatagcaattccagggatagcattccaccaagttgagcaccggacatggaattgtgcgaaaagaaagagtagatggtgcgattggctaacctctgggtctcccttgacatcgtagtacctgaggacgacgtagttggtagcacgcgaagtgggggggatgcattgaaggaattctgggactg

SEQ ID NO: 19506 - DNA, 20771 bp, Oryza sativa
ggcgggggggccggaacaccgagggcgaaggggaccgccctagggtttggagggttctacaaggggcatgctggaggaggaggaggggcctcagtaggctcttctggaaggttcgaatcctacacagctccatcatctctcacaaatcacacattacactagtatttttttggagaagaagaagaagatatgatatgagtatgacggcggcggcggcccccctcccttcctgttcctgtgcgctttgtggtggtggatcgagggttagttcaaaattttatacatgagcaaggaggtttttgcaaaattaccagatctcacgtggcatgcatacaaggtgaaaccaggcaccagcggtggaaggagcaggcacgcgacatagtcaaacgcgagattaacagtgagattaccggcaaactgtgttttcctgatcgcacacgcgctcacgtggagccgtaatcgcaagacgacaatgtgcaaattaaacaaggagaccaaaaaatttttaaaaaaaaggagaaaaagggtacggttaggctggttattgattgatgatatgtcacacgcacccctttcctattacagcattgtgaaaactcttttaatgtttttagcttccattactgcccacgcaattgtaacaaagtggctcatgctttagcagcctatagctataatagttctcagacgactcagttcagctgggatggttttcctccagatgtggaggaggtggttgccggcgatttagccgaaccagtggtataatggaatttaatgttcctctaaaaaaaccctgcttgctccaaggatgaggtggatcagactccacttccaaactactctaatccacttattaaaaatttccaacttgtgtttcaaacttttatctctactagaaaaaaatgtccgtgcgttgcaacgggtgaagactattttaatttttattatttttatacgaaattcactatgagaatttgcttggatatgtatttttctgaaaaaatcatgagctgcaattaggagtccgagtccgatcatctcaagttagcatgcgagtttttttaaaagagatttcttatgactcctgtattttataaaagcgaacgaacttaaaacctgactcaaatacggatatgtatctccaaatgcgaacgaacttaaaaaccgactcatacacggatgacgtactaaagtaccggcaaaaacatcttcaacttttataatagtagagatactaaaaaaaatatccgtgcgttgcaacgagtgaagcctatcttaatctgtgggaattcacttggatattgtttttacaagttagcatgcagttttttttataatagattacttatacaactccttctatgtgccagggttacggataagtcataccttctatcctacgacttatggaatatacagataaggtgtaccttcatgtacacggatcgtttccttgtataccatttggaatccattccaaattatggaaaatatatctacgagtctaagtgatttccaaaatcctactcggaagggatagaatttcggttacaccgtaccagatccaatatcctcaggtctttcttgggggtcaagatgattcatggtataaaagggaccctcggggaggggtgaaagggcatccaatttaatcgccaacacacccactatagtttacaaagccagagtacgcggggccaaatcgctgggagatctcatcgaaaccctcgaccacgatctcgttggtatgatctatttcgactactctctttgtaatatgttcttgtcattataaatcccatataaactggactagggctatgacctgataaggggcctgaaccagtataatccttatcttttgtttgcttgatgtcgtactacgtagaccctcattccaatgtaccccaacactctattcatccggtctgcgagtatcactcgtcgacactatgtttccaaaagagaatggaattaaaagctgactcaaatacgaatatgtaattccaaaagtcaataaaaacttaaagaacgactcaaatacggatgacgtatcaatttaccggtaaaaacatctttaatttttataatagtagagatctctaatttttgtaatatgtgtggtattcccatacataatacatataaactagagtatagttattactcatctagaggacccgagctagtataaatacatgtcctttgtctgcttgatccgatctcgcatacacactggttctaacgatctccatactctacaaatactacttgcggtgagacgacaaaccttgttgttatagctaaatatttcgtgaaccgcattaagttcaaacggattggtcttgccttagatcgcaagttgttcaaatgctcatggataacgaaattatttgagtaaatttcaaagaactactactattttgtcaaaagtatcagttatgacatttcaggtaactggaatagtggtatacaattgtatcgaaaagcttctactttatgtgtctgacaagttttggcccatgtgtcatacatatatatggggaaatgctgcgttttttaaataaaacagttctctattattcccattttttttgaaatattcaactaaagttatagcaaagtgatagttttgaccaaataattgcaatttatgaaatttactcacatcgttttgttggatgatttttttattatgtttacaaatcccgtctctcttctatctatatatgtggttacttaaccacaattcgtgggaatagaacacatttcctccaagatagtagataaggatgcagttttgtgctcaagcatgctaggaaaaagctaatgtcatgacaacgagttcccacttggagtgttgcctagcctttcatgagattccattcattttatgcctacttatgttattcctattgatgacttcatggtttactattggttttgtgtattagggaccaattaaatacatactaatttgtcaatctgggagaggggggcattattaatatcgatcgtatcatataccaaaactaacacttctgtctaatgttttggtaagcgccatcattggacattcttcttggtgtaatacttaagataattttcaatgaattgctccctcatgttaaggatatttgacgttgggagtattggttttagtactcatagtatatttagctgtagggagtattggttttgttttatatatttttagggtgttcctctaaaatcatacattagtgggataaggaacaccattttttgaaaacgtactaaaagtggatttcactggcctagatgattcttggaatttcctcttcttgttctatcaacaagtggctcatggttacttgtacgtagcccacttaatatagttcaaacttgtactcatgttttgactagcttgagctcatcatgttaccaagttcatgctctatgtttatttgaatgtttttaggtctcggggaataaattggttaaaacacaatgtttatgtgtttgtatttctaactaaaacgtattgtaaacttaaatatcaagttgtggtgtttcaaatgaattgtggaatctcccatgaatgtcaccttagttgtgctcaggtttacttatgtatgttaatgtcacttccagaaattcttgggcactatatattaggctacagcaaatgaaacttctcttaaaaagtgagataccaaatgaattcctatagcttcattttttaaaagagggggctcaattttattttaagaaacaacaaaatataaacatttacataaccgcatgtttgttcatcaatgaccaacatgaatgagcataaagagtagaggcaacagaaaacactagtgcgccaccaagatatttgatcaagagaagagttagcaacacataaaatgtctatctaaagaggagttaccaaatcaacatccatttcaccagaattatctaagaaacacattccattaagcctccttgtcattggtgccaaacccatagactttctaaacacgtcctcaatcacttgttagattttttttttgcacaatctagcatctcatagcgttttccttcaaactggattaatgtttatgtttgtcggagatatggacccggaggtatgcgaaatgagggaaatctaccttcccatcctgccacgtgtccctacagcctggtcctgcccccgcattccgcgaaccgcaggagcagccgagggggtcggggcctcggggtgccacgtcatgcccctcgggcccttgcaccgctttgccccgaggccctcgcccagccgccatttggcagggggagcgagcgaggagggggcccaggctgaaccccctttaatgcgcgcagcgccccaactgccccctgtcgcatttaatgcagtggggtagacgtgcggcgtgctaaactgacgcgcaatagtcaagaatgaccggtctgtgaccggcctgacgccggtcacgtctgactggacggacaaccgtgctcccatgtcgcatctgcttccggcggagtagaggtaggtatgacccgtcccatcggagggtcattcggacggcggccaccacaagtcttcacccattaatgagggaatgacagggttgtcccccgtgtcaggcgagggacagcgctgggccccgctcaagggcaagctgtggtttagcttccaggcgaaggcacgggtcgagttccggtcaagatagggtgggtccccacccgaaagaagagtaggtagaggcggtgcatgtggtatccccttaagatataaaaggaggacattgcccaccgagaaaggggacgactctcagtgaacttgagctctaggagaagagtgttctcctgagtttaggaacccttgtaactctcagtctaaatcccatacacaggagtagggtgttacgcttcatagcggcccgaacctgtataatttggttgtgtgcgagctagctaggagccttagggacagatacgtgatttctagaggcgagcttcttcccccggctgaactcacgaaaggggggtctcacgacctcccgctagagaggatcatccctcgacagctggcgtgccaggtagggggaagtcgcgcgctttaaagagaagtcgtttccttccgtcccaagtttcccttggccctcgacgatcatggtcgaggtcctggaggaggaggcggtgatgttcacccccactccgtctgggagtgaggatgctagcgagagctgcggccctcgtcaccgccgccgcaactctccaactcctccccgccgcgatccctcgcggagggaggaccccacccattcgggtggttcggccctctccccgcccccgggcggagggaggccacaacgcgtcagggcacggcgccgcctcacttatggtgacggcggctcgccccgaggcgcgcttcaagcagtgggtgtccttctgcggcatccccccgtgaactcggagccagagacccctgtccagcgctggttgggcgacgtggccaacttggtcactactgcccagtggcagttggccgcgggcggccgacccgccgtcaccggtacgtcgcgtacccccattaccctctcctcgtcagcaaggaggagggcccgtcggtcctggaggaggaggcggtggtgttcacccccactccgtctaggagtgaggatgctagcgagagccgcggccctcgtcaccgccgccgcaactctccaactactccccgccgcgatccctcgcggagggaggaccccacccattcgggtggttcagccctctccccgcccccgggcggagggaggccacaacgcgtcggggcacggcgccgcctcacttacggtgacggcggctcgccccgaggcgtgcttcaggcagtaggtgcccttctgcggcatccccccgtgaacttggagccggagacccctgtccagcgctggttgggtgacgtggccaacttggtcactattgcccagtggcagttggccgcgggcggccgacccgccgtcaccggtacgtcgcgtaccctcattatcctctcctcgtcagcaaggagagggcccgtcggtcggccacggcctcgaggcggtccacggatccaacatcgttgggggcctcaggaagccggaggcgtcacgacggtctctacggggagcaggacgctcgaatcaatatcgagcgacgccgggacgagcgccgagctgcccgcatgggggaaggcgcctcctcatctggagtgccacattcctcctcacgaggcggccctccccccacgctcacccctggagggacaggttgtagggccttcgtggcgagtctccggaatgtccggtggcccccgaagtttcaccctaacctcacggagaagtatgatggcagcatcaatccctccgagttcttccatatctacaccacgatcatcgtggcggcagggggcgacgaccgggtcatggcgaattatttccccatggccctcaagggtcaggcgcgcggctggttgatgacccagccccccgactccatctactcctgggaggacctgtgccagcagttcgtcacgaacttccagggcacatatccccgcccaggagaagaggcggacctgcacgctgtgcggcggaaggacgatgagtccctctgctcgtacatacagcgcttctgccaggtccgcaacactattccatgcattccggcccacgcggtcgtttatgcatttcggaatggcttgcagcataaccgcatgctggagaaaatcgctttcaaggagtccaagaccaccgctgagctcttcgagctggcggacaaggtggctcggaaggaggaggcgtgggcctggaactcccctggcatcggcgcggcggctgcggctacccccgagtctattccccgctctaagcggtgagataggaggggcaaaaggaaaccggcccgctccgatgacgagggccatgtccttgcggctaatgggcccgcacgggccccgtgcaagggaaaggccaccggcgacaagccgagctccactgctccatccggcgagggccagtcggcagacaagtggtgctcagtgcacaacacttatcggcacagtctcgccgactgccgctcggtcaagaatttggccgagcggttccggaaagccgatgaggagaagcggcagggtcgacgagagggcaaagcccccgcgaccccagccgatgaccggcgaggggaggccaagaagaaggcccccgccgatgatggcgatgacagcgaggatctggagttccagatacctcagggaaccatcgccacgcgcgatgggggggggggcttgcgctcacacctcccgccgaggcttcaaggccatgcggcgagaacttctggccaccgttccaacccacgaagcggcttggaaggcgcgctggtcagaggtgaagctcacctttgaccagagcgaccatccgacaatgctcgctcggggtgggaagttgaccctcgtggtctccccgaccattcacaacgtcgggatgaagcgcgtcctggttgacatgggggggggggcagcctgagcatcatctccccagctgccttcgacgcgctcaaggccccggggatgaagctccagccgtcgctgctgatcatcggcgtgactccgggacacacgtggcccctcggccacgttgagctcctggtaaccttcggcgactccaccaacttccgtaccgagcggatcgacttcgatgtggcggacctcaatctgccctacaatgcggtcctgggcagacctgcgttggtgaagttcatggccgccacccactacgcctacctccagatgaagatgccgggccctagtggtcccatcaccgtctttggtgatgtcaaagtcgccctcgcctgcgcggagcagcgcgccgacaacctggcggtggccacggagccacaggccctggaggcctccgcgtcccgcgcctccaagaagcacctcacctcggctgacgaggtgcccgtcaaggagatcccccttggagatgatccatccaagaccgccaaaattggcgggaccctggatgccaaataggaaagcgcgctcgtctccttcctgcgggcaaattccgatgtcttcgcatggaagccgtcgaacatgcccggggtccccaaggaggtgatcgagcaccacctcgccgtgcggccggatgcgcaacccgtccagcaaaaagtacggtgtcaagccccggagcgacaggccttcatctgagaggaagtggcatggctcctggaggttgacttcatccgcgaggttatccatccggagtggctggcgaacccggtggtcgtcccgaaggccaacgacaagctccggatgtgcatcgactacacggacctcaacaaggcatgccctaaagatcccttccctttaccacgcatagatcagatagtcgactccactgcggggtgcgaccttttgtgttttctagatgcctactcttggtatcaccaaatccgcatggctagggaagatgaggaaaaaactgtcttcgttactcctatgggcaccttttgttatacaactatgccttttgggttagagaatgcaggccttacttttcagcgtatgactcgtattactttgagtaatcagatagggcccaatatagaggcgtatgtcgatgacctagtggtaaagatgcgccaccaggacacgttgttgcaggatttggccgagactttcgacagtcttaggtccacacgcgtgaaactgaaccccgacaagtgtgtattcggtgtgccggcgggcaaactcctcggttttctagtcttctcctgaggcatagaagctaatcccgagaaaatacgcgcgatagagaggatgcgccccccagcaagcttagggatgtgcagtgcatcactggatgcatggccaccctaagtcgattcatatcgaggctgggagagagggcgctgcccctattcaagctcctcaagcgctccgggccgttcgtgtggacggaggaagctgagcaagctctcaatcagctgaaagcttacctcacctcccccccatcttggtagccccggggctagaggaaccattgctgctctacttggccgtgaccccccatgtggtgagtgccgccctagtattcgagcgtgaagagaacggaccggaggcccccttgactcgcgatggcccttcgtcccccgaagacccgatgcccgaagcccccagcccctgggaggaccccgaggcccccgtgggaggaggggaggctttggcaagtggtcctgaggcatatgatcctgacatgattcgagaccccccggggcccctgagcaagggcgccccagatcatctgcccctgacaacacggaccggccccaccgaaaggtgcagcggcccatctactttgtcagcgaggcactccgagatgcgaagacccgatacccacaggcccagaagatgctttatgcagtcttaatggcctcaaggaaattgcgccactattttcaagcgcatcgggtttccgtagtgacatcctaccctctcggccaaatcttgcacaaccgagagggtaatggtcgggttgtaaattgggccatcgagcttgctgagttcaacctgcactacgaaccacggcacgcgatcaaaagccaggtcttggctgacttcatcgcagagtggaccccagtagacgaccctgttccgtccaacgttccctccctccccggagatggagaggacccaaacgccaacattcgtggcgggcactgggttatgcatttcgatggctccctcaaccttcaaggtgcaagtgccggagtcacgctgacttcgccaagcggggacgtcctcaaatacgtcgttcggctcgacttccgagccacgaacaacatggcggaatacgaatgactcctcgcggggttgagggcggcggccggaatgggcatccgccatcttctggtcctaggcgactcccagctggttgtgaatcaagtatccaaagaataccagtgcaccgacccacaaatggacgcatatgtccacgaagtgtggcgcatggcatcgatctcatagccgacacccatcagggtgagtgcggggcccattcggcctcacgcactttggtcggtaaagccttccgacaaggtttttactggccgactgcgttgcaagatgcccaagaatgggtccggcggtgcaaggcatgctagttccacgccaagcaaacccaccagccggcccaagccttgcaggtcatcctactctcttggcctttcgcggtctgggggctagacatcctcggaccattcaaagcggctcgaggcgggtatcaacacctgtacatcgccatcgacaagttcaccaagtggcccgaagcttatccagtcgtcaagatcgacaagcattccgccctcaagttcatcaggggcatcacgtcccaattcggagtgctcaaccgtatcattacagacaacggcacccagttcaccagtgagctgttcggcgactattgcaatgacatgggcatcaaattgtgctttgcctcgcccgcccaccccaagagcaacggccaagtcgagcgagccaacgccgaaatcctcaaaggcctcaagaccaagacgtacaacgtcctgaagaaacatggggattcgtggctcgaggagttgcccaccgtgttgtgggcaaatcggaccactccaagtcgcgccacgggggaaacgccttttttcctggtgtatggcgccgaggcggtcctaccttcggagctttccctgggatcgcctcgcgtcgcgctatatgatgaggccaaccaggatgatcttcgccgcgacgacctcgactatcttgaagagtggagaaggcgcgcggccctacatgcggcgcactaaaaacaaagcctgcggcgctaccatcagcgccacgtccgggccccgtcactgcaagttggcgacctcgtcctacgccgcgtacagtcgcgtctggggctaagcaagctctcgccaatgtgggaagggacatacaaagtgatcgacgttccccggccaggctctgttcgactaaccacggaggacggcacggagttgcctaacccctggaatatcgaacaactccgtcgcttctatccatagcgtcgcagttttttgctttccaggagctcgggccaacccccgcacaacccctcggcttgtgcgggcttggccgggggctaccactgtgaattactttgtatctttttccctttccaagcaataaatttttccacctaaagtggaggccgttacgcgccctttcttctcactctttcctctggcttgtcctggttcaaaggacaattcgcgcttactctgaaccctaagtgccgttgggcgacctaaaaaccgctgaaagggagcccaaacgcgggccgcgccccgggttgcgccgaaccccgggagctcagaagggcctacacacggccgtccccgacccccggtcgtcgtagcctcggtctggccagtcccgctgggcggctccctcgggaccacggaccgagcgcggatttaccttttcgcaagaacgagcccgagagggggatggggtaaaaacggcatttcgatcacagggaggttaattatatacttttgctcttgttttttcttctttccgtgccgcaggcattcaagggagaaagcaaaggggtagaaaatgcgaaggggaagctttatttatagacaagacggcacgatagcctaaagacaagaagtgtctgctgcagacacacaacaaaaggaaattaaaagtggggataatcatggagtgcccgggcccccgaggtcggcgccgctgaccacgtcgtcccagtcctcgccatcggcgtcgtcaccaccggcgtcgtcaccaccgtcttcgctcccgttctcctcatccgaggcaagcccgaaggtgaactgaggggccgacccctcgaagttagagacgatcgcgtcggccgcctccgggacttgctccagagcccttgcctcggttcccgggggaaattctcaagtgcgcgccatgggacgaagtcgggatcacgggcttggtggctcgtgaggaccagttccaccgtggcccgcgccatggaagccgatgacgttttcacgatgtcgccggcctcctcctccagcctctccagatccgccgccagcccgtccagccggagcgcgagtgccggctgtgtgggccgtccagccggagcgcgagtgccggttgtgtgggcgggagcttcctatcccggcgcacggagatgccgactcggcgccccgcgcgctccagccgatcgacagcatcggagagctgcccggggccgatctcgttggtaaggcggagggtcgcgacctccctagcctggtcttgcaccaggagctctaggtcggtaagagtgctctaagccgcggtaagctggctcaccaactccgcgccgccgggctgcccgcccaccgctaggtccttctcccgggcctccagctcagaagccctcgccgccatcgccgcgcactcggcacgagcactctccagatgccgagcctcgcgcccggcaacggcctcctcgtgtttcgcgagttgctcgcccagctggcgcgaggccacttcacggcggttcacctcggctttgcactcggcgagtgcggcatcccgttcccggcacgcctcttcccggagccatagctccttcgcgcgacgggccgccgaagctttcacggcgagggtggtccggtcacgctcggctgcagcctcctcacaaaggcgaagggaggcctccgcctctgccgctgttctctcatgggaggccaaggtggactcccgctgatctagcaggcgcgctcgctcctccagcgccttagcccgcctctccagctcctgggctcgctgcgcctgctcctggctgcgcgcgtcttgctcgcgctggctctggtcgaggacctcgattcgccgacgaatcgtggcctcaaactcctgcgcggagcgggcacgctcatctaaggccttgcgttcagcctcgagcgccgccgtccgagcccgcagcgaggcgttggcttccgatacccaccgctctcgggcggcagccgcatcgaggacaccgcgggcgtccttaaccctcttcgccaggtcctcggcatgggcctcgtaccgtaggcgaatgtcacctagctcttcattcaggacgcttgaagcgatcagtgctgcctgccgctcttcctccgtctcacgcatgacggagtccagcgtctcctcgcgcacctggatttcagctagttgggcttggcgcattttgcgtcccatattcaccatgtcgtccacggcgcggcgcccctcgtcaacctgcgtgcggtccgcagcgagctgtgcctactctgcctccagggccgctcgttcttccgccagggcttgaacttgggcattgagcccctctcggacggtggaatcggcggcggcgagcacctgcaggagcggcttcatacttgctagagtcggagaagaaaaagttgcggtcagtccatgggacgatagagtgctgctggatcccccgcgagactgggggcttctctcagccccatttctgcgaggccatccccgaggactccccaagtgcaagggagagcggctgttcctctcgccccccacttcgggccctcgggtagattcggccttgttctcaggctcgggcccgcccccagtttcggcctcggcctcgggctcagggccgcctctagcctcggcttccgggccgcgacctccctcgccccctgctcccgggtggcgctccgcatggatccgggcctcggagtcgcccccgggagagacgccgccgccgctatcgctcgcggcgggtcgagtcccggctgaggtgaacccagggtcggacccagtgtgtggcccatgggccccgccgggaggctatgaaggccccgcggccctggatcggccaagcccgggccgctccgatcgttcggactttgtcccctgcaaagggtcggaccccgagatcccctgggaaggaatctcgctgcaaaagaactctgatcgcgttaacgaagaaaaagaagaggaaggaacaagagaccgagatgagtaaaaagcaccgaagcgagtgccggcagtcgtacctgcgaggagggcgattgaaagtccacttcgggggctcaatgaagctctcccgacacggctccgtttgacctatcttccggagccgcttcttcttccgtccggcctcaggcgcggcggggcgcttgtggcccgccggcggttggtccgccacgcgcttggcgccccctccgcgcgggggagagggcggtcgagatttggacatcttccgcttcccttttgggtcgctggctgagtcgaccccgggtccacggcttgggctgggtgccctagagctgccacccccgccggggccgctggtccgactcccgcctgcggtcgcgccacagccacccacgccgacagcgccaccaccggtaccgccccggcgggaccgactcctgccggtgctgacggtcgacatcacccaggatactctcccggtcgcggtcgctgcagaggggaaggatcccgtctagaatcagtgtttgctcggcggtgtccagacccaacacccgccgaatcaccgtcttcgcgtcctcctcgccccaatcccaacgcttgcccacatgcgtgcgcatggggtcgttgggtccagtgtactcccacgcgccacgtgatttatcttggagaggcgcgatgcggcggcagaagtagtcgccaaagaccattgcccccgtaaggcccaggcttcgcaggcccctgaggcgatcccgcaccgcgtcgtactcctcgcccaactccgaaaccgctagccacgtggcggatcgttcgagagggccagcgggaagccgaagttgcgggtggtccggcagcgcggtgtagaaccagtccttcttccagtcctcccatttcttgcggagatgactctcgatgtattgccccgccgtgcctggccagggctggaagtaacatccccccaccaccgcaccttgcagcagttgcgggacgaagaaagactggaacagccgcatcgtcggccgcaccccgatgaacatctcgcatagatgcgcgaagatggccagcgtcatcacggcgttgggtgcgagatgcaaggcatggatttcatagaaatccaaaacctcgtggaataatccggagaatggcgggatcaaccccgccatagcaaaggacaggaggtgcacagatcgctccgggtatcgcggccgcggccacgactcccccgccctcacggcggcgtcttccggcataatcttgcgggggagactaagatgcctatccgccgtaatgcgcgatgccgaaagcactgcgtcgccagcatcttgagccatgatgaccggtggagaaacgacgaggggcttggcgtgcggaatagcgtggagtggcgagaatgttagggcttagggagcgagtatgcgggtgagcagttggcaaaaggaaggaggcaaagtccccgcctccgtatccttttatccttgcctcgcccgcgctcgccttctcgtttcacgccctcacggttgcccccatgattctcgcgcctgcagttgcctcatcgtttatcgcgaccactcatcacgtcgcccactgaatcctcgccccgcatttagtgcgcctgtcaacagcacactcggtgtagggcgtgcggcggtcacgggcgcaatctgggcgaactgtcaccagtaccgccgcatacgtggcgggcgagggagttgaggtgtggtctaaccgaccccctgattttcgcgccttaagcatcctcatcatcagcgcggtcagtggcggtcaaaccgctgttgtggttgatacgccaacccggccactcggcggcatccgcttagattccctgccgggcccacaaccccagcttgggaagtcgcgaggcaccacatcagaccgacctcaggaggccaatgtccgatgtggtgccgggggctactgtcggagatatgggcccgggggtatgcgaaatgaggggaatctactttcccatcctgccacgtgtccttacagcctggttctgcccccgcattccgtgaaccgcaggagcggccgggggggtcggggcctcggggtgccacgtcatgccccttgttaacagtgaaatttggtaatcggcaaagacgtcatcggcttagaatcattatcggctgcagcatctcggaatcagccgatgggagttataaagtcgccaatagtcggattcctgctatattcgattaaggaaatcaatctattaaaggaagcttatccctaagtgaccgagtttaaagaggatgcggcatggtagtttatctattaattaggaatagtttgttagtttccttttatctttaggaaagtgtgtttagtgtccgataaggactttatattttccttttatctttaggttagtttctttcttgtccgacaaggacttgtatcaacccatgggtataaatatgtacacccggggtctatgtaatcgattctcacgatcaatacaattcggcgcatcgccacccttttatttctacttttgtttttacgttccggcggaacttggcacccgacgcggggctgcatcgtctttgatctccggcgaagggataagtccaatgttctgctggcccaggccattgtatcgtctacgtcggcgttgttcaaggctgcatcagtacattcgacctcttggattgctctggtttggatgatatacttgcctacctatttatcatatgtctctgttaatctagtcttagcatatcgatttagctctatcggttgcttctcgttttagggtttctgccggtatcggctaaatcgtgttgctagattatattagcttagacatctaccaccctgaaaactcagcaacggcttgattatctagatattatgtttcttttcatacttagtgctgcatcagttaagtttgatctactaagtcatgcttagaaccataatctctagcctgcttcttgattgccaataagggtatcatcggggtttcagccggtgagttatctggacgttgcatcggctcataaggattgcatatacatataagtaggatttagccgatgacaacaaaggtttcactgtttaatctaatcttatggatttcatgacatcggacctccagccgatgtgtgctttgaccttcggatcgatgcttatttatcatatcattatttgtcgattggtttatactggattatattgttattttattacatcgttgttagccgattgcctttatattattatctacattggacatatagccgattgcttaaaccctatcgctatcggctggtatcggcattggctattatcggcatcggctggaactactccatcggcttgtcagcccatcggctgtttagatctactatttgcatatcttgtcagttgcaggatcaaactgactggcacgctcgcatctcatcaatatttggacctgcacaggagctaagcagatctcctaggccggtgtgttcaattttttcgtcaacacccctcgggcccttgcaccgctttgccccgaggccctcgcccagccaccatttggcaggggaagcgagcgaggagggggcccaggctgaaccccctttaatgcgcgcagcgccccaactgccccctgtcgcatttaatgcagtggggtagacgtgcggcgtgctaaactgacgcgcaatagtcaagaatgaccggtatgtgaccggcctgacgccggtcacgtctgactggacggacaaccgtgctcccacgtcgcatctgcttccggcggagtggaggtaggtatgacccgtcccattggagggtcattcggacggcggccaccacaagtcttcacctattaatgagggaatgacagggctgtcccctgtgtcaggcgagggacggcgctgggtcctactcaagggcaagctgtggtttagcttcaaggcgaaggcacgggttgagttccggtcaagatagggtgggtccccacccgaaagaagagtaggtagaggcggtgcatgtggtatccccttgagatataaaaggaggatcttgcccaccgagaaaggggacgactctcagtgaactagagctctaggagaagagtgttctcccgagtttaggaacccttgtaactctcagtctaaatcccatacacaggagtagggtgttacgcttcatagcggcccgaacctgtataatttggttgtgtgcgagctaactaggagccttagggacggatacgtgatttctagaggcgagcttcttccctcggccgaactcacgaaagggggggtctcatgacctcccgctagagaggatcatccctcgacaatgttgtacatcaacaagttggatccaataaacggcatacttaggaagttttccacatcacccaataaatatatgaagtaatcacaacattatcatttctcatttttttggaatatgttctagcaatgaattcaaaccaaaaggtatattgccaatctgaaatcacacctaacaaatggataaaagcttacattcacccactttccctagttcccctttttttctttggcaatttctcattgtgaattagtcaaaaagcagcacccaaatgatataatcacttctatgaaattttattttcaaataagacaaatgtgcaaataaacacaaaattgttttcatgttcaaagaacttttctttatcatcttccattataaagacgatgtcatcaacatactgtagaattgagaccctatagcattcagcaaaatgtgacacccttcctttgatcaaaccttttcaattgtttggttaataagcaaagtcaatgcaacatcccccgctatgttaaaagggagtggagcaatatatattcttgccttaaaaccttgtaagacacatgcttataagttcattaagcatagttgcaacacaacctccccttaccaccttaaaaatcgaaccacaccatttatctatctccaaaacatttttggccataaatttgttatacaaaagaaccatctcgcatttcgtcacatactttctcaaagtttaccttaaaaagcacccatacattttttcccatatgaacttcttgaattatttcatgtaaacttaatatccctttccattatgaaccaatatttcaagaatgcaacttgactattgaactcaaccttttggatcactctaaccaacctacttatcacccctttggtgagaattttataactcatcacgtcgagtacacaaataggcctaaatttctatatggtcaaagtatcaatgtatcaaggttatacatagtttaatctctctatatctaaaaccgcattgtaaaaaccctcaaaaactttcagaagatcctatgtgatcacttcctagaagaattggtaaaatatttgtaggaagctattaggaccatgggcggccttattctttctcttctaaataaaacatgtggtttaatttcttccaatgaaaaaggtccattcagagatttcggattcagttcatccatttatatattcctaatatattagtgtcactgtggggccaaacaattttttatataaaagaagatgtcacatgttccatcaattccttctcatcttctatcatcttgaagattttattatatccaaagtgattgcacggtttagaataacgtcactaagtttgtatttaataattgtagctcccggagctaccatgctcctcttcatctggtattctgttcataattgtggcctttaacaagccttagtttgtactcctttctatatctcttataaataaaagaggaagatctcctgctcccttttttatataaaaaggaatatatatatatatatatatatatatatatatatatataggccaaccaaatgaagttctttcgaaccatgtgtttcaactttcaacaatggaattgaaaccaaagctccaagagttcctgagattttctgaaaaaaaaacaggtgttatattgagcaaatgaaaagaaagaagtttcagattgtttagtgagcaacgaagtccaaaatcacaaggttagcacatgatgtcggttaccatttaatttgcttctctataaattgtgttgtccaaactaaaatcgttgttgtgttctggttagttgtgaatttcttttgaggtgataaataggaagaaatgtgtacgacgttctcttgtgttaagcaaactcagcagagcttcagtgtgtactagtagtagtatagtatagcaaaagaagtgacgaattaattgtctttagaataaaatgttcttgctacattgcacaagtaattctcaaaaaaatacattgcacaagtgaattatttaacggtgacagcacgtgttgacataaaataaaactgaagagagaaataattaaaatacgtactcgatccacttttataagaaaagagaaaacgttgtcctcaagacctgtgtgtgccatgtgaagcaaggcgataaaaggcatgaagagaatcaggggtggtgaagaaggatgggagaatatggagcaagccagccaggtgaagctgaagctgcaagggccaagggctaggctacgaggaaggatggaagatgagaagaaaaaaaaagaggcactactgtacatgtgggggtaggaaatcaaaaggattcagctcaagccacacaagaggaaagcaaaaaaggaagatgcaaagcagtgcacatatataaaaagcactgctcctcagccacaccaagcaaaggataggagaaagctaacct

SEQ ID NO: 19507 - DNA, 5914 bp, Oryza sativa
caagagacttatgcatcattttattgagaaggaaagggtctggtataaatccaaaaaatgaaaaacaaaacaacaaagaaactagaaatgtcaaatgtggtgggtggtggtgaataatgctgcttgctagcgggagatgcctgcccattggctatctctcgcaaaatgatagtgtgaccaagaaaagataaagcactctatgccttgagctgtgggatcatcactccagtccagcagcacttgatcctttttttctcattgcaggcattatattcaatttgctaacgactttaactgagatcactgatttatggtccccattctttgactaaaactcatttctgcattgtgcacttgcttgctgtttcaagtattattcatatttcttgtggatcttccattcgattatactcttgtttattcggcttctttgttaaggacagggagccaagcacactagagtaatattctgaatgcagactggcttttgtgacctttgtcggccccggttttgggtgcttcttcttagttgcaatacctcggggaagttctttccccttggggccaaggtttttttttaatgcacaagatattttatctttgttggtctttgactgagtgttattaatttatttctgtgaagtcatccctgctgaaaatggccagcaagcatggacatatctagaagatatgcaaaacagcattgatcttgttttgacagaggttgttatgcctggtgtatctggaatttctctattgagtaggatcatgaaccacaatatttgcaagaatattccagtgattagtaagtagctttcctcaactctacagtacaattcttgtacaaaatgttgcccttgtcatttatttactttctatgcttttagctgctacactgttgtggtttatgtgcagtgatgtcttcaaatgatgctatgggtacagtttttaagtgtttgtcaaagggcgctgttgacttcttagtcaagcccatacgtaagaatgaacttaagaacctatggcagcatgtgtggagacggtgccacagcgtaagttgttgttggtccagtttttcttatatattagatgttcaggcaaatccatcaagtactgactgctgcttcaccattttatggttacaatatgtgatgactctaaactaaagttgttattttcaaattcagtccagtggcagtggaagtgaaagtggcattcagacacaaaagtgtgccaaatcaaaaagtggggatgaatccaataataacaatggcagcaatgacgatgatgacgacgatggtgtaatcatgggacttaatgcaagagatggcagtgataacggcagtggcactcaagtatgaaacttgatctttttattccaacatagctttactactacctgttaacaaagctgtaattagaatgagaagaaaaaactgaagttaaaaactgaataaacctgtcagtaacaatgatttctgaaggcataaatgacatttttttgcatagctgataaatttattttagaatagtgggaaataggaagagttcaccatgtcactgtaaagtttttgaattaaccaaaccagtaaaataccatggatcatctgcatataacaatcttaatattgtacaaacacaacagatgaaacacatactgaagaaaatatagttatcgcctctcggatagtttacatgtgtgttcatgtggcactatcgttttgcttaactaataccaaggtgccaaataaaccagcggttggttcattgcattttggagcacatatagtatttataaatcttgatagcgtgtgtgtagaatgttccaccagaagttgatagcactgtgctttttgcatgttcaaggaatcaaatggattgtacaatacatgcaaccaaactttgatgtagggaatttctttgttttggcttggatgtccaacttatagtttctcaccagttggattaacttcttttccttgttctcccattgtaaacgtgaattgaacaatccttgccttttaagataaatgtggggtctatgctttatgctgccctttaaatttttgaaatgctaataagtagtttgcatgcatcgtgcttctctaaatgtcatcaagttgactaatatacagttcactatcaatcagctaataccactttattttatgtgtttcctattataaattgaacattttgtttccttaccaactagaaatcatagtacagatacatattgtatagttattttcggtttattcatgaatttgtgttagaattagactatatagacattgctggttaaaaagtactcatcccctaacactgtgggaagagtacaaaactactagtgtgttaacaccattggcctcttgacattcaaaactgctacccaatgaacacattccccatcaatggtccaataatcccgaagtctaaagtccttaatcaactcgtgcataattattcacttggtaaggaaataggaaaaggatggatgcacacaaatgttttgtccatttttgctaagcctccagtatttttacttctgtgttttgagcttcataatggtttccatgtcttttcttcaattaacgcttttgtcctgtattttgatttctatttgcaccatttaatgaatcttccaaatttgggtttttcctcttgatgatttttaacttcacatctcaattgatctttaaaatatgcctaattatttaatactacctccgtcccaaaatatagcaacctaagactggataggacatatcctagtccaatgaatctggacaacccttgtccagattccttggactaggatatgttccatccaatcctaaattgctatattttgggatggagagagtatcatctaattaattacctgcaaatctgcaatgctctgcttaaacatattgtatattttctatactaatttactatacttattatcaaaatgaaacgtatattaaaaattaaatatctgctgcaatatgtgccctcaaaactagtataaacatattgtatattttcttttcaaagttacctttaatttggcgacatgtttggattgataaaatcaagtctaagcttgcaaatttggttctcctgatgctgtatgtttgattccactaaatagattctcttcaatgacctaggcaagctgtcgtagtttatcccaaatgtgttgaaaaggttgttctgggtatcaccgtacagatagattgatcctgaaattcgtatgcagagtaaacaaaatagtcttatcaacatagataatgctaaacatcatatcatcagcgcactagtgcaggactgccttgacatataatggttgcctgaaatggcaatgaaataaaaaatcttttatttaaaaagcaagattcaattgtgaattagcaatagttggagaaatttagagttacaggatatggcacacgaggtgtacttgagaactgtcggtttgtagctagagatggctacgaatgccgccggggggtacctagcttatcggcggtggatgaaaactagtgtaaacttgaaattagtccacgtttcatgtggatgaaatctagtgtaaacttgaaattagtccacgtttattatgaaacgttgactacagaccctaccgagataaactgtatcttatgtgttgctgtcaagttctcttttattacagtgttgtggagtggggtaaaatttttttcctgtcagttagttatgaatcacataagattttgccactgaaatgttcagtgacatggccgatatgtcaatgtaagaaacaacttagaataaattccacattacaatattcagaaataattactgtagatcggatcactttgtgaagtgcatttaaactggttgctcatcatttttttaaggcgcagagctcatggacaaagcgcgctgttgagattgacagtccacaggctatgtctccagatcaattagctgatccacctgatagcacttgtgcacaagtgatccacctgaagtcagatatatgcagcaatagatggttaccatgtacaagcaacaaaaattccaagaaacaaaaagaaactaatggtattgtatgctcaactgattcattgtgcaactcgataaaacaaaagctccataacactgtatattaataaatttcaacatgtttttttttcagatgacttcaaggggaaggacttggaaataggttctcctagaaatttaaacacagcttatcaatcctctccgaatgagagatccatcaaaccaacagatagacggaatgaatatccactgcaaaacaattcaaaggaggcagcgatggaaaatctggaggagtcaagtgttcgagctgctgacttaattggttcgatggccaaaaacatggatgcacaacaggcagcaagagccgcaaatgcccctaattgctcctccaaagtgccagaagggaaagataagaaccgtgataatattatgccatcacttgaattaagtttgaaaaggtcaagatcgactggggatggtgcaaacgcaatccaagaggaacaacggaatgttttgagacgatcagatctctcggcatttacgaggtgcaaaacataatatcagtgtcgctagtgagttaggaaaccattgttaagttgcatactaactgttacttttgttgcaaggtaccatacacctgtggcttccaatcaaggtgggacaggattcatgggaagctgttcgctgcatgataatagctcagaggctatgaaaacggattctgcttacaacatgaagtcaaactcagatgctgcaccaataaaacaaggttctaatggtagtagcaataacaatgacatgggttccactacaaagaacgttgtgacaaagcctagtacaaataaggagagagtaatgtcaccctcagctgttaaggctaatggacacacatcagcatttcatcctgcacagcactggacgtctccagctaatacaacaggaaaagaaaagactgatgaagtggctaacaatgcagcaaagagggctcagcctggtgaagtacagagcaacctcgtacaacaccctcgcccaatacttcattatgttcatttcgatgtgtcacgtgagaatggtggatccggggcccctcaatgtggttcatccaatgtatttgatcctcctgtcgaaggtcatgctgccaactatggtgtcaatggaagcaactcaggcagtaacaatggaagcaatgggcagaatgggagtacgactgctgtaaatgctgaacggccaaatatggagatcgctaatggcaccatcaacaaaagtggacctggaggtggcaatggaagtggaagcggcagtggcaatgacatgtatctgaaacgcttcactcaacgagagcatagagtggctgcagtgatcaagtttagacagaaaaggaaagagcgcaacttcggaaaaaaggtagcctgttttcaattgcatgttttctgttcctttggttttagcattcctgtttaactcgtctaaattagctaaagaacatgttactggaagtagttgtcaaaagcatattactggaagtttctcccaaacgactagctaaatgggatcgggcatgaatataatttgtttatatactagtattatctgatttctaaaaggaatctcacaagataatcttccaaaaagttgcacgtttttggtcccatagccgtgttgctgaaatttcttgccaatgacatttcttggatttttctcataatttaatggtagctacttagagcggcaattcaattttactcttgaaacactgtcctttacttttcggcgcgggtgagtacaatttggataggaggctctttttatatatagagaaacatacatacatacatacatatatatatatatatatatatatatatatatgatgtgcttgatt

SEQ ID NO: 19508 - DNA, 1023 bp, Oryza sativa
tcatattaatctattttttaagtttataataattaaaactcaattaatcacacgttattatcacctcatttgcgtgaaatgttgaaaatttagttataattcggtatattttaatccaaaataacaagataataaacatgatatttacaataggatttgatccagtgatagtggtgaatgtaatcaacattagcatgcttaacgtagaataagcatcaacaaccacataataacgcaatgttgatattacgatgaacattaacagtaaaacttctaattaaaataatataagaaggttataccccaagaatagtcctccgttggagtttgaggcggtattgcctccgttggtgttgacgggaacctccttctccttgtctctagtgttgccgttgtcatgttgccgctgtctccaatgttcgacatgttagtgaagacgaagtagacattgacgaacgcagtgagtagtcacgccttgcgctctccaaaaacctgatcgcccgtccgtccgtgcaaacgtcgcaacagtgcgtggtttcagaggcatactctcccaaacgtcgcagcagtgcgtggtttcggaggcatactctcccaacgcgtgtgcacacactcgtcaggatgggattaccgtagcagcaacagccttggaaatggatgaaagtgtgtctcccttcttcttagggagatcaaatccattctcattttataggaggaatggaagatgaagagtaagagtcatggaataggaagaggaatagagtaactaattctcatcaattagccatcaaccatcctccactacacaaccatcaaccaaccatcaattagaagtaattgatgtaggttaccaatggaatagaaagagaaatagagcaactaattgttatcaactagccatgtgaaagtgcatctaggcccctaatgattttggtgattaattacaatgcgattagagaggactaacatttttattcaagtaaatgtgaaggttgttatgtccttaatgagttaaagtaatgc

SEQ ID NO: 19509 - DNA, 4260 bp, Oryza sativa
  unsure (1)..(4260): unsure at all n locations
cattttgttcaagtgtgagacttctcatgcaagctgcataagaattacggtgacccaacattacacagcctttggtggcatgccgcgttcatcgttcccatgaagctaacatttgctaagtaatgagtcatgctacctaggatagaggaatgcctccctagaataatttagagtggaatctgaagaagaatgttgcttgtaatttattgatctttctgttaattttgtgtaataaacccaatttcatcgaagaactaatgaaaaaatatgcacacacggtccaacacaaactaagtagcagcttgagtattacactctgcaagtcctattcaaataatgttaatatgcatttttttattttattttgcaaatcaatgatgctaccattctaatgcttaagttgttttgccatccagggaccagcgttatcatgaatgagcttacgattggttctatcgccaacttggaagcaccgatagcagaagtggtactaacttggagggtaacgatatgacatattgatagagagaatggcacaaaggtgcacgatgttttgttcttgtttttaagttctcattgttgtgttagtgacgatttccttttgaaaggggcctttatgcaatatcccacttacccaaaagaacagtgatgagatatcaaagctaaggccaaagaattggttgtttgtcattacagttcggcatttccttttttatactgagatttgtctgttgattcacagatttttttacgagtaccacatcatcgcgtatgttgtgttatctcgttgtcatttttttttaaaaaaaaatattctagagcatgagcattaggcattagcagtggctttgaacaagagccagaaacttattaccatcttaatgatgctatcaatagtttcagtgccaaatagctaaggcagttagaactttcaggcttgcagatgttacgtatgacgttagtaatcgcaaaggttgatcatgtccattggtggaataggcatgtcagcatggcaacatatacaaggcgtttcggtaggtattgatcaaatcattgaaaacttggaggactccatcactgttctctgttcttatcctggttcctggtgctcttaccatcttcaacgttaaattcacatgtccagataacccgaacacacctaccaatccaatgcaacaggtccttttgaagtcggatctagaacaacttactgcaatgaacacagatgctttcatgctcagatatacagtaagcgaacaaggttaaccagaagagataaaattggaaacaatagcgtatcaacatcacaacgcattcacctttgaagctggatgacgctgatacagctgttcaaatagccttgctgacactggctaaacagctgaaggagaaaacatggtttgagaacttctcacttacacaagcatagctttaatttaatggtcatgagagactccgcagctagctttcagcattgcatgataaatttctgactgctgaaattataactactgaaaacaaatgttgatactgcatcctgcaagctaggataatgtgagacaggatctaaagacggaaatattagctcagagaacatagcataaagatccacagctgtgcaatgatttctaggcaatacaaaaaaggataaatcgctaagataacaaggagagggatcgcgccgagatcatctaccatctaaataatttaataatataaactacctctgaactcaagtacacaaccagtcctcggaatgcatttaaccagataaaacctaaaaaattgctcactcgaccagcgaacaagtcgtccggcctggccagtgggcattcctagctctaagtcagtaacgcgaacatcttatgatcccttagctccagtcttcattacgcatttccctgaatttagaacatgcaaagttgatgcaaggcaaaatatgttagcatgtgcaaatgaacaatgaacatggttgggataaatgatcagggttctatttacctccaaatggcgacatatccagtttagcctgcaccatctaaggaacttgaggaaccattggcaggtatttgagatcatacctgagaagggctggaccaaatgcattatactttcccgaactgctatatgcctgttcagcatcagcactcttagaaaacactactcttgcgatctttgatttcttgttgatttcagtcgcaccctccatgattggcccgtgcatacggaatatactattgatgtcatccacagaagggatggcttctgcattactaaaatgtaagatcagagctgccggtccatctgcctgtttcacagcaggtgaatcagcagaggcctcatcttgaggtgcaacctcctgcttcatcttcttattaaaactcctgttctgagacagccgcttcattttgcggccctcatagtcacttgatgtgtctccatcatcaaaatcactgattataatatcacaccaatatgagtcttctgcctttcttgctgagtagatactccctgctgacttcctccgacccctatggccatccgccacctctaagtcaccttcttcttttgcagctgggtacaagcttctggccgtattttttctacctttcttgccacccaatgtctgcagcagctccttgtcgtcgtatgtggccggcacttctgagtccttgtattttgagaagaagctaagaatgacaggcacagagtcatagcccttgaagttgaatggatcagcagcaacggatgtaagctgtagaaacatgtcagcggctggtggatattgatactccactgtttcttggatcacctcgtcctcgtccttgaggtgtgcaggcctcccagcattgtttttcctaggcctcccgcgtggcctcccgcgtggtgcaccgctgcccctgccgcccttggagaccctcttgcggtcgaaatcgacttcggaatcggagtcagtggcacccttcttgcgtgggtcccaatcctcatcggagtcatcgaggatttcctcctccacctccttcctcttcctccccctcctcctggatggggggtaggagttgcagttgttgggagtggctgcggcggcggagacattgggtaggccgaggtggagggtgtactcgggagggtcgggtaggcccctgaacttgtcgaaggctctgagatgcgccttagcgacggcggcgtggacacggttggagaagcccatgcggtgggcggccaaatcgtgcagcagggcgatgaaatcgcgggggaggaaggggcgggcgatgcggccgggagcggtgagggcaagctcaacgcggcgctcgaactcgaggagggaggcatcgagggcggcgtcgaagtcgtcggcctcgccatcgtagagctcggcgacggggaagtagggctcgtagggcctgagctgggcggcgtcgcaccaggcgagggccttgtcgccgaagaaggagacgaggagctgggcgccggtgggggcggcggagatgacctcgccgggccaggccgggtgggagagcttcttgccccagaccaggtcgccgggggcgaaggggcatgcacctgctcctgctcctgcccctgctcctgctcctgatggaggatgaggattcggatccgtagccggtggcggtggcggtgggggattcttcctggggcggccgcggccacgcttgggcggcgctagggtttgggggtcagcggcggagttgaggtcgaagggtgtggacatggtgagcgcaagctagggtttggattggtggatgggaaaagtggggatcgatcgatcgatcggagcggaatggattctttggtaagggcttgagacttgagaggctttgggcggaggaatggaatggatgatccaatccaccctcctcttctcttctctagtagcctcctctcctctcctctctcctgtgagtgactactctctactggtgtactgaggaggaggatgagggtttgtcagtgatgctgtgcctcactgctactgttattatttactactactgtagcacggcaaagttaaatcaggggtaaacatcaatgctcactatctcatctcatctacgaaaaacaacctctcttccaatcttccaatactcccgtttcgnaaaccatgacaaagagtggataaactttttggatttttatggcacgttttttgaaactactaaacggtgtgtttcgtgtgaaaaccttttacggtgtgtttcgtgtgaaaaccttttatatgaaagttattctaaaatatca

SEQ ID NO: 19510 - DNA, 37401 bp, Oryza sativa
  unsure (1)..(37401): unsure at all n locations
atgtgttttggaatttttcggagtttttcgaaattcattttcggactttccgaaaatacacagaaccacttttcgcttctggaaattttcggatatgtctgaaaggcattttcagactttccgaaaatgactaagaaggcaaacatggttctgtatattttcggacttgtccgaaactgattttcggattttccgaaaaacatcagtagagtctctttcgcttctgtaaattttcagagttttccgaaaggaattttcggactttccgaaaatgtccagaagggtgtttttggttctggaaattttcggacttgtccgaaaagttttcagaatgtccgaaaaatcttcagttgactttactgtcggtgccgagctggaattttcggacttgtccgaaaatctttcggaatatccgaaaatcccatttattgtgcacaacgggcagaatttgggttgtggctataaatagccccatcccctcacttgtgagggctgctggtcacattggatattcttgtgcccttggcttgctcttgttgagattcacttttgagccttgctttcttgtttcccctctcacccgtgttcgattcggatttggtgtgtgtgtgagagttgtggattcgagtttgtgtgagtacttgttgttgacttcgtaaagatttgtgagcacttgcatcatctccgggagttcattgcatcatttgttactcttggaggttgaggactcctaggcggctaggtgttgctcccgagccaccgatctacttgtggttggccgggagaagtttgtgaaggtcgggtctcacctccgaaagggaagagatactcttagtggaaggaggagtgcttagtgcaacctcttgaggaaagggtcagctaagacccggctcttagtgagctcctcaacggagagtagaattccctcaaggattcgaacttcgggaacaacttcgtgagcttcatctttggtgacttcacatcctccctctcctttagctttgcttgtttgagccgctataggtctagttgctgtttgtgctagtatattcttgttgtaggcaactagatctaggttttaccttgtgtttgtgctgactccgataaattttcggatatatctaaaaattttggaaatatccgaaaattactgcttccgcttttaattgaattcttgaattagcctattcacccccctctaggcctaattgacactttcaccatcaaccatcctccactacataaccatcaaccatccatcaattaggagtaattgatataagttaccaattccctaatcaaatggattaattctcaaaactcttcatcccattgatatcccataagagaatgaatacacatgaattcctagcataatgagccttggaatttatttgatttaaatggatcaattacccaattaaatctaacatgaaacacttaatcttcatcttcaagagattcaaacaccaccttagggcctgcttagttctcaaacaaaatttttcgcgttgtcgcatctaatgtttggacacatgcatggagtattaaatgtaaaaaaaacaaaccaattatacacttcgctaggattaattaggctaattgcgccatgatttgacaatatggtgctacagtaaacatttgctaataacggattaattaggcttgataagttcgtctcgcaatttcctggtggaatctgtaatttattttgttattagactacgtttaatacttcaaatgtgtgtccgtatattcaatgtgacatgcagaggcaattttttttttgccaactaaataggctcttaggccttgtttaattcgcgagacgaaaagtttcgacatatcacatcggatatacggacacatatttgaagtattaaacatacactaacaaaataaaatacagatttcgcttgtaaactgcgagacgaatttattaagtctaattaattcgtcattagcaaatgtttattgtagcaccacattatcaaataatggagcaattaggcttaaaagatttgtctcgcaatttcaacacaatctgtgtaattagttttttttcttatatttaatactccatgcatatgtccaaacatttgatgtgatagggtgaaaagttttttgtttggtaactaagcagggccttaaattcatacttcccataaaaatattaaccaaaactgatttggattatatattcacctttacatctgctcttaagtttttcttgtttttagtccttgtgttttccaggtgttgcctttcagaggcatttctattaaatgttactttaatcaaaacatacgtagctctcaacaaagttatgtatacctcaccgttatatctagaaaacatattctgcctacataagctttcggtgcaaaatatctcaattttttttgttaaaaaaatatacacgtacttccaatgttacaacacatatgtgcaaagtactatctttaaattaattatgttttagccgtacaaagaaatacaaaatacaaacaattttaagagttattttttttggttatgcaggtgcattactaagagcaggtacaatagcagcctataagccagctataaacatattttaaagagataaagaaagagagagaagagcagcgggctacatatttgtagctaactacaacacggactccaagacgtaatgtatgtatgacagataggaccagatattaatagtatagcaagcaactattgtatgaattgactattacagctatagatgatttagagctaacaatgggctatactattaaatttgctctaacaatagatttgttgacacaaactccctttataagcacgacacggtacgacatacgtatgggttaacattttgattggtggcagctgctgcagggcccaattcgaacacaagtcccacggcctgtggtaacccagcccactccaccacaagaccaataatcgattatttattactcccttcatattttaatgtatgacgccgttgactttttattcaacgtttgaccattcgtcttattcaaaaaatttatataactatcatttattttattgtgacttgatttattatcaaatattctttaagcatgacataaatattctcatatttgcacaaaaatttgaataaaataaatggtcaaacgtttgtcaaaaaaatcaacggcgccatacaaactaggcttccatccaatggcaatgggggttcgatcaagcacgacaaagcaaaaggaatcgaacgattaatagctactcctactaaacagtactactcaccaccctcttcccttcattgctgttgatgttgtttggtcttttttttttgttaatttgtttattaaaggaaaacccgcaccctcactctcagtctagctccctgctgcttccacagctacttaattgtaggatgtaggatggtgcgtgctagctgcagctcactactacaactgtactagctagcagatcgcagctagtagcagagaggagaggagaggagttgatctgaggtaggataggagagcagcagatcagatcagatcgatccgggcaggcgggcagcatggcgtcggcaggtggctgcaagaagaagacgggaaatagtcgtagtaggagccctcgtagcccggtggtgctgcggagggcgatgctgcattcgtccctctgcttcctggtcggcctccttgccggcctcgccgccccctccgactggcccgctgccgccggcgccgccgtcttcctccgcacgctccgtgccagcaatgtcatcttcagtcgcagtagcaataggccgcagcagccgcagctggtggtagtggtcaccaccaccgagcagtccgacgactccgagcggcgcgccgccgggctgacgcgcacggcgcacgcgctgcggctggtgtcgccgccgcttctctggctggtggtggaggaggcccccgcggagaagcacgcggcgccgcccacggcgcggctgctgcggcgcacgggggtggtgcaccgccacctcctcatgaaacaaggagatgatgattttagcatgcagatatcgatgaggagggagcagcagaggaacgtggctctgcgccacatcgaggaccaccgcatcgccggcgtcgtgctcttcgggggcctcgccgacatctacgacctccgcctcctccaccacctcagggacatcaggtacagcatcacaatacatacctacgtatatgcgtacactacatccttattagagtcttagaaaaaaatactcgtacgttgtaacatgttatggtttagttaagatgaaattcactatgtgaattcacttgaatctatatatttctagaaaatcatgagctacagttaaaagtccgacgagtccgctcatcacaatttagtatgcgagttttttttaaagagattcttttatacgattcttcctgtattactaaaaagcgaacaaacttaaaaaaaaaaccagatatgtatttccaaaaacgaacgaacttggaaactgactctacacgaatgacgtgccaaagtaccggtaaaaatattttcaatttttataatataggctgtgttcccttcaaaacttccaaaaattccgtcaaatcaactatttgtacacatgcatggagcattaaatgtggataaaaaaaaccaattgcacattttgcatgtaaattacgagacgaatcttttgagcctaattacgccatgatttgacaatgtgatgctatagtaaacatttgctaatgacggattaattaggtttaataaattcgtctcgcggtttataggcggaatctgtaatttattttgttattagtctatatttaatacttcaaatgtgtatctgtctacttaaaaaaaaattggtacaccaactaaacacctctatagtagaggtaaagatattttagtcaacactcaactacattccgctatatataggcctgggttagttactaattttctttttaaacttttaattttaatgtagaactaaacaaagccatactactccagtatgtttttaattactagtagtgagctagctagctagagacaaacaatgtacacataacatggaggcctcccggagtgatagtttttgtacgtaagcaggtactccctccgtcccaaaataagcatagccatgaattttcgtgtctaattttaattgtccattttatttaatttttttaaaaaactaaaaaaaatataagtcacacataaagtactattcgtgctttataatctaataacaaacaaaatactaatcataaaaaaataaataaaatagatgatcaaaattgaacacagaaactcgtaactatgtttgtttttgaacggagggagtactacgaagctagggtgtcggtggatggaagggccctccctactactacaatagctactccttaggattcaaaattatatatgtgtcatcctattcacatttttctctccaatcactctttgaaatttctccccattttactctatagtgcaccctccatccctaaaaaaataaaattagagataaacctggataaattcattctcaaaaggtactacctccgtcccatattacttgtcgctttgactttttccttataacgtttgaccattcgttttatttgaaaaatttatacaaatataaaaagggataagtcatacttaaaatacttttgataataaagcaaatcacaaataaaataaacaataatttcaaatttttttaataaaacgaatgatcaaacattacaaataaaaaaaggtagtatctttttaagacggggagagtactctataatttattattatgtaggagtacttactactaatttaaagttgagcgtgaaaaatgattgctgaaattaaaatgagagggatgtcgtagcagtagcgcgttaattattgtatatggccgtacagtgcagtatagtacaggatgtgtcggcaagaatgaatgatttgatggggctggcatatgtaaatgcaggacatttggtgcgtggcccgtggcgacagtgtcggcgtacgagcgaaaggtgatggtgcaaggcccactctgcatcaacacatcctcctcgtcggtgatcacccgcggctggttcgatatggacatggacatggcggccggcggcgagcggcgagcggccgctgaccggccgcctccggagacgttaatggaagtgggcgggttcgcgttcagcagctggatgctgtgggacccgcacaggtgggaccgcttccccctctccgaccccgacgcctcgcaggtcagccactgcccagtgcccggaaagagatccctgactttgtgcagtttgcagttatgccactggtgacaccagtggcataacaccagtggcataactgcaaaccagtggcataactgcaaactgcacaaagtcaggggatcctcattcccagtgcccacccatcatcgctacctctcactcgatctactcctgccacgtagtagtaattaattagcctaaccacgtcgtccaccccaccttcaggcggaccggagtattatatcacgattctcaatttcttacttattagtcattccatattttaacgtataacgtcgttgacttttaagtaaagtttgatcattcgtcttatttaaaaggaaaaagtacgttttaccctctgaactattgtgacagtacgaattaccctcccgaaccatataatcatgatatattacacctcaaactattgataccggatgaattacccccccgactcaatactgagcggttttgctcctacgtggcatagacatggcgtcgatgtggaaatccaatcagcaaaaaaaacacacacacacacacacacacaagggcccacatgtcattatctctcttcagtcttccccctcccccttctctctctcaggcgtgcgtcaacgggcaatgcgcgacggcagcggcacgcggacgggcggcgagcgcggcaaggagtggtggggccgagacaggcggcgggcgggtcgggggcgcagcggacgtggtggagaggtggccggcaggcgtgacggcgcctgtgccctcctgtcgcggcggcagcggcgcgcggacaggcggcgagcgggggccgcgggcgcggcgggtggcgcggcagggagtggtggggccggggcaggcagcgggcgtggtggagaggcggccggcgggcctgacggcgcccgtgccccctatcgcagcggagggcggcgaagtggcgagggcggcgaagtgccctcctctcatacctctctctcgggccgtcgggaggtcggtgcgcacgcctgagcttgccgtcgtcatcttcaatgtcctcgggaccttggcgcccgtgcccgtctcgccctccccaccgcgcccaccggagctcgaggcggcaggaggaggggacagcgaaggggagcctgggctcatcgtactccagcaggagcggctcgaacgacgacggcggcggctgggggatgactccgacgactcttccggcctccacgctccctcgccggtctcctcacctccttcctctctgcccgccccgctaatgccggcatgcttcggccgccgccgctccgcccgcgttgccaccgctgcttcgccccgccgctctgccgccggcgcgcgagtcgcagccgctagcatctaacgggagagagagagggggtgagagggaaagagagagagaatattatgtcatgacaggtgggccctatcctttatttaatgaaaaacttgctgactggactgccacgtagaccaaaaccgcttacaaaactgttgggggggtttcatccggtatcgatagttgagggtgaaaaatgactggttttcaggtttagggggtaattcatactcacccaatacttcagggggtaattcgtacttttcctatttaaaattattgtgtaaatataaaaatatttatgtcattctgataaaacatttgatgataactcaagtcataataaaaaaaataataattatccaaattttttaaataaaacgaatgatcaaatgttggttaaaaagtcaacaacattatatattaaaatacggggaagggagtactttcttgtcatgtcctggggctggtcctagctatagatagatcagtagtactacctcgtttcagattataagactttctagcatttgtccatatgtatatagatgttgattaatctagtcacacacacacacacacacatatatatatatatatatatatatatatatatatatatatatatatatatatatatatatatatatatatatatatatatatatatatatatagtgtgtgtgtgagtaaagtcgaaacgaaggaagtagctagctaactgaaaagagattaaaagtcggaagaatataatgcgcaattcacgtacgcacacgacactagacacgcacaagctccgcgtctgtctgctttctttttggtttgtttgtttgcttgcttgcttaatttcatcaatcatttccatatattattccagcctcactagctagaagcctttcagcgtgtagtagtagtacatgtactataattaccgtacagtttggatcccaatctgcagattcatcatacataagtacacagtaactattgacaattacgaagtaggagtacgtactagtaattgagattatatatatatatatatatatatatatatatatatatatatatatatatatatatatatatatatatatatatatgcgcttaataatatgtgtatacatatatatgcaggaatcagtgaagttcgtgcagcgggtggcggtggaggaatacaaccagtcgacgacgagggggatgccggactccgattgctcccaaatcatgctctggcgcatccaaactacgctctaggctctagctagcttaatttcattcttcttccttaatcatcgatcgtcaatctccaaaacccacactcctactcctatctaagacaaatacctgcatataaatatatacacacgtatacgtggtgtgttcacgtacggttaattaagctgcaaggaagtactccgcaatactacatgcatatatgttttcaccttacttacgtcgagtctttgtgattctcggtctctttttaagtaagagtgacaatatattcacgaggaaaatacatcagtgatataccacaacctgtgtggagggtgaaatttttagtcactcgctttgtaagttgatcaacccagcttaagattctgataagcagctgctgagaaactagctggtgacttctaagttcattttctagattctacaactacagactctcagaatctggataaaaaactagactgtttggaggagcttctggcaactggagattctaagagaaactgaaggtgttagaagctccccaaacagattcataggctaaatcttgtccaacagatgtcatttctgctggttttctcttatagcatggacacacacgatgtataaataaatcaacagcggaggcaggtaccaaatcatgacagttgattgtgctagattcaatggttcaataatgtaggtaccagacaacgccatctaatctgggagatggtaccggctcgaggaacggaattgctagaaaactttcgcaagtttttcttttttgcccctaaaacttttgagatttgtgcattaacgtaaaaaaaaagataatctccaagaaattctattgacaagtgtccaaatctcagaaatggcatcgataagtgtgagttttaagaaatgccatcgtacaaacgactttgtcctaaaaatgccatcgtcgttagggttatgtccattccacgccattaaattctataggatgaacagtgtatttaatggtgtaaagtggacggcgatggcatttttgggacaaaatcgtttgtacgatggaatttcttagaactcacacttgtcgatggtatttcttggatttggacgcttgtcaatggcatttcttgaattatctctaaaaaaatcgctagaaagaaattttcacgcatgccacgcgtaagatccctatgctaaccaaccaaatcatagttgaatacaagttttatataaattacatcgtagttataatacaattacacttcaattatgtgatgtcgcatgcgtgacggagaggagatatttcagcgtctcgcgtgaaacattgaggtcgcgcacctctgcttcacttcattacctatcatgcctatgttaaatgaatggttgtatttaatttggtacctggtggtaccgtaccagtatattgtattatcgtaggcgcatgatgttatggtccgcctgtaatttagtatgtgtttggttgcagagatttgctgggtcgggttaggtcgaatccgcttttatagatgtataattgtggggttagatgggacgggttgactccaaaagagaatatcctcctgatatttgggttcgactcccccatcattagtatataaaaaaccatcataggtgtcagttcccaaccggctatatgtgccggttttcctaccggcacctattgatcgacaccaatacaagcaaccggcacctataccaaaaatagaaccggcacctataggtttgtacgagcaaaaaaaaagagccggctcgaatcgagccggaactcgcaatcgcaatcactgcgccatgccccacatctagttttttgaaatccccacatcacagatcatccaccaatcacagatcaaaacatattcaacaagaaaagcatccacaaatcaaaaaacatcttaaaagaatctacaaaatcatcccaaaaaaattcctcaggcgccgccgcccgccgcctcccctcccaccggatttgacggaggggagtgtgcggcggccgccgttgctgtctccgaggtccgccgtctcctcttcggtcggatcgagcggaggggacagcgccgcggcagccgccgccggccgttcccaaaggtccaccacctcccctccggctggatccggtggaggggagggcgcggccgccgccagccgctgctgccgcctccgcctggccaccgccgaagcccgccgactcccaactgcctccctccacaggctcccctccacgccgccgcctctgtctgtggggtgcccgccgcctccccacctgtcggatctggcggagaggagggcacggccgccgccgcctctgccgcgtccactaggccggttgccagccgcgggggcttgccgtcttcgccatgcagccactgccgagagagagagagagagagtggtgggagagagacgcgagagctgagagacgagagaaaggtagtagatggataaggcggagagacgagagaaaggtagtagatggataaggcggagaaacgatttgataaggacgcgtggtggtgtggtgcttatgggctcggctcgccggcttggctcaaagctataggtgccggttttttaaaaaaacggtacctacaatatatgataggtgctggtttttttaaaaaaactgacacctatagtataagtgccgggtttttttctagaaccagcatctatatatattgtttaaaggtgccggttctattttttccatcgtagggaggtgggaaaagctctataggtgtaggttttaaatgaaccgacacctatgagccgttctctatgacggttttttagtagtgcatgaaaatttggcggaccgattcgacccaacactctcgcgtgaatcacgtgaggcagcggcgaggttgaccacgcgtcgcagcctcctccctttgtgcttcccctccctcactggcttctcgtccaggaagcggctgcggcggcggcaacagcgacggcggtgttggtaggaagcagtggggaggttgatgcgcgagggagtagtcgtcacgacctctttccttctccctccacacttcccctcttgtgccatcttcttgtccaagaacggaggaggcggctcccagcgacatcactctcgtgcccttctctttgtgatagctggttggttgcatgagactattgaaattcctagcgatgatgtttttttttcaataaatttcatcagaatagaacaattttttatatgaacaagtgttaagacaattctgaagcagctatatatagtgggtggtctaattaattaagctaattctaagacaattctttgtgaatccccctaagcctagcctaggagaccctctcccctttccacccttccctgttccatttgtaccctaactcaggaccctaactaatcacgattgccgctgcggatcgtcagagttggaggagaagcccactagagtacgaatcgcgaaaccgaattgaagtttataaatttgtcagaatttatctttattttactatatggaatgtggtttacagattcccgataataataactaatagagtttgggaccatgtgcgtatgtacctagatagggagctcagctcattgatgcacatgtacatgcgtccatgtctggtacttacttgcgggtaactagcacgcacttgcactaattggatagatccatccatcacgatcgagctcacctatggatgcctacgctatataccacacttaaaatccactcttgcgtgcgtgcttggtgtcagtggaacaagcaccgaagaacgactatcgatagaagttgatgatgaggcgcagcttggtgattgtgatggtggcctgcagctgcgccacagccatagccagaggaggaggaggaggaggtctgaagctcaacttctactcggagtcggagaggtgcccgagggcggaggaggtggtgagggaggaggtgcggaggctgtacgaggagcacggcaacacggcggtgtcgtggttgagggcactcttccacgactgcatggtctactcctgcgacgcctccctgctgctccacaccaccaccaccacaggcgtctccgagcagtcctcccaccgcagcttcggcatgcgcaacttcaagtacatcaccgccatcaaggccgccgtcgagcgtgagtgccctgccaccgtctcctgcgccgacatcctcgccctggccgcccgcgacggcgtggccatgctgggtgggccctcggtggccatgcggacggggcggcgcgacagcagggagagctactacggcgtggtggagcagtacatccccaaccacaacgacagcgtgtccaccgtgctgtcgaggttcgcggccatcggggtggacacggagggagcggtggcgctgctgggcgcgcactcggtggggcgcgtccactgcttcaacctggtggggaggctgtacccgcaggtggacggcagcatggaggcggcgtacggggagtacctgcgggggaggtgcccgacggctgcggcgacggaggacacgagagaggtggtgtacgcgcgcaacgaccgcgtcacgcccatgctcatcgacaacatgtactaccgcaacctgctcgccgggcgggggctcctcctggtggaccagcagctggcctccgacgcccgcacggcgccctacgtccgccggatggccgccgacaacgactacttccaccagcgcttcgccgcagcgcttctcaccatgtccgagaacgcgccgctcaccggcgcacagggggaggtcagaaaagactgcaggttcgtcaactctagctaagctcgactagctagtagtacacatatacatacatatatgatcgatgtaaaaataattgaggtacgttctatgagatcgatcggtctgtgaactaatcgatcggcggcctctatctgttggcatcgactcctccattggatctttgtatttttctcaacttgtatgtacgtacgtatgtatgtggggttccgtcgagtcgtgtgtgtccgtgaccgtaactggactcaattattatggagtaacataatatatattgtatgcgtggcgttccatcgttacaaatatgcaacagtgtctatcatcatagcagtagtgcagtggcggcagcgacatgtttcgatggatcagattcaaaatactttgggggaataagttcaccggaggtcccttaaccacaaaaccagaaatgtctacccctaaactcactcgaaccgttcaccggaggtccctcggcagtattttcgcccggttttgctgacgtggcatcctagtcagcaaaaaaaaattaaaaaaatacatggggctcacatgtcagctgcacatttttttcttctcttttcttctccttctctcctcttctccttcaggctgcaggcggaggcggagcagccgcgcgccatggccgccgtcgtcgtcggctctccaccgtcgtcgtcgccatgagcgaggctacgcggagcggccgtccggtggcggagcggaggcagcggagcgcggcggcgggcggagcagccgcgcgccgtggccgccctcgtcgtcggctctccaccgtcgtcgtcgccgtgggcgaggcctagagttacatgcacatatgcattcattcatgaatgtagtacatatatattcgatcgatcgatcttgtcactttcaaccagtgcagcctgcaaatcaatcacaagctgcttttgctttggtctttttctctctattgcatgcatgtatccctcacttgagaacccatagctagcatgcatgcgttcacgggcttttggcctttcttctctcgcgcgtggagggacgccattgccgccgacaagctcgcgagtgaagctcggccggctctctctcctctccggcaagaagggcgccaaggccgccctgtccgacgacgacgattacgagccccccgcgccgccgctcccacccggggacggcgacaatgacgaggagcccatcaacctcgtcttcaagggcggagatgaggccggcgggagagggggtggcgcgccgcatcggcgaagaggtcgttgccgacctcctaccgccgctccgcagccacacttgccccccgccgctcgccgaccaggccccccgctctgtcgtaatcgcccgccgtcctctgcccaccgctgctccgcctaccacgctcgtggaggtcaaccaacacgacgacgacaccggcggtgaagagctagagcatgacgagcgccgccgctccgctgccactctcgcccgctgccctgcccgccgctcccgccgtcccagctgcctctctccccctctcccgccaccgctggcgcgctcgctccacgccgcccaccgccgtgcccgcctcctctcccctctctcgcttcttccccgcgcgccgctgtgcccgcaccgctgcctgtcgccacgccctcatctgcccggccgcctcactgaagaagacgagaaaagaaaatgtgcagctgatatgtgggctccatgtactttttaattttttttactgactaggatgccacgtcagtaaaactgggcaaaaatactgccgagggacctccggtgaacggtttgagggagtttaggggtacacatttctgattttgtggttaaaggaccacagaaaatctcgctgttaagttgagagacccctggtgaacttattcctagtttgggatagagcgttgactgacgttggttgcgattgggcctctttctcatctttcgacaagtttaattgggcccccatcacaacgtacggcatattttatccccaacgtctccactctcacacctccctctctcctgagtcccctctttcaagatatttaactatttatcaattttacatatagcaatttcactaaacttacatatcatagatacatacatgatggtccacatatcgtaggttgtgagtaacaaatcattaattacaacatcttaaaagtaacgaatagttaaatgcccctacgagtcccacataagcaacctcaccgacgacgtcatgcacccaagccggtcggcatcggcagcctcgcctccactcagagtaggtgtacaatagcagactataagctaactataaatatatttcgaggagataccaaaacatggcagggaaagatttgtagtggcagatctatctcttcttcaaaaaagattatcaatcttggagtatatgtatagttagcttttgtatgagagctaacactcatttttttctttatctttctcttccacataagattatagttggcttataacccactgccatccttgctacatactctctccgtgctcgtaaaggaagtcgttttggacagcgacacggtctccaaaacacaactttgacttcttgtttctataaaaatatttattaaaaagtgatatatgtatacttttatgaaagtatttttcaagacaaatctattcatataacttttacattttcaaactcaacaactaactttagagttattcatgatttatattcccaaagtttgatttaaacattattctaaacgacttctttacgagtacagaggaagtatatcaacatccaacatcacaggaagccttctggtaagactcgcattaatgcattatacttgttggctgctgctttgtgtgtggtgtgttgttttgaggtgcaatcattcgaacaatcaaacatgaaggctctagcaaatgaaacctgaagatgtagatattctgggtaaagggtttgtctttcccttttttagtagtctgacagatcaattacaacctccgcattcatcttaggtattaggacctatttcgggaaacttttagtagctgtatctttcaacagaatctctaactctcccaaacagcttagattattacctagattctacaaatatgtatatgtagaatccataaaataaattagaagctagaagctgaaaaacccaacttcttcaaattcttagaaactggatactaactagcaaattatgagaatcttaagctcctcatttcatctatgattggcttgctttaaccatgcgaaaagaggtaacaattacgtagtactccctccgtcccatattatatgggattaggggttaaaaacgtgtctcaaaatataagggatcgggtaggtagagtactaatgcaaacaaacatcgggcagggagagtactaatgcggacagagagctgtcggtggaatttgtccctaccttatcctctcaccgagtcgcccatcgaccaccgctcgttcccctcccgattttcttcgctttttctctgtcccctccatcagcgcctccctcccacccgcatcttcttccacctcctcccatccatccgagctccttcccttccacctcccatccgtcgacgccaacgccggtggtgcggcggccaacctggcccatgcgccgccgccaccggtgcccaacctggcccgtgcggtgggggcaccgccggggaagcgaatcgaggtggtgtgggagcgggagaacacgctgctctcgttcggccaggccgccgcgcacgccgccgtcgccttcgtcgagttcaacgtccaggtatatatatacagcgcaaccgagtttgatgtgcgtgcttccatttccacgttgttggtagtacctgtgtttgttttggatcttacattggatgtcagtttacgctttgaattgtttgattttgacaccgctgcatcgcaatgcaagatttggaagctagcgtgggtatgacttggatgtagccattgattggtgtggtactggacatgaaatttgcagcaacgttctagccagtgaactatatgggacaagactcacaagtaggagtatcaatttaatcgcatttaaccaggatctagatgccaccatgctaaattggtcaagaatgaagaatggagcgattttaggtggatgttttgcagggatgtagttatccattaggcaaagtgctaggatttgaagttgcaattcttgtttagagctgaagaggttcttaaaacattgccaactactcttagatcatacggagtactaggaaattaacggtgtttaaaaaaactgaagtgtcaattttattaatcttaaacgctgttaggcacatcctatcttagattcatggtagatttaaaggttctatgtttcattttgatagtttaaaatttaaaattttataggaatataatgatttaacatgtcgccggcagcagtttacgggctggcggcagaatgcggcctagcggcagggttcgcgggacgtggtggttgctaggcaaagagccgcgtccagtggcggaaggcgtttgttttgacgacttggtgtttgtccctgactcggatgatgaaggggctggcaatgagttcaactcacaaggttttgacgacgaatttgtgcctgaaacacaacaagatgttccaatcgaggagattggcatagggttcctctcttatttatttaattattagtcctttccattcaattttgttaaattatgtgctttttgatgttccatttatttctccttacggtgcagccatcctgtgacaagcaaatcaggagggccgcgccagctcggagtgcatcctcgcttggggtatgtgattcacactagattgttgatttgggatggttatgcatttgtagcatgcaaattgagtcacatcttgatttatattgatttgtcttatcttctttacagtacaatgttgcacgattggcttcgggctatttcagagtatgagaagccaagcatcgacatggcaaccatcgagaaggcatgggccgatgagaaaaaggcaatcgctgatgcggactatgagggaaatccaagcaaggtgaacacaagctccgagaagaaggcatgtgtcgacgaggggaagtcaatctccgatgcagaaactgatgatgagggcgtcggtgtgcctgagaagaaggcatgcatcgccgagggaaagtcaatctccgacgcagagactgatgatgagggcgtcggtgtgcctcggaatttacagatgaaagatttgcacgatatcatgtttcctacctgctgaatgtgattgtgttgtggtattttattgtggaaatgcacaatggacataggagtacttagtgcaatatggatgtaagactaccatgtttataagtgtacaaattaccgtagtgttccatatggttgccagactagtacgaagtattttgttatggaaatgccctagttatagtcatatactcctataatatattgttctaatgattgtagtattgttccaaagttagtgctgaaattaactatgcaatgacatgttctgaaatgggttcaattaagtattcattgttatgaaattagtgctgaattaaatatagaatcacatattgctgattgctaaaactagttatgctgaattacctatatataacaaaagtctgaaatcatatttacaaactccatcggagtacgaaaaacaaaagtatggctaggctggactagttgttcaacatggtctgcatcaccacatacttacaaactccatcggagtacaaaagataaaagtatggctaggctaggctagtttaacaaggtgtgcattaccacatacttacaaactccatcggagtaaaaaaacaaaagtatggccaggctggactagttcaacaaggtctgcataaccttgttgtaaagtgcaatatcacaagtcagactagtagggagcatgttaagcctctccaatcgatccttgttcatatggggtatcttgtagccattgcctccatcggctttcatcacttctatgaagcaagcttgtagggttaggaaaccctactcaccaagttagaattatactcattgtactcttcgtccacattgctgattaattcatccatgttactacaatttttgaggtatgtcttcgattgaagagaagcaaagaaacccagatcaagcacattcatgtttggtgaattagggcgttggttcatgatgcgtatgtctaggcctacttgggccaccgcgagggcaaatgcttcgtcgtttggcagaatatgtgtccgtgcattgtcttgctgaatccaaatggtcttccctacatcttctctcggccaacaagaggcaatagttggaataacctttgtaatcaagaaagccctacttgtttctctcgacaccgtaatagattttgtgaccaatgtacccttcggcctgttgcgactactcctttgtgctggttcctaacatatagagcaaagaacaagttagctacaaagtgacttgaaagcaataaaaatagattgaatcaagttgagacttcaccttcctaacaaagggccatattcctattttgacatcgaagtagcaatttccttcctcatcatacctaggctttgcaagagctgataaaaacataactttatctatggcatttttattttgcacacatctcacaggttcatcttcattgaatacaaggtagaaggtcttgtttttcatagtggcgttgaaccatttttcatcaatatgcacaatgttttgcatgtctataaatcttggttcagcattcaaagtagcaacatctagcatggatacacagaacttgagcctttgttttttattagcttccttcaagtaaggtttaatgctattttagtgacggcgaagggctccttctttgactaacctatgcaccttgcttttgctagcattcaatgcgctagcaagagatctgatgctacaccttaagttcaaaggaagtgctaaaacctgatccaaatcaatgtcacttctttttcggccacaattaccaggcttctttgatttaaagtcaacttcaacacctgctgctaaacatttcttcgcctttgtccaaatgtcttgtacaactctccttgtcacatcaaccatagttgcaataattgttgtagtatctctatcaacaagtttcccattgatagtacttgcaagtaaagcaccataaatagctttgttctcagcttctggtaaatatttccttctctttatattgtcttgttgagtatctgcacaaagaaaatatttatatatatacatatcagttggcaatatattttatacttgcagtacactaatgaatgtcatttgcatgtcataccttcctcatcacttgatgtatggagatcttcatcaaagacaacatccatataaggagaataaacatcaaaatcctcctcgtctgcatggacagaaaaggtgagacatgagctactcatatgatatccccatctgcatcactgctgattacatatgagcaaaaaataatgtatgtacctgcataatttgattgatcttggagaacatagagtctgtcatcgtcaaatacaatatcatcttctccataatttgctgcatgacatgtgacgaagataaatttaaagttgaaggttgtacaaagaaactagctaatgaagtagtgcattcgcgcggctttaaccaccctgtcatgtgctttgtatgatgaaatatatagaaaagtgcattataaattaagtaaccattcttgaccacaaaagtttttttttgcattaggtcatctaccacaaaaaaaacacatgttcccatacctatatgggtcatccttcagtggtgttatatataaagttcataatattaattttttggattgttttagtagtttctgatattaaaaccagctttatgaaataaaacttgaactatgctgattccaactatttagaacacatgatgtacgcttataaactttggagattgttgggctaatggctggttatcataatgagcaaataaaatttatagagccatttatgatcatcatttttgcacagtaccacataagagtatatatatgactgatggctgaagtttacaactcttgactaaaagcaacaactgattgacactaatagcaaagttgcaaagctctgtgttatgcaaagaagtaatattgggcttgttagtttatgaatttgttcataaattttgatcatacaaactttgctactttcaacatttatgtttctgttatttcagcagaagggaggatgggaaatgtgagtaagaccataacttgctttgcattaagattttgattccatacctggctccatgtttagatgacaaatttcttgtgcactccggccattggagagttcaactgcttgcatggcagggtctggatgttcatcttcatgagcaccaaaacattggttgtcaggaagctcttcatcttcatattggaaggcatcttctccttgcacagcaggatccaggttaaggtcagggatcccatcaccttcatcttgtagcacttcttgcacaccaagatcaaggttgagatcaggaatctcatattcctcttcttccatggattagttgagggtctctcttggtgtaatgctggagtaggttgctaatatgagtgtaatatgagagctttggtttttagacctgtgagtgagagcaagggagtgaaaatggcgggttggttctgagcatcaagtttaaattttgaacagctaatgcctgtgtatttgtggcgctaatgtgtagtgcgtgtgaattttgggcagcaaagaggtgagtgggatttaattgactcttgtcaacatatgcattaatgtcattgtatactgaggaatgcttactctttctttgtgccaatcatttgctggcaagcttgtaaacccaaatagtctctcactgctagtgccagtactaagtaaatgaggggtacatgcatctttcgccaacctccttattttggatgaacagtgtccagtcccatataatgtgtgtcggtgatatgggcccgggggtatcagatttagagcgaggaggctgccccacgatgccacgtggtcctccccggaggggagtcaggcccgaggtagggtggcggccactccttcccagagactggatggaggaggctgccccccgatgccacgtggccctcccccgaggggagtcaggcccaaggtggggcggcggccactccctggccgagactagagggagaaggctaccccaggcgccacatggccctcccccgagggggtatcgggcccgaggtcgggctgcagcggccccctcctgtgactaggggtcgggctcccccgaccccctctctaggtcaccatgtacggtgggttaaatgtccgcctccaggtgcccacctacccgcatttatggcggctcgagtagtcgcgcaacgccgcatttaatgcggtgtgcaatgcactccaccggtctgtgaccggtcgaatgaccgatgggactagggtagtgcgcctgtgcgctgctcgtgtgtcaggcgacgtgcagcctgacatgtcccatcaaataatgatggtgagaggttctcatcctcttatcctagccagagtcggtcctcccgctctggtcaaagtaaggctcccgtttcccggtgtaataagagcccagaagtcctcacccattaaatggtgactaacaggggcaccccccgtgtcaggcagcaagatttgacaggcctcatcagcaagatgacgtgcgcttgcttcccaagtcaagagacaagacatgcatttaatgcaaagattgtaatccttctccactaagttatgtttttgggcccatgtggtaaccccttggagatataaaaggaggtccaggcctagtaggagggggggctggagcccctgatgatcaacaccttctaccccacaaggagatcttgtaatttctcataagatcagctaagcacaggagcagggtattacgcttcttagcggcccgaacttgtataaacctcttttgtctcatcgtctttggggggggctaaccccctcaagatcacacagctccgctcaccaagccctcgaatctcacccgctgcccccagccgaactcacaaatgggggcctcatggttccctggtggaggagttcattctccgacaatgtgggacggagggagtaccagatacgcacaagcacatagacttgcttgcggtttcctagagtagggtaaagtggcataagatttaacataggattatgcttaatgggggagtagaaactaaacgacgtttgagtcttcaatctcctctaaccccccaaacccccgaggacagtctcaactctctatctcaagttctcaactactacctccatattttaatgcatggcgccgttgacttttttttcaacgtttgaccattgtcttattcaaaaaatttatgtaattattatttattttactgtgacttgattcgtcatcaaatattctttaatcatgacataaatattttcatatttgcacaaaaattttgaataaaataaatggtcaaatatttatcgaaaagtcaacggcgtcatacattaaaatacggagggagtagtttatagcattaaatatattgtcattgaagaaaaaaactaatatagcaaaagagttattaataagaaaagaggaaaaaaataaagtaaccatttaagaggaaaaaaaaccttttcgtctctcactgggccgtcaataaggcgtttgtacttgatgggtaaatggaccttttggtcagaattactctaatcgaagaataaaaatcataaagatctaaaaaaaaacataatgtgcaagatctattccatattcaatatgaatgaatataaacataatgtgtaagatctactccatattcaatatgaatgaatatactaaaccagacttttgcatcataaagaaattagctttacacggtacagacgtgtagtcacctttctccatatatacgctgcccaggagatgcttgggcacaaaaggggcggggaaaaaaacagaaagcgaatcgagcattactgaaacataagcaagataagaaagggagagaatgtgtaaaggaaaacaaagaaggagaatagccgatgggtcaaggaaaggcacacatgcttgaatgttagctggatagatacctcgctttgcttccgttgcattttttcttctcttgtttttcatgatgatcaagactcgagggagagcaacgtccattatccatcattttgtctttcgtctcgtggactagtctgttgccttcttttctttttgcttaattattgtattgtcttataccgctttcaattactgtacatggctgtacttttgtgccccattaactctcccaatttttttcctctttattagcttgtactatactaccccaagtccccaacctaaaataaataagtgcatcttgtccaatatttgatcgttcgttttatttaaaaaaattataaaaaaataaaaaatatcacacataaagaactatttatgttttatcatctaataacaataaaaaatactaatcataatttttttaaataagacgaatcgttaaacgttggatatagacagtatataattatacttattttgagacatttagagtagttgcttgctgtttctttttcttctctttctttcttataccttccggttccacaggcagactcatcgtatggagcggatgtcgtatcataattatatcatatattagaactaaacacaatggacacatgttatgcttatagaccacgtattatgtgcattcttatccgtcctccacatgcactcacacctcacctgtcggtggggccaactaataattaatactccaacagctaaccaagcaatactctatggcaaaatatctttattgtactctagtagattagatcactaataaaaagtagaaactctgctgcatattactccctccgtcccataatgttgcaacctaggatgggatgagacccacctagaactacgaatttgaacatgaggacccatcttaggactacgaatctgaacatacatgtccagattcgtagtcctaggatgggtctcatcctgacccatccgagattacaacattatgggacggagggagtagtcttctatcttaagctgactcgataaaagtactactccctcggtccctcctcctaggtttagctcttaaaatttagcctaaaatataacatcttattcatcaatattttttttccaactaatcctaaatcttcaccatttaatttttctatttatctttacttcttatctaattagattttctttaatttacttgtacctattttcttattaataatcatgtccaactctaaaatttttatattctggaacggcctgcatagtggtgtgagaactttgacctttgatccataataattatttagtgaattgagctagtggtgttgaaaattccatccattaaataattactcttgcatactcaaataatgaattaataaaatgtagtgaccgtgccgacggaggaagacgaagacaggagacggttactggagttgagtactccacccaccacaccacacaagagagagaagggttggggttggggtcactctttccttttctctgttgttgttggcttgatgatgagctgattcgcataattccaattccaattccaattataattccaagaggcttatcatcaactcaactgaagaagaagaagaagaagaagaagaagaagaggaggagggttgtgaactgatttgggaagggagggggaggaggaaggcgatcgatcggcgatgggcacgtacaagtgctgcctatcttcaagcgccgcttccgctggaacgacgcgccgccgcccgacgatgtccgcgccctcttcgccaaccactccgccggcggtggcccccacatggccgccgacggcctccgcgcctacctccaggccaccggccaggacggcgacgtggacatggagcggctggtggagcagatccggcagctgcaggggcgcggcgggcgcatcccgcgggtggggcgggcactcccactcctgacggtggacgacttccaccgattcctcttctcccacgagctgaacccacccatccggcacgggcaggggcaggtgcaccacgacatggccgccccgctctcccactacttcatctacaccggccacaactcctacctcaccggcaaccagctcagcagcgactgcagcgacctccccatcatcagggctctccagaggggcgtccgcgtcatcgagctcgacatgtggcccaactcctccaaggatgacatcagcatcctccatggcaggacgctcaccaccccggtctccctcctcaaatgcctcctctccatcaagcaacacgcctttgaggcctccccttacccggttatcatcacgctcgaagaccacctcacccccgatctccaggacaaagcagccaaggtatatataatcttcttcttctctctgtctctgccttgctcgctcacttgccaatgggccagatggttcttgaagttttcggcgacatcctctactaccctgacaaagatcacctcaaagagttcccttcgcctcaagacctcaagggccgtgtcctcctctccaccaagccccccagggagtaccttcaagccaaggatggtaatgctgccaccatcaaagaggacgccaaggccgccgccactgacgatgccgcatggggaaaagaagtcccagatattcactctcaaatccactctgccactaaagtactcctcatattactagcttcttcttcttcttcttatgctcatagtagagccagtttcttacctgcagggcacacttttgtttcattctgcagcatgaccaaagagaagatgacgacgacaccgatgaagacgaagatgacgaggaggaggagcagaaaatgcaacagcatctagctccacagtacaaacaccttattaccatcaaagcaggaaagccaaaaggtactctacttgatgccttacagagtgacccagaaaaggttagaaggctcagtttgagcgagcaacaacttgccaaattggcagatcatcatggtaccgaaattgtaaggtacgaatctgctaagtgaatgaagttgctcttcctttccatcttcagcatcagtgaaaatgtttttttttttttgcactttataggccatctctcgctaactctgctgaaatgcccaatctttttggccaaaacaggttcacacagagaaacctactgaggatatacccaaagggcactcgggtcacatcatccaactataatccatttcttggttgggtgcatggtgctcagatggtagcgttcaatatgcaggtgaggtgcacttctgttcctgagcagttagttccagagtgatggtttagctctttgtaccttatttccaattcagtaaattcggtgaggaatcaatttgctgaatgcagttaagtttacattttatcttataattatacctgaacgattattatggtataatataacttcagaattggtggatcaaatttgagcaacctggaatttctggctccatgttttctgaatgcctgtcaagttgtgacatttgccgcttcttttaccgttgtcatattaaaaatacatgaaatttcttgcagggatatggaagagctctttggttgatgcatggattttataaagctaatggtggctgtggttatgtgaagaaaccagatttcttaatgcaaactgatccagaggtttttgacccaaaaaaatccctatctcccaagaaaaccttgaaggtatgcatgcctgtcattctttttgtttgtgctcgtctgtgaaacctggagacttcactgaagtgctgcctttcaggtgaaagtatacatgggggatggttggcggatggacttcacgcagacccactttgatcaatattctcctccagacttttatgcacgggtacgtacgtggattgaatttcataccgaaaacggttcgctactccaagttgatgtgatattatggaggtgacgatggaaaatggacttgtgatgggatgatggataggtggggatagcgggagtaccagcggactcggtgatgaagagaacgagggcgatagaggataactgggtgccggtgtgggaggaggatttcaccttcaaactgaccgtgccggagatcgcgttgctgcgggtggaggtgcacgagtacgacatgtcggagaaggacgacttcggcggccagacggtgctgccggtgtcggatctcatcccggggatccgagcggtggcactccacgaccgcaaagggatcaagttgaacaacgtcaagcttctcatgcgcttcgagtttgaatgacccaacacaccgacactttctttctttctcgccgcatcgcattgcactgtgcctgtgcttgtgcagcatccatcatttggtttggtttttcatgttcctgtgcatacgcatttgtgtctgtacataggctcggtcctgtatattgtttgtgagtaacatgtaataataaggcttcacgccatgttcattcctcctgtttgaacccctccaaatatattaataccgaaggtacaaaatatctcaacggcagacggttctgtttgcagggcaggagtaatttggcaagtgcgctatgtaataactaaactcgaccacaaaaagaccatatacagttgaaccccccccccctccccgccaaaaaaaaaaacgtatgtaacaaatatcagacattcttcaggcacaaaagttcaatgaaaaattttagaaaatatagaccgccaaagatgaaaagacggctaagaatcttcccatttccctagtcaaggtaaaactgtatactacatatccaactgcccagctacaatgaattatccaagtcctaagtcctaacaagggtctattccagacccatcttgaacttcaatgcccacctccttccggcatataactaatacagaaagggaagtaaccaatagttgattgggacgtcacattctgcagagacaaaatccgcagacaattgcgtgtttgttcagttaaaaacagagcattataatggcatttattatgataaaacaaagagccaaaaattttgagatatttaccacggctgccgaagaagattagctaacagcggaagattcctgggtcacttctgtcgtagtatctgcagctgaactgctggtttctgcagcctgattttggctactttgtgcttgaggtgcaggttgctgttgatcttcagcaagacccaaaactaccaaggtagacctgccataaaatggaagctctgaatcagatcctgccctcgtgtacttgaaatggataagtagcttttatgctggtaagatatagggttaagtacaaaccttggaagagttgatcgtacgttaggttggttcgcgtgctcaaccaaaggtgccttcagtacaggattcttattcaaggcattttcaagttgaggagctggtaactgataaaccaagtttgatgttatgaaaattattggcagtttggcactatgataaaaatgaactcaagagccactagcagatagcatgtaaaacagctagcggatggtgcacatgctacagagatttttgcatacaagaacaagtagattctacgtagaagcaaaagtgagccaacctgcagcagcacaccatatgactgaggtttcgtcaagatagcacacttcaggaatcctacccataacttgggatacttccatatctgcaataataaaagatgacatgatatttccatatccaaaattatgtaaaaccactgaaactaaacttaaaaaaaaaatgaaaacctgcttgctaacaagacgtgacatgatatccatcacaaagtccacctgaaaagaaggcttaccgtcagattataagaacaagaaacaggtctataagattgagaaataataccgaaaactcccaagagatttttcataataaagaattgcaatgctcgtcaacttcaatatgttatcatgccaacactgtgtaataaaggaagttccacatgaatatctttgatagtttgatggtcccaatcctccatcaccttcgagagagtggaaaggacatatattaccatgtaactgctttctcatagaatcaagtggataagtgcacgcaccagatatgaagcaagcagttgtaaacagtaaacacaagtgatcaactctttgcttcttaagtggcagtaaaatacaactaaagaaaaatcatgaatggacactttctaattgaatcaggcgcaagcaccaaaaccaggaaagggaatgtggcctactcaacatgaaccacaggtagatcatgtaacagcatgaccgtggcatttcaacttgatttgttgtactatcagcagatgttaactatatattataacaccaataaactatcagccacagttagaatattgggttcatgcagttaactcaccaatgcaggaaatgcaccgattgcttgcataacagttcgcataaacagcaacggaagtggaatttgttcaacctgaggaaaagtagagcttgagcaatgacccaacaactacatcatatcacaaggcaggtacatctgaaaaggcgaaaaatatgatcatatataccagttggttcagtgctttcgccaaaacttgttgagtgaatattgtcctttgctcaaaacaagcagcacaggcatcaataacctatcataagataaaatgaattaccaaatttatcagtatattaaactaaatcgccaaatgatctatttaaaaatattggaaacagacctttttgagtggtattccttctttctcaggatctattacatgaatcgcaatcaaaatttctgatggatcaagagaaggcccattctgcggtgatccctgcaatagtcagcaagttataatgtatcataagcccgcacaagctgggaaacccttaaaactaaactgaatcaatttaccaaaaccaaacaagtacactgaacttgcactttgcaacaggcataaaaataaaattttcaacaagtaaaactgtaatatttacattttacaggcagtaaaaaaaataaacaattaccattgtcctactttgagaaaaataattaaatgaaaaggaaatcatatcatgaaaagaaaaaacatgaaggaaaaatcaaacatgatagatgagctgtggaatcatatcttattgtcttattgaatgctgcaaatttgcagctaataagatcaatcagtgtttgcatgtaatatggatcagttacggtctgatggattcttgcggtgtgtgagtgcctttgagtaaactttccagtatttttctagataaaaataaaagctcccaaatctttataactgcaacaagaaaactgtgccctactaacagaagaccaaagttaatccactttgttaccagttaaagtcatgcattatcttctccccccagtcaactttacatactttgacgacatagttggcctaagaaggatagctaagctactggatggtcattgaatacaggtgaatttttggggtggtgtggcactgcataagcttctttctgtattcaactgcagaagtctaatatataatactcacgtgaaacatataaccccaaaaggagagggtagaaacaaggttttactaaaaaaacattaaagttgttatttttttacgtcaaaggtgcaacgaaaggatcagcttggacatgaacttaagttaatactcaaatacaaatcacagttaaggatcagatagaaaattaacacagcatgcacatatttcatgccagacaaaaactaacctgcaggattcgagaaagtgcaacttgaaacttatccaagggaagattaacaatactgggaaaaacagggaggacctgagaaaaagcacaatgaacaataaatgtgaaactataataataatacaggtgacatattgatgcctagagaccataaaagttccactaatgcaacatgccatgcattgtcaaagattcttaacacggaaaagttggatacccagattagtcaattattaaatgttaatcagcatatgtacaccttctaattgaaacactccattgcaaaaattattaccacaggttttgcaaatacaattcaaatagtataaattgtgagcaattcagcagcatatgctgattaacatttaataaatgacagtacacaacagtcattaggtgactgcaggaaatgaagacttaaagtaaatataaactactgcataaattctatagttcaataaaactagaaataaggtatgcatgctgctggttcattgtaatatcttcaatgttgcaagggggagaaaaaaacctcatcttttggcagatgagccaagactgcaaaaaggacctcgatatcctgcaaaatgaagccagaatgttaatagtatctcaggtgggaatcagtccagaaacaaaagttgaactctgataaagataagtaaagaacctttgttttagaatataagttctttacagaggaaatcagatcttgagatggcattgctccatcggtgagtgtctgtaaaacctgtgtggcgatgcaatttcatgggttatgatgtattcagataaaacaaaccttttaagaaaatttgatgaaacatctttttctgtacacatttaagcagaattttggatttttatcataaaagaacaacttgcacctgcatcagtaggtcccgactatcagctggtgggtctgagatgatcccaagaagactgggagatgagcctattgtgcggatcagaatgggtacttgtcgatgaactgcctgaaaggtatacaatatatcaaatggatatagtttattactgattgagccattggcatggcagagagaagcagtcagcacagacctgcttggcagcttgtggtagacttccatatattgcaaatacatgccgaagaagggaatgcttctggcaagtaagatgtaaattgcatgctgttagtaaaatccatagaatcagatcaagatgttaaactttagtaaatactaaccttggtgcacaaagcaaaatagagtgacatcaaagtttgagaatctgctactgaagacgataaattttctgaaccaccatccttcataagacacagttcatcccaataagaaaaggcagcactataattcacttgaaaaggaacagaaatgtactcaaggttatcttccaagacaatatcaattaagtcatctacaattctgcatatcttactcatcactttttctttttacatcacttcgtaggttcatctatatgactttattcgtctgtttttcatctgtttcttggttttagtgtattacttggttgattttatgacaaagttcaaccgcaattctatttaagaatcaactaaactgtaataagtccagaacagtacatgtgaaagaaattagagcataaatcaaaccttgggtgcttctggagtagacatttcagaagctgctgattcatcagctggaactacttccagaactgaattaagtttttcatttgcaaaatcttcaatcctttttgaaatgcttgccataggaaatagcttatttgctacctgttattaccaaatgagaaacaaaatggttaaaatcacataaatgcatgtttcatgcaagcacaaacaattaggtcaattaccaagcgtattgccttcatgcggacctcatctagatgatggattgaactctgcaagaaaaacttctacttagaatcataaaaaaggaacaagctatacttgaaccagaaaagtagcactagagtaccagtcaacaaaaccaacatcaagtcctaaccagtatataagtttcattcattggtaattgcacgtttggagttcaatctgacgcttatgtccataaaagggaaatagagatgcaaaacattactcatattttgagtgttcaactgtcctgaactcttccaagacacatgaaacaactaaaactgacatcatgtcaaatgactcttgcatgctctaccactgaatcaaaaatcaaaatagaaaactntctcatgctaccacaggtggagttcctgacaatctcatgacagtttgtgactcacaaaaatcatgtgagaagagctgcacatctaagcaagcgtatcgcacatttacacaaggtgagtaaatatgtcatgaagtcagtctagcacctgcaaagcgatctccagacatctgtctcgatttgaaggtcttaacatgataaggttccagacagcactaagtccttgagttaccctatcaccactctgcagatccttgtcctgcttctcattgcttccaggagaacataagccctctagcaacttcaatacaccctctggtaagtatggtatctcacaaagtaattttccaagtgatttatctgaagccggaaacatatcgcgaagattttcagcctacgccaaataagaagtggttggacatgatgcaagaaaaacaatacagtgacaaagttagagatatcataagaagacatacaacagtcagaagaaacgattcataaactgatgttgcagttctcgatgaaaggaagtcttgatcctgttctgcttcacgatacaacctgttcagaatgcacagtgtcagctcgtgtccctgctcaaggaaagatagtcagaccattgtaaggggtaaactgattaaagcatgtaattagataaagcaacagagttacatgaaacataatctgggtaaacattttgatataataaatagataatgatcatcgtcataggcttgctatataaataagaatggagggagtagtttggtaaactagaatgaagataaaaaatgttgtgtctagttaactggtcaagatattggcttgctagttgaaccacataccacagatacagcgccagccctacaactagaagttaaaaaaagtgaagctgaacaaacatattttatttccataaatactttggcaatggaggttggggatatgttcttgtaattgtcatggtagttgtcaagtatgatctttcgctgccagtctaccagataggtagcattctgtgcaaaatccgtaacgtttagcaaggtaatttggtttgaatcaaagccatgtggttgaactggatttttctcccagttcagtcacctaggcaggactaaaaagctttcagttctctcttttttttggtatggactaaatcagttcccatccaacacttgtgtttataatagagaattgataccagttgcacccagtggacccaaaaaaaaaactgtacagaaaagaaattctatgattttgtacacctgtacctcattatttacataatcagacagtacatgcttctggagaagctcccaagggtccaactccaaagggaactgcactatcaagtagcataatgtaaaaggagtgtaactatgacaaaatacaagaaactgaagcatcattggtttaaacattgcaggcactatcaattaattgcttctgcaaagaaactgtcaatggataaattaaccaaacaatggtgcacacaaaaaacactaaccgaattgaagcaaaagaatattactctaaaggaggcaatgtaacatgtacctcaacacccaagtgagcaagcaagggaagacgagctattgaaccaccagatgcatcttgtttatcacaatcaagaatccgcaaaaatgcttctttttgaagtagatctttagcctcatcgctgagatcaatattagtcacaaccaactttggaagcacatgctgtgaagtaagtgtgcttgaatatgagaactgagtctgacttgcttccaccatagaagagcttggactacgagtttctgaagattgagccaaactaagaccagctgaggaattatcagcaggcaatgaactaataaaactgccaccatgctcttgggttccttgaagttctgttgaagcatgggaagcttctgatgattcttgaatctcaattgataacctagcggcatctgcagtgggttctttagcctctatagtttccatatcagatggaattgatgaactattactattctcctccataggtacatttcttgaggtaggtccaggaatggcaggaattgctgcagtttcaccagcagcagatggcacaacagcagaatctatagtttgaggtgcttcatcgacctctcgatcattttgatttattctctgaagacaaagttcaataaacaaaagtcaaagaagaaactctaatgaatcaataaaatctagataaaaaaccaaccttcaataaagattctaacagaggaaagcatgctgaaagaagacttgaactcggagcaccagatggctggccagctgaaggagattgttgttggtctacttcaggatgagaaactggcaggtgttgcatgttaaccattaccacctctgctaataagtcagcagcaatactggatgacaggatttgcagtgatccagccgctctgtcaccttgagcggctaatgcagcaaacatactaactaattgatatacagcttcagaatttccagtacttgcagagttggacgggctagatggggtatcagcagaggttagctccacattattctttacattttcagtatgttcttgatcatgatgtgattgcctaattcttttgttggaacgatcaccatcttctggcgcattatcgatgtcatcgatcagattacgcttgttactgttatctgtgcttg

SEQ ID NO: 19511 - DNA, 6634 bp, Oryza sativa
taaagcatgtacccagcctaggctcacatgaacaggatgcaaggcgtacaggaaatgagcatggttcagcagaataaggaaataaagcatatatatctcccacattgccatgacactaccaaatatgctgcctcccaggctgctaaagctgacactaaaaccccacatatgttgaagctcatgcctgatttagtgctgcctgacaaattgccaccgcctaacaactgcgtgatgttattgtctccccaagaaaccccagcttgtttactgccaaagtccaaactctccaatatatgatgctggcactggtaatgaacttatctattggaatgtggttccatcaatcaagaaaggcaatatgcaaaataaagaaaagaactctgatattccccgggagctgggagtaattgctaatttcgattatatacggttaaaatgtcacaatgaaggaacttattttatgcttagtttatggttagaatggtacaatagacataattggtttagtttagttctttttcaccactcccataatacatgcatccaaccaaagtactaaaccatactcactcattcatcctgcatccacaatctaaccgaactagtaaccaatcaaaaacattggcgccttccaggacaaatgagaccaaagatgtgattaactgagccccatctaggaaacccataggcacctaagcgacctaacatgtgtatacagtatgcaaaactcttgagtacactgaccaaataaaaacagcatagcctcttacataataaattaattaactacagtttttaagcacataatgaaataggcacggagtgatacatgtgaaacctgccagtagaaagaaaggttcaccgagaaaaagttaacagacaatatcagatattatgaatgcaacatttataagttataagttactagttgtacaagctaaaagaaataccggctctgcacttgaatgtgtacatttcaggcatgcagcaaaggcactcttcaaagcatggaaagcacctgggacttgcactttaataatggaacttgctggatccaaagaaagtaaaactggaagtatgcgtccgtaaaatgaaggtcttctttgcgcgatagctgagaggctgagggaaattcatgttagaggatgaggaaaaaatggtagaagataaaaatataacatggaagaaacctgcactttcttctacaaacagaatgaataaatgttacaacatcctcatacaggaaatatatttgttccaagaatggtaagaaaggtaatatatagaaaagacagtggaacacaaatggatgagacaaacctagtaacaaagacaatgatcatggaagtactgagtgattttactttaggaggcttaagctgttctagcagcaatccaaggttctggctggcttccattgccagatctccaacattaagcaaagggtgacctcctctcagccacgctacattgaatcccatatctacaaaaggatttacagatgacagaccatcatggcacaactccaaaatattggcaaatgtttttttttttgggggggggggggggggtatgaaatgccgtgtatgttataccttctgtaacttcaattggtggatccggtggggtatcaagatcaggggtgtacaatagaactgttttttcaacaaatttaatagccagtaacctggctccttcattgctcatcggctatacagcaggttacgcagatgtaagaaatggcaggaggagaggatgaaattgaccagccacgaggaaaaagatagtgccttacctgaaaggccatgtgtgacacagcagatttaagcttgagcagtgcctcccaggataattttaatgaatcatcaatgccaccacttgagaacaagccctgatatcaaatccggcaaaccagcgatgttaggcaaagttcacccacacaggctgctcgaagagcttctgataaaattacctgaataactgctgtcgtagtactttggcaaacaaggttgttcctgttttaatagcttgccttgcgaccgcaggtgtgtcatcgttgagaagatgaagcagacaaggcatgacattgggaaggtatgccatgtgttttgacccaacctcaccaatcatcctatgtcggggtagaattgacatgcacatgtagcaaaaaaaccatgagcatatacgagcacagtgaaaagcgtgggcagagtattataatttctaatagacgctcttatgaacaacaacaccttgagcgagcaggctcgtgtacagtattgttaataactagcaagcgctaaattatcatttgttactgttggtgagtggtaaatagaagagtggaaacttagcatcgaatgtgtgtggaaataaaattacagagtgactcaacgttgacacctaaaccacacacaatccaaatataaaaacctaggacgggaggatgaaattgggaggtccaagaccaagaggagaaagggacactgactcggcgacgagcttgcggacggggctggcctgatcggcatggaggtcggcgatgcgggcgacgaagtcgaggagcggaaccctgcggagctggcggaggcgcggctccatggaggaaggcaaaggcgaggggttgggatggaaggtcggcgggaggtcttgggcagcggccacagccatcggaaccctagctcctccgctccggccgccggcgctcactccgccgtgccgcctgcggatgggttgggctttcccttttctttttttttttagaataatatgaatatgggatgggttggaaaatgtaaatgggcttacggtgggagggatgtcatctggacttaaatcatcagatatatgggctcaaatttgagatgcacatgaaataggaaataagtccacctgtcatccctcaactttacgtcgagtttgccagaaattttcaccctccatcttgacaaaacgggcccatctcgctgagtcaccactgaccgggcctatatgtcagtggataacctttcttcttcctccaatcctcctctctctctcctctactcctatcaccctccatatgtaattgctacagtatttgaaacaatatataaatgtaatgaggcattgaggtgtgtatataatggatatatcaatatggccttgtccaaattgtcactagctttatgctgcgtcttacaaagtacagcacgcacgcacatcaaatctagctacatatccttcaatacatgtatgtatactcctatatatccatggaaagaattgtgacctccatatctccacacggacacgcacatatatatcgattgatcggcgatatatataggtctctttctatctgtctgtggatcgaatgttgaatacatgtccaggtcagtcgcagctatctaattaagctaatttaagcctccgggcttaaaagaattgaaggaaatgtaaaattaatttagttagcagggtcggtctggtagtagaccacatctccggtgtcgctgacatagtggtcgcgtttcaagctccgggacagcgctccaaacaggtgtaagggaaaaggcccagacttgtccggctccctgtagtatttccccatcacaccctttgctgcttccgtctgcacattttcatcacccatgcttcttagtaattactcagcactacgtactgataaacatcacatagcataatttaattactagtactccgcatgcactgcagagactagagcttaccgcctcaattagatggtaatgcgggatttgggggaaaagatggtgaatgacatgtgtcccgatgtcgtggtggatgttgttgatccacccatagtccctgtccactgtcgtcagtcctccccgcaaatagctccattcctgtacatatcatcaatctattcagtacaaaagtgcaaaagtgagattattattatttggatttccttgagtaattctctgcctacgaacattttctaaagaaaaaaaaaagaaaaaaattcactgcctcacagtatgaattctgaaaacgatgcagctctctaggaaaaagatgcatgtatacaaaagttgtgatccaacttgcatttgcatcatggaccacaacgtattgtgattttttgtggacagaagatcgcatctttgcattatcatctagtttctatgactcgtttaatcacaggctcaggtcaaagtcccttcctaaattgactatttttgacaaggtagttatgcctaatctttttttttctacgtactgcaatcaatcgattactagatccaacggcataaataaaagttgcaacctagcttattcattcagtgtgtgagccatgcatacatatatattgcttgatttctgaatatattaagcatgcatatagtgtgagcgagtttaattagagagaagaaatgatgtatatatgcatgtcgtctaatagtaattgatagtaaaaaatgttagtaattagttaaacggaccttgccacggtaccagggcagcttgtcgttgtggccgtgatggtgcaagtaggtgacgaagtccagccacataacaaaaatctgcagagaagtagaattgaaatacaaactgatgagaaaagaaagcaaggtaggttttgttccccacatccacaaaagaggagatcgagggcaggcagaggatagaggaacccaatccacagatcacatcaatgaaccaacgtatgtatgtagggggtaactacgtacccagtaagggacaaagtagaggttgagcatgaggaggggtcccatgaggaaggtgaggcctgcgaggagggcagccatggccacccagcacgctgtggatgtcagcacatcgttcctttcgttgggctggaacaggtcgctgctgggatggaaatgcgaaccagactttcctgggctccgagaccactgcatgcatgcaatatatccatccattcatcatcgtcttaatcatcacatcacatataaatatatataatggaataatgaacgtagagtacattgttatgctagtaatattagtagagtactagagtagcaattaattaaccaggtagaatgggtaggcgagcatggggaagggtatggagaagcggagcatccgggtggctctgttaaggctcctgtacagccgctcggggagctgcattttggattggattgatcagattcatttgcaatggggaaacccaactggagtagttgcaattaagtagtgaaatcgagaaggaaggaaggaatgcgtacgggatgccaggactcatccttgtcgacatggccatggttctgatgatgcgtcctgtggctaatcctccagccatggtagggtacgaggatggaggagtggagtatgtggcccatcacgctgttgagcctcgagttgttggagaagctcccgtgcccgctgcaattccaattccatgaacgaattaattactactagtgtagtagagtggagtaggaatcaaaatggaaatgaataccgtcgtaccagtcgtggccgaggacgaagagcgcccagaacatggttccctgcgccgcccagtagagcggccaggcgaggcagctgtggaggcgcgcggcggcggcagcgagggcgaacaccaccaccacgtcgcgcagcacgtaccccatggatcgccaggggtccttcacccaacagtgcttggggatagcggcgcggatgtcggccagaccaaacgggggcgccgcgcccgggtcgaagtcctcacaaggaggaggaggagcattattttcattgtcgtcctcctccacggtggccacgcggctggtgggtgcggccacacgagcggaggcggacattcccaagtgggagcgcaaatgcaatggcgcgacggcggcaggggaggagggggagcggcgcgacgccggagagtagcagccgggccattctttccttggttggttctactccaattggtattggtaagctgcgcggcgccgcccccgcctgggtttatcaacgcaaaaaggaaaggaaaacccaactgggttgccggccctatctatctatctatctatccatctgtccgtatcccacttttgggaactcgtcggcaaacctcagccttccctccactccatccaatacctcatcaccttccaaaccaccccacccgttacactcccaaccacaaactactcacatccccatttctcttcccaaaactaccttccactcttcctacatactagtatatcattacattctgctgtaatacaacatattactatcttttttctttcaaaaaaaaaagagagagagaaacattacattctcgtgtagtacaacatgaccctaaagctaacgtgtgtataaacgaccaccgcgacaagctcggagaaatatgtaccacaaacgaattatatatatatatatatatatatgtagtgcatacctaaaaatgataaaacaaattgacgtataagatttatccacatcaccacaaataaaacttttactcgtgatgacatggacaaatctctcacattcacttcataatcagacagtttgtcttacatataaagtttgcgctacatatttccccaaggctcccctcctactaatattatacacaacaccaccagatggcacacaatgaatatgaatcaatggc

SEQ ID NO: 19512 - DNA, 692 bp, Oryza sativa
atgcaatattgggaaaaacagctgaaaaaaatgataaaataaaaacaaatgtaaaaaacagagtaatctaatataaactaattcaattaaacattacataaatacataccatgtcacatgtctcaattggtctagcaagtgatgctccaaaaactcttttggaccattccaaaattagtttttgaagggtgtttcataagatcattctgaaataaaaaaatacatactcaatttgcaagtaacagagttgtatttaataaaaaaattaaaaaaatacaaacactcatcccaattgatgagaagaaatagtgtcgtttggattttgaaggatgaatcgattgaaacatatatcgacagaacacagacattacaaaatttgataattctccaccttgtttgaatgaagaaccaaaagatgagaatttgcagtgaactccatcaatattaacagcttcttgactgcagtaatagtacaaaacttacatatatgaagaaactgaaaaaaattacatgaaaaaatatttaaagttacagttaattttgcaagaaaaaaaatgtatgcagacattctaacatggagcagcacatgcttgcacaagcattcaatcacaacaaaatgttcagcaagtaaatataaaagtgtcaagcttatcccatagcataccaaaaactataaaaaattaaaaatcatg

SEQ ID NO: 19513 - DNA, 12094 bp, Oryza sativa
aaagaaagcagttgagagatactagcatgaaactgataagaatttgatcatctgtcatatgttcccctttaatgaacttgtccccaaaaaatttcacagagggcattgctgatttgccaaatgtttcaagaatcttgttttttccaagttcaaaattagaagaaatttcaattcctccaacaggcaatccaagaataatatgtacacaatcttctgtcaatggaattactttgtcatcaacaactatatcagaagaagacacatctacatgattagcaatccaagaggcaaactgatttggaacaaatgaagactggaaattcagcaggcttttaaagcaagtccttccaataacttccttatcatgtactgataaattgttgattacttcagagaaatacttcacattgaatctagtgaaaacttcttcacacttgttatctttctcaaaggtttttctctgccaaaaaaatttaaagaaaagaaattaaaaaaactaaagaaaaaattattcaccaatgtaataaggtaataaaattaccttattttcagactgttcaccaagcatgcttaatttcattttcaaagaatggagaactagatcattgtgaatctctaacaatgcatcatcgataattgagtctgattcaactttttgtctctgaaaataaaaaatatcatattaaaaaaataatgtaaattacaaaaatctaaatatgcattaatcataccttctttttatggtcatgtgtaaatggccttttaccaagcttaattttcaatttcttcataagctcttctttagttaaatgaagcaaaggatcattttcctcaaaatgttggtccttaataaaaaaacaagaagattcaaaaaaaatattgaaataaaaaataaacttccatgataaatgaacatgacaaatgaacttacatgattatcagaactttcatcatgattagataaatgaacatcaccatcatgattatctgaactcaaactacaatcattgtcactgttagattcactggaaatatccacttttgatctttttctatgacccatactgcaaggagagaaaaaagatctcaaaacataagtattatggactaaaatatataacaaaacagaataaaacatacaagttaaatgcaccatgtcatatgaaaataatattactttcatatagtagaaataattatttccatagagtagtgtcaaatgtgtagcacaaactcatgtcatatatcagagtatagtgatgactaggaatactatagtcttctccttctgaacaaatgtattaacaatactcttctccttctgaatactaaacctgagcatgcaaaatgcagagacaaaaattgactactataaaaaacattctagtacagaaatcttcaataacttgtgttatttactcatgtaaggttgtcattgaaagattaaaaataccaaactaaaatgcaaatggcatatagcatttgtggatttctagaaaaaaaaatcctgaatcagtgcataaacatccacctaaataccatatagcattctcttgcatagatttagaaactgacatcaaagcattactacaaaatcaatcagtgcacagaacatgcaaatcaagggtatacagaagggtcaacaaatgtacattgcacacatctagttcacaaaagcaaaagcacatatctagttcacaaatgcaaaaaagcaatcacaaaaagatatatctaaaatgaaatgaatcacagatctagtccacataaacaatatctagggctaagaacacaaatcgcaaccataaacataacagtactcttctcattttgaatactgaacatgaacatggaacatgcatcagagacaaaaaaaaattaacaaccataataccattctaataaagatataaaacctgaaacttagtacaaaccagcatatcttagtcatgcaaaaaacaactgataatatcaataacaaatttaactgctcatataaggttgtcattgaattaacatatagcatttgcagatttctagaataaaaacatcctgaatgcattactacaaaaacaatcagtgcatacagataggtgaacatatgtacattactcccttatttgcacacatctagttcagaaaaaagcataaaacacagttctagaacaaaataaaaaagcacataactagttcacaaaagcaaaagcacagatctagtccacaactacaaccacatcatgttctgtaattttcatatagaagacaaaagcaaaagcgcagatctagtgcacaagacaatatatagggctaagaacacagagatcaccgagtcataaacgaatatgaatcaaggggattcaccatatcaaacacatacatagattccgagtcgaaacaaactcagatctacaagccccatgaatcgacgacctaaaacacaagggaaaatcagaaaaacgaaggggaaactcaccgaaatcagctccaacttcacagccgcgtcgtagccaccagcaaaccaaagaccacgagaagagaaaaatgaagagatgaatcaacacaagagcaacaaatagaagaagaaatcgataaaaaatggaaaataaatctgccaccttcacctcccgcaaactgcgcaacaggactgcacaatcaccggacggaatcgccgccgctcctcccgacggaaacgccgccgcttcgcccgacggaatcgccgccgcgtcgcctgagacgacgagaacgagagaaatatctctctctctccctctatctgactcactctctctctctctccatcggcacaaaaaagacaagcgcggatttcaaaatttgaacagtgcccatgggtcccacacaggctgtcgaaaaaaaattctgatgtgggtcccacataattaccacacacaaaaaaaagcccaaaagcccagacacaaataaaaagctcataagcccacacaccgataccacaaaacgaactacgagccagtacgaatcacaaagaaatccgacggcttaaaaaacgaatgatagagccaagaaaaaacatgcgattgccaaatagccatcccgtattgtttatgtgtaagaggtgggaccatatattaatggtgtggtatgtgtttatatgtagctattgtataaatgacatattagattggctatagatgaattggagatactagttggctatactattaaacttgttcttacgagtgacaattaaagatttgttattggacccacaaatcatagatatacgaggacctacatatcatagactatgagtggtaaatatttaattgcgacattttaaaagtggcaaagatgataaatgtcccctcaatttaagacttccacacgtgccgttgctttacatttcttccacggttctttctcgttttgttttcttgattcctattaacattttataatcgaagattatagccgttaaacgatgtaactcattttttaaatactccatccttttatattagagaaaagtacaaattaacccctgaactattgggtgagtacgaataacaccccctaaactcgaaaaccagacatcacttaccccgaacttttaataccggccaagaaaccccccccccccaagcactgttgtgagcggtttagagttcgaatagcacacgtggcagtccagtcagcaattttttttctaaaacaatagcgggcccacttgtcagaatccccacctctatttctctcctcctctcgttctgaagagtgcggcggtggcggcggccggcccgctctggaggagtagcacgagtgtgcatgcggagaaatacggtggcgcgggagaggggttgacgcggcggggcgcggccagtggcatggaggcggaggcgagggccgcgcggtcgacagcgaaggtggggcggcggagatagagagccaccaccaccatagcctctgccgccaccgccaccaccacaacctcttccgggggagaacgacgccggagctgtggtcgcagacaaagacggcgaacgagaggaccaaggcgcaggccaccaccacgcacaacgccatggaccacggtcgcccgagttcgataaaatcattactcagttttttgagatggagataataattgatctcgatctgatgtgtccatggaattcggaacgtttgttgcttcaaatcgattcacagttgagcacttgagctcctccgccatgcacggtggcccagagcttggacgccaccaagaaggaagaagtttttctttttatttttttttgtttatagctctccgccccatggacttccggcagccaatgcccgtcgccccaccgacggcacggtggttagctggcgatgcgtcgctgtcacggtgctgacacaagccatggccgcctccgccgccgcaccttcaccatcgaccgtgtctccggttgcaccgccctcgcctccgtctccatgacgctagcctctgcaggcgccccgcagcttcgccctctctcccgcatgcgggacagcggggcggccgcgcgtttctgaaggagacggagaagagagagagaaaagatgggtggggaatctgacaaatgagcccactattttttaaaaaaatattgctgattggactgccacgtgtaatattggaactctaaaccgctcgcaacagtgctcaggggggtttcttgttcggttttaaaagtttaaggtgagcgatgtctggttttcaagttttggggtgttattcgtactcacctaatagttcagggaggtaattcgtacttttctctttatattatactcactccatttcaaaatataatgcataatcacctttaactaaaaaccaataaacaatcattatcacctcattgttggctcatcctaataaattagatgatgtctcgcgcgttattgcggaatatttgtattaaaatggaatttaaaaattcaagtacactttgcgagataaaaaagtagtaagaaaagagggaaactgaggcaatacagcgtagcaacttttgcgaggaataaactgatagcaatgcttcactttcagtgcactgagacctcatgtaaaacaccacgatagcgcctcacagaaaataggatcatatttaagcacgatgaaccaataggataaggttaataacaaagagcacgcttgttacctgttgcagaggcaagagatgaatggttgtctatgaattttctctctcaacaggtgtagctagctattccgaaactcagtttattattgatcaaacgataactttcaaatctagggcaaggagaagaacaatactgaaaatactgaaaataattttcaaatcttgggttagggtttcatggtcaaaagacccatttaacaagcccaatgggcctaattggttggcctggttcgctctctcgctcgcagcttcaccaatcgccatcgcgctctcgctctctctcgtggtcacgccatggcgctggtgtggcgtcctgggaaggaggacgcgcggggggggggggggggtgctcgcgggaggagcaaggtaaggcgagcgccacacccgagccctccacccctgcaggttagcacacaaggtaatttatggtaacaatatcctccccaatgtaccaatgacatggcacgaagtgcggttttaacattgtctaatttccccctaccttcaattctctcaacgctatccattttcagccatctactttatatatattttttatttcttatgcagcacttttgttgtttgaaagcaacatgccatttcatacattcaccaacaatatgtttgccataaaggctgacatagttaccaactgacattttccacattatttcatttttaagataacatatatgaatcatagcttaagcttgagagcgaccaaagtttattcagcaattcagcttccaagctaagacggcacacattgtgatagatggaaagttaaacgtatagaacaccaacattgtttagatgaaacaaatattaatagcaaagactattgctaaatctatatccatagtcggcgaaaatgcatgacagcaatctcgagaaaatggcatccacaattcttcgaaggaagcaaaatgttataacaattatcaaaccaagccatcactgttatacatctgtctagcaagaagccatgatttgtaatacaacccaatagcccaaaattctttgcaaatatatgctaaacagagtataaaaattcatctttgccgattggtgagcaggacttcctcgatgagcctctatgctagtaatgctcgatctttgacatgctacctaggattagattttcggggttggagaaggcgggatagggtaggagggcggtaagggtgggtttagagggatgtctagggcggcttaagaacaatggtcggtggcgacaggctatgtagatgggagggcggcagggtgcttgaattacagggatggtggagggcagtgggaaggatcagtagctagggaaaaggacgtcaacagatttggttgaaaggtagggttggcagaagtggatctggcgctaggagccactggatatgggggatgagtagcagggtgtgggaatcttaccggagctattaaagagggtgatgacacccacacggaggaggagcacaagaagggagggaagcggaggtgtgtgtggatgcgagtcttgccccgctgctaatgcgatgttggtgaggtggaggaggcgttatagatggaggcatggcgtattggattgggcatgatttgcggcaacagactagagtttgaggagaagagatagggttccctgagtttcacgaatcttgatgagatctgaaccaaacaaaaatgaactgatggatagagaaatatcatgcagctattaataggtggcctccaatttagcataccatcataacttctgttaccttttcctatgcggtggcgtgattcagttcgatgcccggaaggagcatatcgttcgacgacaagctctgtgatcgtcatcgccaccgctgacactgacagcaatgcgtccaccactagggcgaggtccttgctatggcggttcttgaggtgcagctttttcagatgcgggaagcccaaggaaaagaggcgagcattgacgaacccctacgtcaaccacggcaggtcctccaggacaagaatggtgagcatgcccaggtacgacagtgacaccgtgggccatttccgcagtgcgagcttcgtcagacgcaactaatccgacggcatgaaccagtagagcttacggatgacatgcggggatggggaagcttgccagagttgttgaagtgggcgacgacagaagcttggaggaggagcaggagaaggtagggaagcggatgtgtatgagattttgagtcttgccacgccgctggcgcgatgatggggaggcggaggaggcagcgtggtgtgttgaattgggcacgatttgcggtggcgaactggagtatgagatcaagagatagggttacctgatttgcatgaatcttgatgatatctgaagcaatcaaagatgaactaattaataggtggcctctaatttagcataccgtccaaacatcagtttccttttcctacgttaatatgtgcttatttacctccttctttgttccaatttgtgtgcacactccattggcatgtgacacactagcgggtgagttagtggttggccatggtagtgagtgagctggtgggcagctgtattgagacatatttaataatttacactaatgtcttctaactccacgcttttgttgaatcctacatgtacaaaagaagttctaatacaaataaggtgaacccactttgagatatacaaaatcacatattttttactcattgggtgattgaaaatgtaaaacacattagttgattctccaactacaggagatgtggcagcaccgtcaaattagtgttcggggtagtaggaaggacgggagagatcgaggagatgaggtcggtccccggtcctcatgccggagggggagggggatcggctaaagctaagggagggataggtctatcatataagcgtcgtaaaaatcttggggaaatactagccataaaaatgttattgacatttaaaaaaaaaatagttgcctactgaagacacaaccaaaaaatgcaaattaggaaaaactgtaactgcaatactatgaagttgaaggtttttatagatgcacgtttaagcaatgcaacttttactctgcatatatcaataaaacaacaagcttaccaataccaatagaacatagggttattgtctcgtgaagagcccaagcttgtataaaatgtgtctcccatttgaccgaaatgtcccaaaggaacacacacaaactggacataggtacacaagtttctgttgtcaagatttttattgatgacatattaatagcaaagtctattgagaaatctccatccatagtcaacgaaaatcatcgaaaatcagcatgactgctgtctcgagaaaatggcatccgcactaattcttagaaagaaatagaatgctacaacaattccgcaaccatcactctgcctcgaacagtgacaccaatgccgatctcgctcatctctccggggccaaccttgtgcgccacctctagacaacaacctgcatggctgattacgaggtggccgcacacatgcttggcgagtgtgagcgtagggttgtcgaggccgagatctgtctccaagccaagatcgatgcacttcagatggagtatgatcttctagccaaagaagtgccaaagaaggagaaagaggaggtgcgccttgagaaaatcatcgttgaggctggtgcccgctttaaggccatccttgttggtattaacatgctacaaagaaggaacgaggaattccttgtcgattcacaacgctacatggatgaagttgaacccaaccttaagtctgcaatcacagtggttgaagtgctctagaatatgtagggtgctacgtgccccacctccagccaacaatgaacatagttgaggctaacgaggtcatcaccactgtgcctgccctagatctccctccaggcctagatttgtaccatcagaaagtggatctcgctatgaaagaagggaaacaacaccaagaaggtcaatatggtgagaatactaatatcaactgttgggaagaggagaaatagatggtctgtaccaaagcgcacggcatagctgtgttccaccatgaaccacggtcagatgttggctattgtggatgagatcatgatccctaccctttatgtggatcttcccttggtcctagatctgctacagcaggaagtcgatctcgctgtggaagaagagcaagagtgcctagaatttctcgattgcaagaatactgacatcaatagcctggaagaaaaggaagagatgatctgcactaatgtgcatggtgtgcctgcattttgccacaaacaactgctaggtgtggccatggccctaaccacagcttgcccccgtcgtggatttgcctccggtcctgcattttcaccaacaagaagtggggctctttgtgcaagaaaggcatgagtgcgggtgtagtcaatgtggcaagaatactaacatcaacaccaacaaaaatgaggtaagctgcaccaatcattcaagttcttctagcaagagaaagatggctgacatggacaacatgaccatcccaccagttttgcgcaagagacctcgttgcatcgacaacttcaagagcaccaaaaaatgagggaggccatgcaagagttcaatcaagccagaaccaaccatgtcaaatgatttcaaatgcattctacaattgcgattgccactatcatccacagttcctgcatccacgaatgtatcattgttggatttaccaattatagccactgtacccccctccagttgtgatctcgttaggtccacacttacttttggaaaccgataatcaagagagaaattggaacaagagatcactatttactgggttgggaagtgttgatcaagaatatggaattgaataggaaagtgctcccttgctaccatcatctatgcaacaaccttcttcttccttggggctatccatgggtggttctcaaatagctacagcacaagtagcaactagttttgcctctgtccccaatatgagcccacccttggttaaagaatcaaaccagggagatatagaaatgcataacgaattatcccatttgcacttgaataatttgatgaaccaactttcttgatgcttggatggaagaaagtggggcccctttatcaattagcaagtacccttctctttggtgctcccatccaacagtaaaagtgcctctctcgtgtcaaaaatggaaaccagcttgtgggagtctcaggaaaatatggttatgagattcatggaaaatgtggagctttgcatgggagctatttgcgctctttatcgccaaaagaagctaatggttgaattgacatgtgaagaacgaactaagtttactacactcaataaaagtcaggcttacaagtatgttaaatattaggtttgaatgctaggaaggaaaattattcatatttttacatattatctgcatacaatcttgagaaaatggtatccacataaattcttagaaggaaacaaaatgttatgtcaactatcaaaccaaaaccattacagttattcatctgtctaacatgcagccatcatctgtaatacaaccccatggtccaaaaaaaaaaacatcgcaacaatatgctaaactgagtttaaacaaattcatcaatctttgcctaaaaaagaacacaaaatgtttctgacaaaagggagtctcataatctatcccagaacaacctcaacgtcctctctgaaccaactccttccacacaggatctgccccttgatgccgatctcctccattctgctccaatggcggcgctctcctcctccaccttcctgctgcctcaccacctcccactcccacagcccatcgtacctaacctccccgtgccggagcagctccacctgccgtagcgccttgcacaccttcaccacttaccttcagggttttcaatttcgaaattagattttatgccggggtgaccaaaatttatcggtaatttcagaaatttctggctgaaattatttgaaaatttgactgaatttgaatgaatttaaataaaatttgaccaaattcacaaaaaattgcaaaaaaccaaaaattttgggtgagatttgagcatgctagtcagctagtgggggcgaaattaccgaaatttcagaaatttcgaaccggaatttcaaaccctgcatacctcacgaatgccacctgccccggcgtcggcccgaagcaggccaccactagctcccctagcttccggtgccggaacatcgccggcggccacatgatctctcgccccggcgccgccgccgcggccggctgatcatcagcggtggcggcgacgtggacgtgcagggactccagggacggcgcggcctgcaggaggaggcgcggccacgagacgtcccaggtgggcggcacatcggcgacgaggagccgcctgaggctgcgcagccgcgtgctgacgcgccacgggaggatccacctctccggcccggtgaaccggacgacgaggctggccatgcgctcgctgcggacgtgccagtcgagcttgtacttgtccggcccggggagagggtgctgggcgtcgtcgacggtgctggagtcgagggagaagctgaggtggactcgccggaggcgcgggacgtccctgaacaggaccaccaccgggttggcgtcgtggatgcacacgccaggtcttccagcgcggcggcgtggttcagctggatgccgaggaacaagcagcgctcgacgacgagctccgtgatcggcgccgccgccgccgccgacgatggcggtggcgcgtccaccaccagggcgaggtccctgcagtggcatttcttgaggtggagcttcttcaggtgcgggaagcccgaggaggagaagaggcgggggtagacgaaaccctgcgtcgacctcggcaggtcctccaggacaagaatggtgagcgcgaccggcatcgtcgacgccagggggacaattcctcagcgtaagcttcgtcagggggtgcagg

SEQ ID NO: 19514 - DNA, 11784 bp, Oryza sativa
tgacacggaagtcgagcgccggaagctcgcgcgggaggcgcgcccagcggcgggacagcgcgtcggtgccgagcgcggagcaggtgccgaggccgcgcatgacgatgagcaggagctcgtcgggcagcgcactgaggcggtcgtcgccctcgctgtgggacgccgcgcgcggcggggcgctccgacgccgacgtcgcggacgaacagccattgtcacggcaacactgacacaagttgccgaacgatttgtatttgaaaaaatatataaaaaagaaaattgccgaaggatttgtatttgaaaaaataataataaaaaagaaagttgccgaaggattccgattcggtctcggactcacgccggagtaagaacaatgtcactaaccaacacagtcacctcaccccggaaatcatcggttttcctgcaattccaaggtcacgacatttgttaggaccaaattgaatttacttgcaaaatacccgtactatttttttacttaagacactaccaggcttttgttaaaattttgtacaatattaaggaaaactatataaatggagttaaaaaaagggtgaacaaattttacaaactttgcaaccattcaagaactgtttgttgcaatgaatctttcatcctacaactatggagaactactttcttgaacaaagcaaatcatgattccacgtctaaccttgtaccttagaaaatacaaccatttgtctccttccagatatgccaacaagaaaaataagaattctgttacccttaattagatatgccaacaagaaaaataagaattctgttacccttaatttgttagcggattaaacaagaacttaaatgtatggtatcactaaacaagcaaaatgtgttactaaccggtgctaaagatgatttttagtctcggtttgtataattgagactaaaaatacccatcataagtcccgcattgtgtgtcccagttacataactggaactacaaagggttgccaaccgggagtaaagtgattatccccagcgatggatcctacgatgatagttgaatatttttgcttgttcaataaccatgtgatttacattgtctaactatagcacacaactaaaagaaattaatgataacatctaaatatcactattttcactactttactactagagaacagagacttataatatcgaaaaatcaatattttcactattttaaatttaaccatatagcatcgaaagttactagtttactttaacaacaccataagttaatttcgttctataatttagccgcttttgctgagtaggcgattgaaataagaaggaatttcaatcacctaggcttggccgttggatcaatggccagggcatcatctacaccattggaccaagggaggcaggaagagaggaaaggaagggaggagggagtttgcttatcgaccggtgatcgggacttccttggcaagcctacgctaccgatgcctaaacaccgacatgctacctatgtattagcgttctagggtaggagggcggttagggtggatttagagggatatttagggtggcttattacctatggttggcggcggtggcctacggagatgggagggcgacgaggcaccggaactgcgggtatggaggagggtggtgggtagggtcggcggtggcagcaaaggatgtcatcagatctagttgaaaggtatggttagtagatctggatttggctgtgtgagccacccgagatgggggatgagagatagggcggggaagcttactgaagttattgaagagggcgacgacatcggcgtggaggagcagcatgggaaggaagggagacggaggggtgtgtgggtgagaatcttggcccgccgctggcacgattttggcgaggtaccacaaatggaggtgtggtgcgttggtgtggggacgatttgcggcggcggggtggagtttgaggagaagagatagggttagggttacctgatttgcacgaatcttgatgagatctgaaccaatgaaaaatgaactaatggtggatagagaaatattaggcaacacattaataggaggcctccaatttagcacacagcccaaacttccgttaccttttcctaggttaatcattccttctttaccacttttctgttccggttcacgagcatgcaccattggcaagtgacacattagtgggtgagttatagaaaatatcacatatttgctactcatcaggtgacgaaaaatgtaaaaaccattagtcgaatatgcccaccatcgatccatgtgtgtgaatcacactctagctgtccttcttgatcaaaatgtcttttccaactataggagatgtggcagaaccactggattagcattcggggggttgtcatgggagatcaaggaggagaggtcggtcggggggatttggctagagctgaagaagacgatgagatgtcgacggatttggcggggattcgggatgagagagggagccgctggtgggcctcgcaaatgcttgccgatgaggggaggtggtggggagggtgtcggcaacctgacagatcaaatgtacaggacaaggaagggatatgtctaggataagtgttgcagaagtctctgagcaaccctagccataaaaaatgtaatttccatttaagcaaaaaaataataatgaatacactacccaagaatgcaaattaggaataaccaaaagtaaaagttataccatgaagttgaaggtttttacatatacaggtttaagtaatgcaacttttgtaggtgattgattagcatagcctcttgttaggcaatggtgtagcctatgtgcttgagatcattgatgtgcatgagaagaggatagatgtggtctagattgcaaaaaaaaaatgtcaaagttttgtaccctggggtgaaagcacacaatgaaactttcacaaagatgctcaaactacaatttactcattaataacaaatataaaacttccatcgaatgagagaaagagtttatttttggattttggcaaaataaataaataaataaatacacacatatccaagtgaattggagtcctgtccacagagaatgtgtgtgttagatgcaaacagcacacatacaagggttgtggaaagatttgagtaattatggccatcaaagtgtaactgacatttataagaaaaaatatatatgcatgataaatacacaatccaaaaacacaaattaggaaacttcgaaagtaaaagttataccatgaagttgtgtggcatcctggcccaattaggaccgacgaggacatcgggtcctttgagggtgtgtgtgttggggggggggagctcctgactcaattaggatgtagcatgtgtggcccataagagctatgtgtacatgtttagtaccacagtgctactttagcaagggtgaccttttaagtaggcctgtccgtcgattgtgttgggctgcacagttatgaagggcgggcggttacaagttgaagctttcttatgtgcaagtttgagttatgtaacttttaagtgattaattagccatatctatcctctccaaagacaaaggtgcaacatgcatgcacacaggtgggaggctcattggcatgcacgaaccattgtactcgaggtcattgatgtgcttgcagttgaggcaatccaaattgccgaaaagggaatctccttcaggagttcgcatcacatagcgggctttggcttctatctatttacggtgtgtttagttcctgaaaaaagttgaaaatttgaagaaagttgagagtttggaaaaaaaaactagaagtttatgtgtgtatgaaagtttttgatgtgatatgatatgatggaaagttgagaatacgtgagaaactaaacacggccttagtggaaggagccatccctatttgtggcaaggagtggatagtccaccaattccaattataatttgccaatgacttgtttcatggctttaatttgagccacacatcgtacgttggaaacaaaaataaccacattatagcaggtcaagcagtggaaaagaagacctctgaccacatgtttgttcaagaataagctggtgactagtaattggattttgactttttcttgcattgttatttaaaaaatttgtacaaatataaaaaaagttgtacataaagtactttagataataaagtaagtcacaaataaaataaataataatttcaatttttttttaaagacgaatggtcaaaaagagcaggcaaaagggaagaaaattatgtaggactgaggtcctaccctcctccgaaagacttggctcctctatgtgacacctgtcccacacgaatctcagagcagcttactccctcgtctctccagttcccattctcttcctttgctcggtgaggcagcgagctcgcgtctgaccagcgagctttagccgtgcgccccctggcgttgagcagcatcaagtccaagctcgcgctgccggcttgccgctagtctgctagaagaactctcatgatttggacgagactgcgctgtcgactcgaatctgctacatgattattcactgattcgatttttcttgcctcatagcgaaattattcaatgatttgatttttcttgccgttgagtttgctctgtatggtgtactgcactgataatcattgctggtgattgacttgaaggatttctttctttttgccgggtgagcattttaggattatagcgttaatttattgatgtttcttctcgacgagcgcctcatgtgagcttggatgctttcacgttactgatatcgtttgattccggcgttagcgacaacctgccgagcttcatgccgctcacccgctggtcggacgcgagctcgccgccttcaccgaggagaggaagagaatggtgaactggagagacgagggagtaagctgctctgagattcgtgtgggacaggtgtcgcatagaggagccaagtccttcggaggagggtaggacctcagtcctacataattttcttccagcaaaaagtgagtagcaaatatcaatctaaaacttccatctaatcagattaacagatttttgttcggacactttgttctcaaaatcgaaatcatagaaatccacgcgagagaattctgttgggaggcatccacgcgaatcggagtcgtccgcacgaagacggagatttggtcctgcactctactctagatcgcaaaaccgcacgtacggaaccccgcggccatggccgcgcccgcgggcaacgtcgagacccctcctcgccgccgcgtgcgccgccgcatcgccgccgccgcggccgatgacggcggcgaggtcgacgacgatggcctcagcgtgctgcccgacgaactgctcctcgtcatcctgggccggctcgacacgcgcacggcgctcgccgccgccgcgctctcgcggcgcctggaccgcctcgcgcgcgagatccccgcgctcgtgttcagcgtccgcgacgtgctcccgccgcgctaccacgcctgcgtccgcgcccacggcgacgccgccggcgcggacgccaggaagctcgacgcggcgatcggccggtgcgagcgccgcgccatccgcgggttcgccgactgcgtcagcgccttcatggagccgcgcgtcgccgtcgccccgcgccgcgccaggagtctccggctcgagttcttcgcggcgcgcagcacgggcttcgtcgaggacctgatcgccatggcggtcggcgcgtggggcgttcaggacctcgacatcaccgtcgtcaagccggcgctggtcgagcagggcccctgctacgccttctgcttccccgaccaccgcctcagcgcggagtcgctccggtcgcgcatccgcagcctcgccgtgtccaactgcttcctcccgccgccgtccgagctccggcactacgccgcgctcaccaagctcgtcctgcaggacacgcacccgcggacgcccctcgccttctaccgccaggtgctcgacgcgtgcccgcggctcagggcgctccacctccgccgctgcggcgcgccgtggtacgccgcgctggtggtcgacgggatgccggagctccgcgagctcgtcgtggacggctgcggcttccacaccgtcgacctgcgcgcggcgccggcgctggagcgcgtggcgtgcgtggacggccccgtcgcgctggccttcggcggcgccccgcgcctcgcccgcctcagcctcacctacgcgctcgacgaccgcctggtgctcgtccggaactggaggctctccggcctcctcggcgacgccccggcgatggcggagctcctcgtccgcttcaccggcgagcccaagtggatgacctcgggaccgctccgctcgccgctgcccggcctccgcaggctcgtcgtcgccgacatgccgtccaactgggacgtgtcgtggccgcgcgtcatcctcgaggcggcgccatgcctcgaggtcctccacatccacgtccaagaagaagaagacgacgccgggacaacggcggcggcggcggcggagataccatggccgccggcggagagcgcgcggcacgagcgcctcgcggagctggcggtggtggggttcgccgagacgcgggggcaggtggggttcgtgaggcacgtggtggaggcgtgcgtggcgctgcggcgcgtcgtgctggtgaggcgcgggcgcgtcgtggtcggcagcgaggggcggtactgggactggaagctggtggcggcggaggcggcggcgccgcgtgagggggaggtgggaggtggcggcggcgacggcgagcgcccgacggcggcggcggagtggagcgaggtggagaagatggtgatacggagccaggtgaagagcgcgtcgaggcctgacgtggaggtgttcattggatgacgtatgctatcacgagtccacaaacactttttggacctagtgccgattgtatgcgtaattgcgtataaagggtgtatatgatattttcacatctaaaatcttaaatcttagggataattgcatatttgcgctcgtttgaagcttatctattaaatgaccctactttcttatagtttgcttatttggctcggcttttcaagaatgaataccctgtctgaccctatttccactacaacgttacggtttcatttttttaaaaaaaatataattattattcgtaatgaccaaactactctcaaaccctatccattccctccccctctctcgtattccggttgaggtggcggcgcacggaggggacgagccggcacggccactcatggagggaggtagcggctgcggcggagggaccggacccgcggcaacgcgtgtgcggaggaggctgcgggtgcagagaaaggagcggcgacgacggcggtggtggcctctctcccacgtgctggtgacctccggcgcggcacagggcaccattccctccctccatgggcgcgtcgtcaccgctcgtcctttgtgcgctggcctgcttcctccgcacacgtgatgccgctgcccaccctccacacatcgacgagctccttcgccacacagggcgctgcttcctcccttcccgcgccccggcctccgtcttcctctgtttgagccccgccgccgggtcggccgcgacgacgacgacgccgtggcaaagaggatgggtggttgacaaatccaaaattttgttatattttatttatatttttataaaatagagtcaaataagcaagggtagaaggggcaatttttgctccgattaaaactgttacatgctcttaatggaatagggtcagattgtatcttcaattttgagaaaaatggtcaaataagcaaagttgaaagaagatagtcaaattggtagttagtcctcaaaacatggtcaaatgcacaattgccccaaaatcttattattgtgtgtgaggcaaaggtccgattggttggtaactaagagcatcaccaacagattatctataattttctcctaaaaatttggttttgggtttcttaaactaaaaatagaagtgaaaaaactcctccctccaacagatagcctaaattaaatccccaaaacttaaaaagtgggcccttctgttaaactactaacataaaattccgtttttttcttttatgtgcagaaagatcgctatctcccacgctcgggaacggaggagagaggcgggattgcgagattgggagcgacttccgcgcccgcatataaacggagcaaggaatggggagaagggaactccaaaactcgggtaggagagtaggggatctgttggagttgtttttttttttttttgactaaaatccctcaaaattagttttagaaatcatataggtagattgttggtgatgctctaagggtgggttttgatgggaggttttggatggataggacatgacgacccttttttttattgtttattacctctctcctaaaataaatttatttttcacccatctcacacataccaaaagactaaaatactcatattttttttccaatctcaatacaattatttttcactttatctacttccaatataattattctttgttttcacaaatttcaatgcaataattacttaaaaattaaatttattttaagacaaatgagatgagtaaaaaaacttaatatgaataggaggaaataatttatattccaacctttgcttcaaccatactccagttgtaccaaatttcagatctcactgtccatcgctgcccgaagacaaatcgtgtccacggcggaatcacaaagcccccgatcggacggccgataaatcgccggcgatttgatccgacggctggtaaatgctcaagcgcgactcatctccccccaaccttctcaacccacgaggtgggatctcacggcctcatcggcgggcgagatgaacgccttcaggctcgccggggacatgacgcacatcatgagcgtcctcgtcctcctgctcaagatccacaccatcaagtcttgcgctggtgagtgactgatcagccgactggcgcctgcttaagatgcatttttttttactgtattgagtcctggattggttgccagcagctcaagaaaggtagagttctggatcttgggggggaataggggacgctagcacaatgctgtttagtgagggctaagattggtggtgcttgtggatggattctgaggctttagagactggaagtttagagggtttgaggaaattaatcttggctttttggatgcaattggaatggttaagatgtaggtttggtagttgtacatttgaggctggatcctggaggaaatgttggatcttggcttgctctggtaacggcggtggcgttgcataagggcctatgctttttggaagatttcagtgatattgccactccattgttttgctaaaattagagattggtaggttagattctcctattatttttgccttcccccatcttttttctaacaatactgattgattgttagattctctggaaaatttgaggacaatgttgtgttgtctatgttttgtaacgcacttttgtcgacttattgattgttattgtgttaaaaccagagtggtatcatatatggggacctgtcctggtcatttgcatttgtgtttcttaaggatcccatgtacagaaaattttcatgtcctggttcaatcatatctgtccccaaggggccacatgacataaaattttcatatcctggttttttgttgtgaaatgatagatcaggtatatgcggatttatcacatggaacggtaaaggtattgaacttgtcatgtatccattggcatttttttcatttttgctactcaaaactttttatatatgtttcataatttgaaggaactaaacttgtaatagtttgtccattaaagaagcctttttgctggtcactactcactattcagacccgatttaactgcttgcacatcatgggtgtcatgtttgtggttcgtatgtaagaggccctcagaattactgcagtgctgtaccacttttaaattatgctagcgtgtgtcagcatgcggccaagtaatttacgaattgtattcatagaaccagaacattgaatggctaagattatgtgttgctcagaatttaataataacgagttggtgaattccaataatgtggttgctctcataagtgcagcaaataccatcattcctgtaattttcaatttttcccttgtagacacattagattttggaggatgcttgttttgaacaatgtctgtatcactcactcaagaagtatcatgaacataaaatcaatttttaatttcttttttcttgtaggtgtttccttgaaaacacaggagctatatgctcttgttttcgccactcgctacttggacatatttacagactttatatccctatacaatacagtcatgaagatgattttcctgggtagctcattctcaattgtttggtatataaggcgccacaagatggtcgcagatcatatgataaggatcacgatacatttcgacatcaatttcttgttctaccatgttttcttttggccttgcttatacatgagaagttcacttttagggaggtacttcatcaaatcaacttcttgaagttgagaaaatataagcttccaatgataatttatctcagcttttaggtctgaattgatatattcccctttagttttattacttctataagttatgaccaaacttttttggggtttatccgaattaggtgatgtggacgttttccatttatctggaggctgttgcaattcttcctcaacttgtactactacagcgtacacggaacgttgataatttaacagggcaatatgtgttcttcctagggtaagttttgaatatggataccattttcttttgagaaaacacaactttcaatattttctgatccatctctgaagcggttaaaccccaattgttgcttgtgtcttgttgatgttagttgtgctcaaaatatagtccacatttaatcaatgagcacataatctttcatcttaattattctttcaggctcctaagttcaacatagtcgagcactgatcattttgcattatcatgttaagttttttgtttaccctttccaatgatttagctgtttttcttccatggataataagatgcatatgcaacgttatcagttagaaattttcaaatgatgtacaccataatgtattccattgtcatctatttaaataagggcatgtgttgttaaagatatttcagacttgaatgatgtgtctaatgtctactgtttttttagtcaatgagaaacatggtcattggaaatagattcataccaaatatggtttcagtaagacaaaatcctaaaattaatcagcattgtatcaacatggtgactatgttgcaaagtaaccatttttttccaggttcagagaacttctgtggagaacatgcgatgtaacatgaaactgtccccttttgtcattaccgtaatttgtttctccattcatctttttggtcagtttgattgatggaatcaattgtccctatttgtgcttctactccacatgctagtgcttgcaaggattttcttttttgacatttgacttgtatatcatcacattgtccttgttagaggtaaccaggccagaaattcagaaacatgtacacattataagtttacgcagtggactttatccatttcattttcagattctatgcaccattattctccattggaagtcagtatgttctttagttagaaatcttgacgttttcattttcgcattgattgacatgatgcagcgcataccgagcattatacatcctcaactgggcctaccgctacttcactgagccacactatgtgcattggataagtatgtcata

SEQ ID NO: 19515 - DNA, 12770 bp, Oryza sativa
attgacaactcaactaatgattgtaacttttggtgttgtatcatctgaaatgtgggtggcttggcatgtccaaccagaaaaaacaaagatcaggaaaaaaattgttttcatacagttctgagaggtgtgacaatagaacagtgcagtagcatatgttgaaattgtggtgtgctccattatgaggaaaccgcagatgtctatgttgtacatttgaaaatcttgtagacgatacactgtaaattaaagagataattgcccattgcactatggagatgaatattactctgggtgatcagttgtttgtcaagagaaccttgaaacttttaagacagtatatgtgactctttctacagcattgccatgagctgctattgttaaactctttgtcatcattttgatcagcctaaaatttaaatcgtaaaatccaagactttctagagcaatgtgatgtgcatgtttagtttgaagagatcctatagtgacagttcacaaaaatcatatatgcaattgttggagctgtgacttgtaagtagcatccaattttgaaatgttgtttgaataaattcaggactttgttttttgtcacttctgccactttaactttagcttttggaccactaacaaaagaagtataaaagtattttacctttgaaattgctttcgttgtttatgtccagggttgacaaatatgatagtaaatcacttaattattgtggttataggacatagagttggcatgaatttcgaaaccgttcgaggccaaatttattcaaattaaaatccaaatatttggcaaaaattgtttgaattttaccatagccgaacggtaatagttgtaaccaataaaactgctcgggagcgttgttccgtgagtgaacgattttgtgatccttgctttggtcatgtatgatgtatctctggcttatgcgccattaagaaaaaaaacttccaagcaagtttaataatataaccaattactagcttcaaaaaattgaaacattatctatagccacctaatatcccactcatataatagtcagttatagatatatattgcatcattaaaaccaaatccactcatttctcacaaactttattagaggtcgtgctatagctggctacaaatctataatctattttttcttctctttgctctccgctcttctccacataagaacatatgtgatgtattaacttgtgcagcccacttacaccacaaaagaacaaatgtcaacttgtacaacatgcttatatcgccttattgtactcgctataatgagttgtctttagtagttcgtatgaatccaagtcagcatgaactccctaccacaaatatacaaaatagcagcttcataaaagacaaaactacaaaaaatccagcatgtacctttttttttacagccaccaagaaaagatgaacctacccgactctctcaattaacgcatgacccatcaaccaaaacaagggttaagccgaaggagaagggcgtcgctgccccctccccccttcctccaacatgcaacttactactacgtgctattaatatctaacctatctaatcatcaattatgtaaaagaaaatgggtctaacaatatactccctccgtttcatattatattataagtcgtttgacttttttctagtcaaaatttattaagtttgaccaagtttatagaaaaattaagtaacatataaaatatcaaattagtttaattaaatctaccattgaaatattttgataatatatttgttttgtattgaaatactattatattttttagaaacttggtcaaacttgaagaagtttgactagaaaaaaattgtcaaacgaattataatatgaaacggagggagacatcactatgtggctaatatttcaatttcaaatctctgaaatactagcacttgtaatttctttgttcattttgtctttttttgtctatttatttgtctatttatctagatttttagctcagatgattttatcatcgtttataatttatttgctcattgcttataaagctgaattgaaataaataaatatgttacaaattatagctacatgataagcctatatattatattatcattttttatgttgatatgatatattacctatgaaaaatcttaaaatttgtgtatatttttatactactttttttattgtaatcacttattaagttgaaccccctcatactgagatcctggcttcaccattgaacctaaacacatcatttaatttcatatcaacccatcgtccaatgaaacctaattcttggcctcattggattaactccatccatcctgtcccaagttagtactacttaccaccctttatcagttgtgagaaacctcaatggtcacggtttcccttctcaataaaatcatatatgcaattttgtttgagcaaagttttgttgttcgtgtctaggattaacaaatatgatagtaaatcacttaattattgtggttatatggcttaggctgtgttcgggaggaggtgttgggaacttctctccttggcacggaaaacgagatagccgattagctcctgattaattaagtattagctaaaaattgaaaaatagattaatatgatattttaaagcaactttcctatagatattcttttgttaaaaaacatattgtttaatagttcaagaagcgtgcatgtgtaaaacaagagagtaaaagatgagaacttgtagttctgaagacagccttggagttggtagaaacagttacataaaagtttattcaaatcaaaattaaaatctttagcataatatgattgaatcttatcatgatcaaacggtaataattattttccaaaataatgctcaagagtgttgtcacatgaccgattggttttatacacatgtcttttgcttatgtgacattaaaagaaatgagttgcctttagtagcatcgtaccaatccaagtcaggatgaactccgtaccacaaagtgacaaaaatagcagctccatataaaaaaaaaggcaacaaatcggtgggtactctttcggacagccacccataaaagatgatcttattcttattactccactatctcaattaacgtgtgacccatcaacccgaccgcatcgcataaactcatatcaatatccactccctagttctcggccttatcagattaactccaaacatatccatcgatcaatccatcctcctccaagtttagcatagtatttaccactgcccccacaccccctccatccatagcatcaaaatccaaccctagccagtcacaccccttccaaaacaagaaataaacacaccccaaacacgcagttgacaaaatcaacactccctccaacaagagattcaataatttaacactcatttaaaatgataatcgattattcaacatcctagcccgctttcattcacctaaatggtcccacgtatcatcgtcacaagcgccaattaaagcaaaattgaccacgaaaaaaatgtgtcaaatttctcatctgtgtcacccaaggccgtgtgaaaaatctcggattgggttatttaagggctaagttctctatttgataggctaagtttctaatttaaaaaggttacatatatccggttagatataaagaccggataaaaatacccttctctaaaaaaagcctaggtgaaaaatggtgtgggttaagctggaccttcgccagtttggcaccatggctgtggctgggctgggattggaatttggaaaggccatcaaggccttccttactttaaaaaaaaaaacgtgtagagagagaaaatcagacggatgagggggagagagggagagagagagtagcggtttgagcacgcggcggcacggagacccacgagagagagagagagagaaggtggcaacggccctctcgcccggaaaccagcccacccacaccaacacactcacactgccctgccctatcgcaatttccatttccatctctcctcctctcctcctccacctcgtcctacaaatgcggcgcaggacgagagtcagagcggagtagtagcagacgaacacgacgacatcggagcgctcttgtctcctcctcgtttcttctgctcccgagtcaagcagatcctccaagcccagcgagggggcgggcgcgccgccgctgccgttgttgttgtcggccgcagcgcagacatggacccgtccggcggcggcggcggagtcggagtcggaggcatcggcggcggtgaacaaatgtgggtgcggggtttacgtcttcgggggttgctttgcggggctggtttggtttggtcgtcgagacggcggccatggggaggggggggaactggaatccgcgagtgtttatcgcctccttttgggggatggagaagtcttgtggttgtggcgatttggtgtttagagttttggtagatttggggggggggggggtgatcgcctgatcgggtctgggtgattcgtgtatgttagtgtgtgtgtgtttcttttttttaattttaatatcacttgctgaatatgttattcgtatgacgatttagttgctcttgttggaaatggcttaaaaaccgtgggtatttaggttgatgcggctgggaaatgctaggatactaggaggaggaggacatgactgtccttagatttgtgtgttagattggaaatgtttcacttcaatttttgggctcaaggggtttgggaataaatggacacatactgtctttgcaatgccgtgtcggtgataatcaattccggtttaggagtctgccgtagcacgaagtgataacatttattatgatctatgtagaaactataaggaagaactcattatgattcaagctgtatcctgtttcgactgtccgcggaactgattactgtctaaaaatggcacgctatttcgccgtgttactttgattgcatgtctgatcttgtaatgcttactgcagtctttgggactggcaagcggcggagcagtgcgagagcaatgctgcaaatcatggtacatcactcaaaatccataaatcataatagcatctttacacagattcggagcatctgtttcgagtttccacttactatttgattgtttctttttacattagatgtttctagattcatgtgggactgcctcaatcaagatgatgatgacctactgggattgctgggcaatcaaactcctctaagagattgtcgcggcttctttgatattgatggtaggtagtttcttgttcttaccaccatcaattgttattcctctggaatgtttgcttaaatggagatgttactcgagtcagatttcacctgcaaggagacgttggacctagaggaatctcgggaatcaaagcgccgccgcatattggagtacccttctgagtctaatcaatcagaagatggaaatcgtgaaataagttctaccttgggcacatctgaggtaattcactagcacctagatatcttccaagttagtgcattgtgctcttgtttacacttcttacttcttttcctgatccatgtcttaggtatcagaaatttcattgctttgcaccgatgaaccgcagagcttcaattgggattcacagaacaattcaaataattttggtttgtcttttgtttttcatattatattgtttgacaacttaaattgctatgccttttttgttagctaactgaaaatagtggcatctgatacaatagattctttgtcaactggagcattctaccaaccatcaaatagtcattcgaaaaattgctctgatgaaaatcaaatgcatttcaggcatgaccaaatgttagctactctctgttcccacagaaaacagtatttactttatcattatatttcaatgatgacatgttaagcttggattcatttttaggcattctagccaggagagcgttacatataccaatgatcaaagtggtatttcaggtcagtgcaaagtgtacgtctacagcgttgtttaagtcaaattttcatttgtttttaaaacatggcttgtaatctatgcatgagcatcccatctcatcactgtttgtccttacgtccccatgcgagatatctgtagagaacatttttgtttgctgttttccttcgatgcaatgccatgttttcagtcactgcaaaattctatactgattgacggacatacagtttgagtgcctcgctgaaactaagattttgtagttttggcaggaaacttaccagttctttctatctataacaggaacaactgagaatgattcagtgacagaaagtcttctaatgcaggagactaggaagctttctacacttaaagtatctaaaggtattttcagtttgacagtatcttatcatgtcatcaacatttcttactttgagttttgtctatgctgatcatttgtctctgctgctatactaggaacctcactggttaaggcgaagcagaatttaactacaactatagcatacccttttaccctcatcaaaccatcctgggaggaaggagatgtcatcactctaaaggatataaatcagcgaatccgtgctcctccgaagaaggctccagaaaccctagggacttcagccttctctggcaagccagtcattggcaagacaaggatcagaactgacgggggcagaggcagcatcacgatactaagaacaaaaggttgagagtccaaacaacaagtttctcagccattacctggattgctttcagcaatttgatctccacagctctccagtttttttttttttggccatggatttggtatttaggatgactatcaatggctaactcttcaaagatttaccattcatcctgtgtacattagcggcatgcggctaatgttaaatatatgagagttttgtgttcagaaaccatgtccctctactcatctaacttatgttggatgttgttcagggttttctcccatttttctgaatagttgtccattctcaaatggacgcgtgtaatcgggaaacatttgattattttgttgcttacaatatatagcacagatacaggtgagtttatatacgattgcatccagtactgcattttgtatacatcctggtaacaagaagaatatgagatatccgaattcctactattgtatcagattcctctcattccttgacgcagcggtcaatcggatggaacatgaaacacatcttaaattttgatctcctgtagcggcactatgatccaagtgaaattcttggcacagaagctagtagttgatgattgtcatcatctcttactcggatagagaacccagtagttgatgattgtcatctcttactcggatagagaaccaggagttttcgtgaaggtgtcgacattctaggatagagagggcagaagaactcgaacatcggcctctcctctataaattattaagtaaataccgatcttgaattgagttctgatggataggttgcaatggcgaaataacaatagataatacttgctatctcttgcaagatcatgagtctatgatcatgtcatcgtttataaatgacgctagttttatcgaacacgcaagaaaaaaaggtttaaacataagatccccactactgtggtgccaaaaaaaaaagaaaggagaaaaccataagaatactcaagattaaagaggacgcgaccacagacaccaaaacaactctagccacccgctacctctagctaagccaagcccctaactcttgctatatactaaaaaaaaccctttctctgaaatccaactacacgcaaggagaggattcgttaaacacacaatttttttgtgtatgcttccaaagtaatgagaaaattcaggccatgcttgagcacctttggaataatagaattgacctttatccaccatttacaaaaataactatcctttggtcgtgatggaagatctgcacaaccataacggctaaagaggagataccaaacttgtcatgagaagacaacctatcaaaatttgctgaatggccttctcctcttgatcacacatcgaccctatttgcgagatttgatagtgtggcatccttttggaccgaaaattgataagtagacttattaggaggttgatttctaattcaatataaattgaaggatatataatcgaacttcacacattttatttttataagtcattgtattttttaaaacaatatttcagattaatcatacaattagtgtttttaaaaaataaattccagtataaatgaaaccatataatataattagtttagaaaaatcataaattctagtataaatgaaatgatacaagcaaaatataataattaacaaataactatttttctcacaataactaatttcctacaccatatacaacgttttctctttttttatcatcacaaattgttttcttccttttttttacaccaattgttttttttctagtagatggcaatccggtgctccttgtctgaactctctcaatctcaacttctcaagtggcaactcttaacccccttcaggtgtcaaaaaaaaaaaaaaaacctctcaagtctcaaccccttcaatcccagccgccaattttaggatccaacggctcctagatagcgtacggcaccacccgtaaaccgtgaacaaacccagcccgggacacaatctgcgccgcacatcaaaatcgggctcgagtcgacacacgagcgaatctgacctaaaccctagctcgcctcctcctcctcctcctcgccgccgccgccgccgccgtcgccgtcgagcaccacccgagcagccatggcgaatcgtaagcgagacgaagaaccgccctaccctctccctctcttgtgtcctgctccgcttccgactctgggggcgaatgggtggtttgtttaattggttcggtttggtttggtttgcagcggcagcagcagcagggccgtcggggggagcgaggtcgttcctgcaggccgtgtcgaccgtcaccgaggaggcgccgtcgccgctccgcgtcgtgcagatggagggcctggtgattatttttcttctcccctcccgttttgtcccttggtagaattcgaagcgcgtccgctatgctagcatgtttgttttgggcgacttgcgcttgggatgaagtaaggataagctcttgatttcgggaggatctgtttgtgtgatgaaacgcccgcagtgtgcgatttctcttcacccaaatgtgttgtttagctctttagatcgaggtaattacatgctttgccgtgtaattagatcggggtcctttggctctggaactggagggatttggtgaggttattacgaatatagttgtcccttttacaatgttttcttctacacatgatttgaaagtgatcggaagacttcctatcttaattaattacattgaatgacctccttcggtcattccggcaaaaaagaaagtgatcatctgcattgtgattgttgagaagaagtgtaggagaaactagggagagcagagggtgggagaaaattcttgcttgattcgcagcgcaataggagcctccaagagtgctctagtggagcacaaccatattgcacgacacacatgttgcttttagtcatgtacttatgttgaccatactctactagatcaaatttgctgcacctttacattggatgattttctgagggccagccgcatttttcttttgccctgtgtttgaataggcatgtttaggtatagtactcttatatttccactcacaaatttctctctctctctctctcaatcatgcaggctgtcctgaagatcattaagcactgtgaggagtttgcacctgctctagttacaggccaactgcttggtttggatgttggcagtgttctggaagtaacgaactgttttcctttcccagtgagtatttaacatctataacatatttcttttaatatgacttgagtattcttgtggttgtttagtttatagattaacagctactttaatatttgaccacagatgagagaagatgatgaagaggcagatgcagatggtgcaaattatcagcttgagatgatgaggtgcttgagggaggttaatgttgacaataacactgttggatggtatgataagacatttcattcaatacctattgctgttgttccatatgataattaacctctgccgcgtgcttctgcgagcagcctttgagtttacacgtgttacaactctgtttttgtagtctttgatcctctgcctttaatttatatgtgcataaatagttcattcgtatttctttgttctgaccgtttgttcattattatatttttggaatgttgctaacatctttggctgtagttaataatgcaggcaaactaaattgagatatgctcatttgtcaacatagtttagtgatgctgttgagtatgtgacactgaaaagtgagaacaaaataaatgtggaattttgcctctatgcatacatgtatagaaatgttgtttgtgtcatgtattcaccttgtctctgtttaaaatcaatggtgctctgcttgtttgcttggactgattattttatctaatcctcttttggaaacacttcatgagagtgttaaatttcttattgcatgaagcaaccaaacatcatcaagcttctggtagcaacctttagttatcgtgtatgtggttaacattgaccttaaagtggctggttttgtgcttactcgatgtattttccagtcttttgcagttgcattaacgacatattaacctgtgttgcattctagctgtttcatgcctcgttcaaaatatttgctatatttttaactccaataatgactaattatccaacgtatttcatcttgagcttaagtgatgtgtcctattatttgtattatttatgttgtggttttaagttttaacctccattcttgttgtacttgtttaacagattttgcacatacaactatcataatcatccaacaaagctgtagcctgttctgcttcatgttttgacccttttttttcccatgcctgtgtacaggtatcaatcttgcttgcttggatcttttcagactgtggaactgattgaaacgtttatgaactatcaggtatgcaaaaataaataaggtgcaattgatcaatctttccattgctgttgggttatcctctcccagctttgttgacctactgcagtaatagttttaggccaacttgcgcattaattagctcaaaatagctagcacagcatgaacaaacaaataggacagcaaacagtgcacctaattagcttctctaattagcatgtaacctattttgacacgaatcaaggttaagtctctgtatgcattacaatatctaacctgtttgtacatccaatgtagtatacgcagcagtacatgcatatcatatatcaaatatctatgagttggtcataagagttgcgtaattttctgcgatgttgcatgcagaacataacatttgcatgttacaggagaatatccggagatgtgtgtgcatcgtttatgacccatctaggtcaaatcagggggttctagctctcaaggccttgaaactcacagattcattcatggatctttaccgtaacaatggtttaactggagagaagtacggtttcttttatgtaacccagtccttctaatagtttttaaagattgcatatgcaaatgactacatgtttttacaggttaagagagaagaaattgtcatgggttgatatttttgaggagataccggtatgtacttagttatctttcatgtcaatatgtacaatttttgtgtcctgatgtatcctgtcttattgtctcatagattaaagtttccaactctgcacttgtcagtgccttcatgacggagctggaacctgaatcacctgtttcacaggtttagagttaacttgtgaattttttttatgtggcatctgttgtcatcatcctttagcagctacctaggatttatatttatcttcttgttacagtgtgattttgaccgccttaaattgtcaactgctccattcatggaaaggaacttggaatttctgattggctgcatggatgatctttcatcagagcagaacaaggttattttttgaaatgaacttttgcataaactatctgatgttactgtgacaaatatattttatatgactgggtgttgtccttctggtgtagttccaatattactatcgcaatgtctcaagacagcagtcacagcagcaggcatggctccaaaagagaaggtcaaaacaactgcttgtccattgtgatattgatcagttcattagctcttggaatgtgccaactttttaaacaagcgcactcttcctctcggaaataagcaaagcaggtgctgctatgaatatggcaatttacgtctcatattttttttgctactgacatgctgcaggcaagagaatatggcaagaaaagctgctggagaggagccattgccagaagaagacccatccaatcccattttcaagccgattcctgagccgtcacgtttggagggttatcttgtaaccaatcagatctccagttactgcaaccatattaatgggtatggattctcgcaagtttatgcctattctctaggagttccataatgcctgtgtcttttcgtcaggaatgaaccattagatgtagaaattttactgtgattattatggtcgtacagatgcatgtctcatgattgaactagtaacatgcaaaagtattaaatatacaatgttgttagcatgtagtggtgtagtctgatacacaaaatgttcctttttgaatgatccatttaattatggcaatggttacggtgaagtaaatatggcaaaatttctcttctggctcttgtttccgtcgta

SEQ ID NO: 19516 - DNA, 2060 bp, Oryza sativa
ttgaaggagaaggagaagaagctgctacgcaaagagaaaacccgtctgcgcaatcttgttgcaccggtagttgcagagagccacttttctctgtcagaagatgatgtcgaaacagcatgctcgtcacttgatatggaacgactgaagagctctgtgatagcatggagaacaaagatacaacagaaaaggccagattactcagtggtgctctgagcaaagaaggctcgtctggtacttcaaatgaaggaaagaaaattcaagcaaacggcgtggatggttccaaagcaaaatccacctcttcaggtgagaaggtcacgcaaggcaatacactaagcaactatgagaagaaagaagagaaaccatggggaagggaagagatcgagttgcttaggaaagcaatacaaaagtatccaaagggaacctcccggaggtgggaggttgtctctgagtttattggaactggaagatctgttgaagaaattctgaaggctacaaagactgttcttttgcagaaaccggactctaccaaagcttttgactctttccttgagaaacgcaagccagcaccgtccattgcatcacctctttctgtaagaactgaaacagttggtttgcctactgagaaagcagctggaaatgcatcatccaaagcgcctgcacaacatgcaagcagtaaaacatccgacgagaaagctgctgctcctgctcctgctcctgtatcaaatggaacaccttctggaacagcagatccagaggcttggtcagaggcgcaagtgctggctcttgtacaagctttgaaggcatttcctaaggatgcaagccaaagatgggagcgtgtggctgccgctgtcccaggtaaaaccatggtgcagtgcaagaaaaaggttgcagagatgcaaaagaatttccggagcaagaaaagcgctgagtagaacaacatagtaccggcacaagtactttttgtggctagtggctgacaaaagcttctgtttgaacatcagtatcccttatatgttagagaatcatagctgcgtactcctgatgaattttgccagcatatcacggcctccagtggtagcaataattttggtttggagctctgtgagaactcgcattgggccttaaccggtgtcggcattctgcttacacaagttttttggtctaccaagaaagaagctgatctgctgttgttgatagctaatgttttggccttccccaacattaggtggactttctgctgacccttgggttgtttatgttcgagagccccttgaagagtattatttccttgcattggtggagtgatatgatctggtctggcacgacacagggagtgtagagaacagcatcggcatttatttatcaacttataagatagaaatatttgttacaacttgagaacttgctatatcaagaaaccatatttttgcctaatcagattcattattcatgtctccttgttaagttataacttgtaatgccagtggtaaatgcccttttgtgttgctcttgcgagaaaatgatagtagttcgtttcctgaaacagcactccacttgtttgatataatccctccgttttttaatatatgacgccgttgacttttgttacaacctttgactgttcctcttattcaaaaattttgtacaaattttaaaaatattagtcatgcttaaagttcatttagtgataaattaaaccatgacaaaagaaaatatatttatttaaatattttgaataagacgaatggtcaaacatgtgagaaaaaaatcaatgatgtcatctatttaaaaaacggaggtagtatatctaacttgccctctccttctggtaaactttttttgttattattcttatcactcggccccgttcggttgtaacgtgataaagaagctggaaactctctccttttttttaaaacttttttgttactattcttatcactcggccccgttcggttgtaatgtgatgaagattacgtgttagacacataaaaggagaaaacgagaaaactattagcggatgatatcattaattgatttttaattattttatattaaaa

SEQ ID NO: 19517 - DNA, 2111 bp, Oryza sativa
  unsure (1)..(2111): unsure at all n locations
aatcatttacaaacatatttgaacattgcaaactaacatataagaacaaacatgagaaacaaaagataatcaatcagtagggaataggccctcgcagtttgttagcgatatgtaagaggtggtcaatgtttgtgggtggatagctctggagaagctttaggtttgctgtgaaatccccggccaagagccgccttcgaacaagaattagcatagcacaacagattcgaagtaaggtggcctgcaataagataataagagttttatagtgcatttcaaaaaattctcagatggcatggaactaggaatggcagtttctaacctgaggtccctcaggatcacctaacagtgcatcccatatatggatgcagtcgcgaaacttgaattcctgcgtcaatagcaaggtgatccatctgaatgcgtaaaactgtggattaacctggaatatacaaagcattagagtaggagcagaaatacactgtaaaaatgtaacaagaaaaaagttattgaaatgcataccttggtcacaacctctaaatgccgccagagctcttcatcgtgccttttcaggagctgggataacttgctgattgtggagcgtatgcccaccacactgttgtcaagctgtttgcaaaagttatcccgaaatccactaagcagctcaacgaaacagaaaaatgcatccggctctgctgactcctgtttacataagaaattaaaaggtgtatgggcacagagttagccgatgcttgtattctatagataacatcattgtttctctccggtcatcacccatctagcagccatacttgcataataaaaaataaggtacatggtaaagctatctaacaatagtagtgaaatgtttctactttggtaacttcagaagaaaaaagaatgaataatagtcacttaggcagtataccaaagtcagataaagtacatgatacatggttccaacaggcagggaaccacttaccagtgaatgaattcaggaaatctgtatagaagaaatctaccacatatatttaagccttaaagccaaggaacttacatacgaaccaacgttcaacaattttaagcaaatagcgtcatgggaaaaaaaaacacttacagcattattttcttctggatcattcttgaaaacatagtagagtggtgccaaaacttcattcattccttgtacatatcttatacccggatttaattttgcaaatatggtaagtatacgctttagcgactcctgaagacaaacatatatcacatttagcctaactggacattacaaaagacaaaaagaactggcatcatatcagataataaatgcttacttgattagacaaggcatcagaagaatccccattgaaaaattgcatctcaggatgagtacgcttaacatctctatcaatctgctctatagtttcagattcctgaagtatcaaataacagtgtatatttttagtagctcaaacactatactgtacaatatattcattacaaaaattcaacgaagagctgcaaagggaccaagggagatctctcaatatcaaggagttgaaagttctaccatcaaattgaaccaaagcaaaatacagacttaacatgtggcagtacataaatttacgatttagtgaacattacctggaaaaattggttccagacactagttttcccgaggcttagaggatgttcatcatggacaatttctgcccttggaagcactccagttccttcagaattatgtctgttccctttggatatagtcatttcctccattcttcgagtaacttctgactgaccataaccaaaacatattattatgtatctttcttaaaaggagaaaactaccaaatgaaattgttaagatgtaaaacaagttggtaccacaataaaatactttagcatatccnnnnnnnnnnnnnnnnnnnnnnnaattactagttttaaatcagggcacatagtttctgacttgtatgtccatctctcataatgctaacaattgctatcaatacagacaatgtaaccacataccagccaatggttcagaactgaaatcatatatggataaagaacttacaggattaactagaagctcgtctttgaaagccactgta

SEQ ID NO: 19518 - DNA, 728 bp, Oryza sativa
agctccagtgggcattcaaccaggtggagtggccgacgaggaggagactgtcgcagccattgtggatgaaatggagagggaggattctgacacgagcgtgtagaggaaggtgattcgtcagatgaggagacggatattaatccagcagaataggctagtcaggatttttctgggctgatcgtctctgaagaggatagtgtgagatgggagtacaaagaaaatgaggttattcagggagcgatttatagtagaacagaagatatgaaggaggcggtaaaacattttgcagtgtcacttcatagagagttttgggttgccaagtccaaccggtcgcaatatgaagttcggtgtgttaaggaaaaagatggttgtccctggagagtgcacgcgtataaggggaaatggaaggattattggacaatgtcagtcattaccaagcatacatgttttctacctgttgttcagaaataccacaggaacattacatgtgcatttgtcgcatctgagatgtatgcgcatgtcatcgataatctcacatacgaaccaaggtcaataatccgacacatcgaggagacatacaagtatactattagctatgccaaggcctggagggccaaacagaaaataatagagatgagatttggaacatacgaagcctcgtatgacaatttgccacgtctgcttggtgttatcgaggaaagaaaccctgggagctcttacgaagtgaa

SEQ ID NO: 19519 - DNA, 4446 bp, Oryza sativa
caatgagctttggaagagattagatgagttgacagccaaatgcagtgatcagcgtgcagcggctccatcgactgccgttgatgacccttctcaagctcttggacctctcccaacggatagtccaactttggttgaagaactggattggagattcgaaaattttctcagtggattctgcatgaaccaaaagagaaatgggccaaggtgtatgacaccggtggtgctagatatggaataatgacaacaaatttggcagaagtttacaactgggtgatgcgcggtgtccgtggactgccactagttggcatagtggagttcattttacatgggacatgcaggtattttagggatcggttccaggcagttcttccctctatgccgaacaacagcattttgtttggaactttcatgcagaaaaagctagaggagttgcgtaaaaaggccatgaaacatcgagctctagtgcaaggtacccaacaacataggttcgagatactatgtcaagataaggcaggcaggggtatctaccgcaagagagtgaagcaggagtgtgttctcaaagccgacagcatatatcattgctcttgttcaaagccgaagctgctccacaggccatgcacccatgtcattgctgccgcagcggagtgtggcataccagatgcagtatatgtgtcgcagtactttagtaagcaagcaatatatcatacatggagcggcgagatttacgggttcggcatagctggggagtttatagagactaacgatgaagtactcaatattcctgacccatcaaagctccgaggcaaggctggaaggaggaggactcgtcgcatccgcaacaatatggacgagtcggaggctggcagggtgaagcgttgcagcaaatgcgatgaacgtgggcacacctacaagcattgtcctaaagacaaggagaaaccaagtgcggcggaggcaggactatcaggatcagcagcagatggagctcgccctatgggtgaaggcactacctccactcgaccacgtcctaggcgtcgtcgtgccacgtctggctacgtggtgtagttgcacgtcatcgttatgtaccattagtaacgtttgctttatttaaataggctgtactcttgttgtacgtaattattctcatgatttttttactatttcattaatttgcgagtcatcttttgttttacattactactttttgaattgttctaacacgaaacactatatttttcagagatggcacgtcaggatacacctcaactgttggatccggcgatagatctccgacaccggtctcaccttactgcggtgcagggggctcagcttgggacgttccgggcacagacatgaggtgagctactcacggttcacgactccttcgtcgagaggtacgaacagtatattactataaattagttgcgctgtaatcttttttgtaatgacatattaatttcttattgcaggctgcgtgaggccggcctcctaccgatgtgtcggctggtggaggctgccgccggccacgtggacccggccagacgatggactatggacaggtccctcctagcagctttggttgaccgatggaggcctgagacacacacttttcacttgccgtgcggtgaggtagcccctaccctacaggacgtatcgtacttgttggggctaccgctcgcgggagacgctgttgggccagtgaccacggctgcggactggcaggacgatctgatggcacgtttcgcactagtacagcgcgcaccgcacctcccgctccagccgttggcacaccaccgcaacaccggacctacgaagaggtggctgcttcagttcaccgtgagtgtttttgtaccgaaatgacaagcgtactacatatttattccacatgttaaggttcctaacattttaactaacgcttgcaggtcgatcagctacaggcggaggccgacgagtactcctacagccgctgtttggaggcgtacttgctctggctttttggctaggtgatgttctgtggcggtcaggggcacgcggtcgacaagggactcgtgcactacgccaggagcatcgccgacgccgcggtaggcgaggtgcctcagtggagctggggttccgcgttgttggcggctctgtaccgtggactttgtgaggcttgcacgaagacggatcccagcgcgacctttggtgggtgccctctctttctttctatctgggcagctgagaggattgcgatcggccgcccggaggtggaccagcacgcgtacgaggagtcactgtacgaggagcgaccagaggtcgactaccctacgatgggtactctgtggtgccgtcgtcaggtacgttgcatcgatcttctagctttgttaagtacgcaggccgcctacttctcccacgctgcagggtcagcgtctcagccagctgcgtcgacctcgcactcagcgcaattccagcagtacaccggggcttcctcacaggcagccggcacgtcgagtcagggtccaccactggaccatgctgggacctcgtcggaccgcttgctgtcttccaccgtgctcttcgacatcactgacttcgacttcgcttcaggctcggcagaggacgtcatcggcccctcacagctgggaggcgcaccgccggtgcagacgcaggaccaggcgcaggccactcctccgccagacactcgtgctacccgtgctgtgccaccggatcgtttcacctactcccaggaccacgtgcgagcacaggccggaggaccaagcgtggtcgcggcgcggggcagggccagtagagcagtcttctctttgtttatttgcttcactttccagtactgtatgcttgtgtaatgactacgttgttgttatatgtgcacgatatctttcggcgcatgcacgatacctttcggcgcatgcacgactactttctcccacaccgatgcagcctcctttattcgcgtgcgatacgagtatttgcccgccatttgccgcatacgaccaacgtaactttcggcgctgatcaagcatgcaactttcggcgccaatcaggcgtacccaccatgccccaccacgttcacatgtcaaggatatcactcaagtttttgcgcatatataagtcgccttaacgagtgaggcctcacaatctttcagaactcagtcacattcagtactctcttccccacttcttcattacaaatcctaccggctttcgtcaatggctagacgccggggtgttgaggatccaaactggcgcagcgatccttgtgtatacctactaccaccttggtgccagcgtcctctctgcctatgcggtgatcgatgccaactaatggcttcgaggaatcctgatatttgaggaaggcgcttttttaggtgccctaactgtgaccgtgaggtattttattatctgcaaatgcttattcattccgtatgggcaatcgctttattcttcgtaacactactctatttggcagacccgcactacggtttgcgcatacatcgagtgggtcgatacagaaaatcccgttctcgacctaaccacttgtttacaagaaggtcgctggtatttcgcatccgaaagtactgagcaatacttaaagagaaaagcggcttatgaacgacaatgtcgtgaacaacagagcgactggagggtgctaactacggcactccctccatgggaagcccgtccaagatgcaggtgtggtgatcgttgtcaggttcttcgttccataaatcctacaacattgggtcgaaggttctttatttgtccaaatattcttgacgacgatttcatggtaagaatattttgattacatgaatccttattttctcacaacatttactaactttgctcgctttacatctattctttcctcccaggaaccaccaaggagatgtcaatacagagaatgaatagacaccagaagggttctaactccacctagccgtgttgtgcagcttgaactaccagagcaatacagggttactaaagcgcggtttgagagaggagagggatcctcacgtaggggttagctattatcggacaacttggcatattgaaatttctactgtcatgcttccttgtcccattactacatcgtcgttgtgttcaactattgcactacctccctcctagttcgaatctaatatcatctatgtaaccgcaatcgaaattgttgtatcatgttcaaattgtactactatttcttcatgttatataattctccttgtttaagtccatataatgtttctacgaccgagactgcgataggcctatattaattatccgagtactaatacgtcgaataaggtacaaaataatacctcacttaacatatgaaattgcgcaacaaccaacttcaatacatttttataacaatattaacaagttttaccaaaaaatacttctttattttttattaacattacatagaaaaatattttggccgtacttttt

SEQ ID NO: 19520 - DNA, 5334 bp, Oryza sativa
atgcaaaaagtacggccgcaagctctgagggggcggccaaattgcaattagccccttgccgccttctgtatgggcggcaagggcctaatcgtaattttggccgacggcggcagacggcgcggtcgacccaccgtctgccacgtcagcttgccgccccaatggtgggtggcagggtctatttttgcaatttttctcgccgatagattatttctgtaaatattaaaaaaaaaatctaaaaacgaaaaaaattctatcctatttgagggagaagctacagtgtctaatagaatctcagctcccttaaaaagttcagattgtcattacgagaatatgtaggtgtagagtccagaaaataaattacaagccaaaaacaaaaaaaaatctttcatggtttttagaagctgactactaacgagtagattctcaaaatcttaaactccccacaaacaaggcttacgaaaagtgacacatcctgctactcagcagcggagccagggccccggcgaccctgggcagctgcccgggctccgccggctgcatgcaaccgtacctcattagattaaacataattaccttgttgatcatcttccttaatcaccttatcaattgaagcggcaacagtatatactccctccatattgtaatatatgacaccattgactttttgaccaatgtttgatcattcgtcctatttaaaaatttatataattataatttattttattatgacttgatttatcatcaaatatcatttaagcatggcatagatatttttatatttgcacaaaaaaattgaataagaagaatagtcaaacgttggtcaaaaaatcaacggcatcatacattaaaatacatagggagtatacagtatacatacttaactaacggcttagcgaaaaatagcaaagcaaatgttcactctaaaatgatctatggatttgtatagacttgtgtatactatatactatatttgttgaacttgcccaggcttacaaaattttttggatccgccactgttgctactacaaatctaaacaatatgttcatatttacagcactaggatatactaagttagtttattttaaaacagatgaaataacttttaacaaatacccatggtatctcttaaataaaaaaacaaatggaatccaatgaatccacggtaaaagtgttatctcttgcgaataatcgtcagtttatgttgtttagaaaatattaatgataagcgtagaaatttcttttaagttgccttattgttcaaatttttttttaattgcttgcactatgccagatcaacccatctttgatgcctacctatgacggatcaaaatgtatcatcatggatgatatcatctctgatgggttaaagtaaatcctggcgtagatgaggctcaagaaaatgccctgttacagtaaataactcatctatgacggatctatataaggacccgatacataacgtttctaacgagctcacatatagggccgtcatatatgacctattactcgtggtgggtgttgagttttcacccgtcacgagtgggatacttcaccttaaacgtgttcaaatcttataccgttgatggtgattaaaaaaaacccacccccaccctaggggcccgctagcctgctcgccccttctcctcccctcatcttctctctcttatatcttcctccgccagcgcacccatccctcccgcctgatcgccacccgccaccctccctcccgacccctggctgtcgcggccttcttcccatgattgccgtccaccggatctagcctccacgaacgttgtcatctccttcgcccactgttggtggtttgctcgtctcgtcagccccgagctccttggcgccaggtccggtctccatgtggttggggaccaacggatctagacgcctccatgcatgctccgcttgtcgccttcttcgccctctgtcccaaatcgtcggccaccacctcatccagatctgctcaagcgccgacaacccgccttagcacctttgacaacccgcatcagcaccttataacttataagtagtgggagaaggtgctaaggcgggtcgtcggtgctcgagcggatccgtatgaggcagcggttgacgatcttgggacagatcaacgagaatagaacacgaataaaaaactttatcgagtagtggtttctcatcattgtcaagctcgacgccagaaactgtcattctcttataaggtgcgctaaaatttaaattttaaaactatttttcataaaattttattttaaggattggtttttaaatcattaagaacacatatataaaaagtttacctataaattattatttctactaataaatggtacgacttataagagcaagtttaatagtatagtcaactattagctccaaatcatctatagtcaatttaatatccaattcatacaatagttacctataacatatactccctccatttctaaatatttgacgtcgttgacttttttaaacatgtttgatcattcattttattaaaaaaaatcaagtaattattaattattttcctatcatttgattcattgttaaatatacttttatgtacatatatagttttatatatttcacaaaagtttttgaataatacgactggttaaagatgtgctaaaaattcaacgatgtcaaatatttagaaacggaacgagtagtatacaattaatacctgatcctacttgtcatacacatatttatcttatagctcgttactcttctctctcatattttatcttctcgaaatatatttatagctaatttatagtccgctattgtacccgctctaattagcgtcaggcgaagcttctcaacagaaaagccaagcaaacgtttcgggctacgttcacctgtgatcagaccggcccaaacaatgatgggccgagccaggccggggccgggccgggttcccataaatatttaatgctacggttgaaaatggctgtgccacagacaggtaggtcccacgggcacggccacatccccctccccccttcttccatcctcgcatcataaaaatccatattcttctccttcttctccctccgcgtcgcattcgcatcacccccccgaaaccctagacccaccaccaccaccaccatccccgagctcgcggagaggcagcgagagcgagaggtagctgctagtaggcgtcgggcgaggagatgtacgcggaccagatctccaccggccggaagcgctccatccacgaccgcatcgacggcgaccagcccgccgcccgcgctggcgccggcgccggcggccggggggcccgtaacccgccgtccaagaggtcagcgcggagcagctccagtctcctcctcctcttccctccctaccgtcctctcctccgcggcatatgctctttgcatctaagtacctcgctctgttccttcgtggctggcgcgctgtgtgtagcttaggaatacgcgtagcgtagttttgatcttgtcgcgaggaatgattgtggcttttaaagcttcggtgtcctcgtttctttgttgtgagaggagctgaatatcaccgtgtttgtggttgaaattgtgctgtgcgtgcccacccttttttacttcctgattgcgtgttgacaatgatcttgttgcgggcgagcggtaccacgcatagtttgtattgataccaattaagtcggtgtaatgcgtgaatttcagttatataggcttttggtatgtttgcacttggagcttctttgtttggaagttaaaagtccaaaattttctcttaccaaaaaaggatttgtgattccacgtggtgtgtacggtagtgtcggcttacagcttacaacaggattttcctgttgttactacttatgacttatgagatgtcctaaccaagccacatcgggtctgctgtccttttttgttgcaaaaagtcttaactttgaactagttatagtaaattgtagtgcttatagaaggaactacaacttttaagtagtcgtttggtttccatggttattagtgaggtattttccagaagacagcggtgcctcccgatgttggaaagtcagcccttgatgtttgatagtttttttccctaacaaaggtgtccgaccatttgttgtgttgatgcttacatcagttctattatcgtgttccaactgatcattgtaggcaaaatttgttgaaactgagccatggtatgtttaatcctgtttataaaaggtgcatgatctttattgtcatgcttatctagaagttagtctttctttattgaatcacataacttttattgtgcacaacactaccattcctgtatgcccatttcacttggctagctaattattaaaaccgtagatccttatattctgtaggcaacggcaaactgatgaaaaatggaagcatgatctttaccgggaagacgatgaaccagcttcaagtaataaaagaaagaagtttttgatgtaccttaaataaagacaggccttttgtattcttatttaattcttatctgcctgtgcattatgttaagaatcaattgatccacgggatttgcgattgaagcttcagaagaaaagctctcagcaaagctttgctggccaaaggggttctggtgtacgtgatctacgtgagatgctttctggaacaatgcacccacagccagtcaatgcggaccctccaaaggcaaagccatcatcagagatcgtgaaagtcacaaggcgtgaaaatgcagatgtaatgcctgtacgtcaaagtaagaaagtaccaaaaccgacgtcatcgaagaagacatctcagccgaaggtaagggttatgtttgttgtaatgggtgccacatgtatatagttttccagtatttagttggatctcattctcagttgtttgcaattagcttgagagactgcttttttggtaactacttttattttgatgtccagaatgaaacttgtagtaatagttttgagaaaatttcttatttaccatataatataactccaatcccttattttccaatggaaaattgatcttccctcgaatgccactagttcattttgtcttcctttatttgccactttcgtcatcttgctgttgactgtagtctgtactgcaccactggggagcggcattattgatatgcgaaaatcttttcttcttcgattagcttcagcaaggcagctaatccctccactgcagctgtttcctcctccttgaatgcatggcgagcacttcccttctgtcaaagcacttgggtaggtgtccttgttggtggtgtcaatttagcctaacttatcaaacaaaaacattcgagttggtggtgccaatttagccaactcaacaaaacaatcgagccat

SEQ ID NO: 19521 - DNA, 1306 bp, Oryza sativa
ttctgacttgtatgtccatctctcataatgctaacaattgctatcaatacagacaatgtaaccacataccagccaatggttcagaactgaaatcatcatatggataaagaacttacaggattaactagaagctcgtctttgaaagcactgtattgggaccgctttttctccagttcatatgcccacagcgcatgatcagtcggcaagtatcccaatagaagctgctaactatcaaacaagtcaaataaatttgtagtgtagcaaacaaggagaaagattaaagatttgtacattgtaagccagtctaaatttagtcacattcatagctatttaacctaaaattcttgcagtgaattccataatatcatttagcttaatcctactacaacagttctcttcatatataaaattatgtcagttgaaattaagttgtgcaatgacatgtaacacaaaaaatactgaaaggctttcagtgtaataatgctctgctcaaatcactaaatgcttgtatacatatttacaaactacaaatcatattctatttgtcaattacgaatcctgatttctcctaaatttattcaactaacaaaaataatgccatgagcagttgtttgtaatcctaatgcacaattatagagcgtatgaaattctaccactggcttcaaagcagtttgctgaaactagtaagaacttatctttatgaatcatggcctcatggcaatcgtatagtttggtccttaaaaactgaatgtatgggaataaaacatcttaagaacctagagaaatccaaacatttcaatgaaacaaaaacttgattagagacccattcacttcagaatagatataactgaaaccgcattccccgaacacactccatgatatctcaaaagaccaaggtaaaaaaaaatgctcctaatccttgcgtgcagcataaaccatgtatcaagtatcaacaccaaaccatatgattgatccgaatcaaatcacgccaaacccccatccatcctaaattccatcatttatgggttgtctacggctttccaaaaaacaaatgaatccaatgcaaggacagcatccatgagctgtgacgaagcgaaatcctagtattcgtaatacccattttactctagcatggtgacacacagtgaagtatgtgaagtaataagagtagtaaaataagagaaggcaagacgattccaccataccttccagacgacggggcgcacgccggcggcgtcgggcacgcctggcacgcgagcctccgcagctcagccagatccaccaccttcctgcccagctgcaattg

SEQ ID NO: 19522 - DNA, 2442 bp, Oryza sativa
ggggaggcgcggaccagatcgggctgttgagccagtcggggacgtgcttccgctgccccgacctcgccgaggccggcgagggcgggtcgccggggttcgcgctggcgccgtcggccatgggcggtggcggtggtggggtttaggcgtttgggaaggaatcagggatgctttgggaaggagatcctcgggatcgaggcggactggacggtggtgggttggacttggatcggtcggtgcggttttctttttttcctttttctattcagtttcaataagtaaacccacccccctcgatttagaggtatttaaatagtatctgtcacttgtaagctccacgtagagaagagaagagagaagaaaagcgggctacagatttgtagccagtcgggctaccgatttatagccaccgcagcaatgggttccaatatattgtttagggactgtctatactgcagtcgcatgttttttgtgtcctatttcagtcagatttctgtaccacacgatttacatctaatagctcacaaaaactgctacaataacatattataaaagtctagatttatttttttagaccaatacaggccaaaaaagcccatctgtcttaaaaaaaattgacaagcccaaaataaagtctaaaaatggtcgctagaaaacagagacaaaggcacatgatcaaacagagcccacagaacaaacatatttagaaagcttgcaatccaagttgatgggcacgtgatgacagctaactattacagatcgggatcacaactaggaccacctctttccgaagagatcacacaacacacgctgcaacaatccagattatactagggagatggagctagaggaagagaaagatcccccaaaacatcaatccaaaatcaagatgaattcagcagagatcaagaagagaaagataggcttaggaaaagatcaaggttcagaaaagaaggaaatgtcaggaaagaatatcaaatatatcaaagaaactggtactaaaggtcaatccaaagaactccaaaaagaagaatcgaagagcagaaagagcacaaaagacaagtccaagaagaacaaaggtgagtgaacagaaaaattctccaaatattacctgcttggttcttttcagaatttgattcttcttttggaatttgtttgatcagatctgtaaagaaaagttaatgaggttagaaatgtagaaactgattagatcttaaaaaaatgaatctgttctaatatgaactaaatagagtcaatctgaaagtaaatctgaccactgtaagtaaattgggcaaatcattgtaactgtcattttagaactgggcaaatcactgaaattttcagaatggtaaatagtatgaatatgttctaatatgaaatcataaagtcaatctgaatgtaatattaatgtttctgcatatatgactcaaatccagcaatagcagaaagaattcacaaggaatacaccaccaaagtgaacaaacatgaatcaagaacaggtataaaatgaagtcaatgaaatagattactaatcataagaagtttacttgcaaactttttttaaaaaaaggaaatgacatcagatatgtacaaaaacacatcaaaactctgcatttcatcagacaagaaattaaattaattttcaattgggatgatttattttcttgcctgatgacatgcagaattaagatttgcttaattgaatttatgtttatcatcatctggcaaaaaagtggattgtccaatgattaatttcttctgtcaatttccaatttgcaaactagttacagtgaacagtataaaaaatacatagaaacgacacctgtaattttagttcaatatcaatgtaactacacgaaatactatacaaaaacaaacaaaagcatgatctaaggcaattttattttcaaattgaaatagtttcaaattcaaaaagcaaagaacagctcatcagaacttcaaacatagaagaaaagcagaaaagaaaacaaataatatcagaaaacaattccaaaggtatgcattctttaaaattcacttttatttttgtttcatttgaaagatttcagaaatcaccaactatcacagagtgatattgtgtatttgcatagtcttaatggttttaacattcagatatttgtatagtaatcaatatacaaacaagtttcagaaatcaccaactatcatagagtgatattgtgtatttgcatgtggtaggagcatattaaaaaaagaacaaataatggtcttaattttgtgatatatgtctagaaatcaatatacaaaatctaatatgaactcaatagagtcaatctgaaagtaaatttgacaactctaagtaaattgggcaaatcactgtaactgtcaatttagaactgggcaaatcattgaaattttcagaatggtgaatattctgaatatgttctaatatgaactcataaagtc

SEQ ID NO: 19523 - DNA, 610 bp, Oryza sativa
tttctgttgtcattgctcacaattaccatagtacaagcaaaaaaaggaatggagaagtgattagagtaacattcaaatgcaatcgacatggaaaagcaaagtcagaatcacaagaagaagaaacagaagagacagtagtagcagagagaaacagtaatgagattaaagccacaagttgtaactgtgcctggtaatttctgagagaaatttgatttggagaattacaagggttaatttagatcacaattataagatgagtccaagagatgaagttagattcttgaagtcacacaaaaatatgacaacagaagagaaaatgctgataaggacactaaaggaatgcaatattcccacaaggcatatgattgtgattttgtcaactttgagaggagggctgacatctttgccttatactaagaaggatgttagtaatgtgagaacttgtataaataaagagacaagtagcaatgatatgatgcaagttcttcaatttttcagaaagaagaaggagaaagatccaaagttcttttatgaatttgatttggatgagaataagaaggtgaccaatttgttttggactgatggaaagccaattgattggtacgagaag

SEQ ID NO: 19524 - DNA, 2474 bp, Oryza sativa
  unsure (1)..(2474): unsure at all n locations
ggctgggtcaatagcgatcaaggggaatggaaaacgatcgagaattgacggaagtgttaaaaatgggaacggggtaaactttgggtgctattaaagtgaaccggtatctttcggtgctataaaaccaaaaacgtgaacttttgatgctatataaccaattttgcctataaaatttcaaggaagtcatagctgataagcatgcttcacagtttgttttgcatgagggaaggcaagagtcacaggaaccatataatctgttaaagggcatcggtaggtttcagcatgagagtttttatgagggtatctgaactattttgtgccaaatttatgcctagttaaccagctatgaatgttgtatcctgttgactagatccttcacatgttgtgcaaagtatagaattaactaatcgcagctgcagtgactttgcttattttcttaactaaactttcttggtatggttcagatccaacatcattttttttttgttgggaattctttataggctgacagtccacttgatattttcctgaaatctcttggacttgagaagtactcgattaccttccaggcagaagaggtttgattatttccgtgaatgtgtaaatcattttgatgccctctttgatatttatttggttaatagttgtttgtgttgcaggttgacatggcagccctaagacacatgactgacagtgatcttaaagctttgggcattccgatggtacatgcattgcgcctgagatctttattctgttttctgattattaattcgctcgtcagttagataagttttgggggtccttgcttcatctctcatttagccatttaagaatagttgtaatcacccatcaccccaggtcttaagctaactttttgtataatcgtatgtggaatcaactatgaactagttcacttcactccatttttgtataatcgtatgtggaatcagctatgaactagttcacttcactccatataaattagaatacatgtactggtatcatttttgctgaggaactggactataacctttgactgtagtactgcatatgcatgtatattttgtttcaggatataggtggcaccaaactaatgtaagtaaagttgaacatcagcaagcctgcattctttcttatgcgcaagtgtaaatttgatttaagatggaaacttaaggtgggtgttctttcagggtccccggaagaagatcatgcttgccttggaatcgagagcgtagggagggctggcgtgtaatgtagaaaggctgggcgattaggaattgtatgctcctctgcttgcttggtaaacccaaagtgtccgcatgtcctggatacggcgcaagaacaaaagcgctgggcgtcttgtaatgcgtcttctgactagttgagcattccgcattctcagccagtttaggatgttttagaggctggatgaaggttgacaatgtaatattattagtctcctgttaatttttatctggtcggcttgcttgtcaggactcaggaccagctgattaatcaaattgttcatgcggtacacagtattggagctgtgccgatgttcttggggttgctttgctgctgtatacgattattattccattgttgtcttctctccatcggagggagggggatgacacatttcaaactacctgaattttggtttattattattatatacaaatttgcgatctcctgcgtcggtatcttgtctgttgacttgttctgtggtctttgttatctgatggattgctgcattctccacagttgtctcgttcaaaatttcaattttacttttatgatagtagtttcttattaaacctccccgatacttaacatggtgaattgttgcattctccgcagttttttggacagtttttttttttagcaatatgcaagattttcaagttgctgggagaattataccacgtctttgagcaagaagatctgtgatacaataatccaattccaaatagaacaaaaacactttgcttggagaaatctaccagggtctgtctcaaaaaccagaagaaatcataagtttcctacgatggactactagaggtagcagatgatgagctcagaatgagttcttttcagcaatttgaaacaactttcctcgttttcagttagcatgctttcggtaccattaaatggtactttataaaatgtatataaaagtttctttagaaaatcaaataaatttattgtttaagcttatagtagttaatgcttaattaatcacttgctaaaaatagttcttgttttcgtgtcggagattagctctgaggcccattctaaacatcaaattacccatttttcgttagcatgcttcctaaacttttttctaatggctataaattcaacttttaatcacacatgattaattacttattaattattactacctccgttttttaatagatgacgccgnngactttntctcacatgtttgaccattcgtcttatttaaaaaa

SEQ ID NO: 19525 - DNA, 11181 bp, Oryza sativa
atgtgagaaaaagtcaacggcgtcatctattaaaaaacggatggagtataaattttaaaaaatgggttcatttttctttaatttttaaagaaacttttttttagaaaatactaatttctttgctccggtttttatgccccttaacgattttgctaaacatctcccgcgtgatttttttcctggcatttgacgtttttttgccacatgatctttgcacaaggcatagaagcccacgaacagcccagcagcccatcatcatgcctaaccctgattgctaactccaaccccggtccactcactgccccacacgaccacgcccgcactcgttccccgttcacatcacatcgcacacacgccacgccgcttggatccgggtccgtggccagcactcgcaccgccacagcgcacgatgcatttgataaaaaataatgtgtaagtaaatatgtacttattattttctttaaaatataaaattacagttctatataactaaatttacatttgtaaattcagttgatttgacatgtaagtgcactgtaattttgataaaaataatgtgtaagtaaatatgtacttattattttctttaaaatataaaattacagtcctatagaactaaaattacatttgtaaatttagttgatttaacatgtaagtgcactgtaattttgataaaaataatgtgtaagtaaatatgtacttattattttctttaaatataaaattacagtcttatataactaaaattacatatgtaaatttagttgatatgactgtaagtaaatttgcattagttattttatttcaaatataaaattacagtcctatataactaaagggacaatttcgtttctgcccctactctgatgtctaatattaattttacccctactttttagagttttcgtttttacccttacttttttgaactgaacgcttgtttcgcccctactttggatggtgaagttaacggtgttaagtaattgataaaatgacatttataccctctcatgtatgctcattaattgtgtttttgtccccattttatgcgtgtagctttagaactttatttttttagtatatttcaaattacatgaagcacattgactaatatttaaagggaacagataattacattttacaaaatgttgtcaaaattttgtttaagttctatcaaaatgatgaaattttgtcaaaattccatcaaattcagaattttttcaaattgttatattagtcaatgtggtcatctaattttaaatatactctcaaaaataaagttccaaagctacatgtataaaatggggacaaaaacacaattaatgaacatacatgagagggtataaacattatttatcaattacttaacaccgttaacttcaccatccaaagtaggggcaaaacaaacattcagttcagaaaagtgagggtaaaaacgaaaactctaaaaattaggggtaaaatcaatgttagacattgaagtaggggtagaaacgaaattgccccataactaaaattacatatgtaaatttagttgatatgatatgtaagtgcactgtaattttgatagaagtattgtgtaagtaaatttgtattagctattttattttgtaatccgttggatgcaaatctaagggaagaaaaaaatctgggtcaaaaaatcacccgagtgatgaataggcggtcccgccgcttaaagcaagaacgaacgaagccgctgttgaacgggggcctttgttgggcctgaggcccagaagagcagagcccactcaccaacacgagaaaccctaaaagctagacagagcgtcttctccatccatccatccatatatataaccagcgccgcctccctttctctccacatctcaaacccccgatccaatccgctcctctcttcctgaatcatgatctgtatggagtccccccctagcttctgaatccgctggctgctttgcttttgattttcttcttgctgtttgattttggtttggtttggtttgatttgggttggtggtttgctcgctggtacagcggcggcgagcgcggagtaaccacggcgctcggcgccccttcctgaggccagccacattagttttagccgatcatctgaccgagcgtctcctcgatttctccccacggattcgctcttgtcaagatctggcacatccacaatcctcttcttctccaccaccatcaagtcaaccgaaatcttactactagcttccgcccgcggatttgatttggatggatttttttttctttttatttgtttttggggtctgcttctcgttcatcgtttgagctggtgatgtggtgccaaggatgagcaaatcaatctgttcctcggtcacctcccatacccagcgagatggaaggaggattccggcagccattctttgcagctacgggtgagctcggatttgaatctctctctctcttccctgtgctcacccatgccccggctgccacattatttattaccaactcgcacacatgctttcctttcccatttcgaaataaatctcaatctttcacctcaaatttgattctttttactacattttttttaggattttggcattcttcttgaggaagtaaaaacattattttggagaaaaaacatttttttgttttgcttttctttcactgccttgaattagtactgacgcgtgggacccatgtgtaagtcaggtggcagcgtggcacccctattgggatgagctggcacagttacacgcctgggagatcgatcaccaggtgccctttcgttacatgcgccgcggctcatctcaatcgtggcttgtgtacatcagggcttcacattttttatttctttctttctttctgcttgttcatcggtatcaggaatgctggaaaaaaacagttgatactgatgcctccttgagcagaaattttggggcaagttagagcagtgaacaatctttgaactccagattggacattgtttgtttgagcaaaactttggatggttccgatttggaagaagtggaattcatgcaattatttaaagatgcttggtattcatgcagcatggtgtaattgttccaatatgtttgctgttcgtttcatgagttgattgatgatgccccagtgaagataaagtttcggtccgaagatgatttggattgtctggttttagcttcaagccttcttgtcatctaactttgataattggatggcttgtggctaaaaccatcactgctaagaatcatcagtgatggccaataatagctatgagatctgaggggtaaaactgccacagtacaatatatgcgttctttggagttatgttttatttggagttgccccacgaagataaaaattgtgtttggataattggatttgcagttagttttatcttcaagccatcctcttgaatttttacggtgtgtgttgagccaaaacgctaaatttgagctgtttacctggcacggtttacacgcctgggagaggaacaaccagggttcgcgtattggacaattgttactgtgtggtaaccaatattctttgacctagttatttagactttttaacaaaatgtatatattctttaataaaagcaattgagagtctgcaaagagcagcagcgcatatataacggaaagggcgctcgtctgcatcatttaaatccatgcacagcagcaacaccatagaactgtggtgattctccatagaactctttgagcgccggattggacgcttctgtgtgttgcttacaaccaactccggttattttgtctatacacatcagcaagaaggcccctacaaggctacaacggattgagatcctgtgtagtcgttactacctctgcaactttagctgtggctgtacgttttggtcgttggatcaatgaagcgagatctgtttgcaaagcacctctgacattttaagaagactagtaaccatgcacgtgcaatgcacgaaaaggctaaaattaattcaatcaaatatattgctttgtaaatttacaaatagaatagcattaaacatcattcatttgaagctacgcagatagacaaaccatattctttaatcaattgtacaaaatgcgaatctagcttatacaatgtacctaaccaaattaggaaacccacttcgagtgcagattcagtaccaaatgtgcaaaatttcaagtacatgaccaattcatctagagaatgaacatccaatacccaactctaaagtataaaccatcagaagcaaatgctgagaaagaaaaagtgtagacaaagcttaaaccgtcaaaaatcagacaccatggtctctatggaccatgtgatcgtcaatgggggatgaccatcattgatgggtcaaggttgattccgccggcgcctaggatctgagcaggcattcagattatcacttgggagcttgatgcgtacatgggggacatggtcacagtgttccttctgtcctgccctgattcccttaaagcaaaagaaaccagcaaaatgacatgtatacagtccaaactgctatcgtcagaaaaagaattgagatccgaaaatttagaaatgattgcagcttcaatacagtaacatgaagatatctgaacctcatcaccaaagtttatcaaaaaaaacaaaaccctaattcatgtatggccctaatatcactgtaccagcaaaatggctagtggtttcactggagcacaagcaccttttgataaaatcacaatctatagatttggaaagatcgaaatgtatgatgcagctagagataaaaaatttcaccagaactgtataacaaaaggaacataagtaaaaccacaatctaagacaagcaaattaaacagacctcatccaccatccatttgaagagaggagatcaaggctatggctatggcaggtcccatcttaaagataactgccaaagcctgcactctctgaagtagagatatgtggtattctttccagaaaagagataaaaactgaactgaacacatgcactgtgaatttcaatggacagatagaggaccctttccaagtgaaattaataacaatattatagcccgcttgcataagattacctgaagccactctaaatatctttttcttgccaaatctgaaggcagaactctatgacttaatatatgacatgtttctcctgtgtgggcctaatgtaatgcatatgcctagtactgaatggaatggaatagatttaatagaaataatctatatatgaaagaaggtgctgattatggaagtgttgaatgcatgggaactgggagcaattgatcatcttactccagctaaattttaaaaaacataaatatatttatagatgaaagaggggaaaacatatatacaaggacaaaaactgaccagatcttcatgtagttgatatggttttatccaagggattagacaactgctgcttatgttgtgtgaactacacaaatcagctacctcttcttcaggaaagtatactcatacatcaactgcaacacatgcagtatctgcaatcgtgttaataaatgcatcaccgagaaaatcatatgcctgtaaaaagcaataaatggtcagcatagtcaaaaattcttatcaaggcaaaacactataacaaacatatagtgggcagactatttgtacatgttgacctacgcctccacaccatgccgcctcatatcaaaaaatgtattcatttgtacgacaattgcgcactacattttttggaacatcaataagatattaatattaccctcgttcaattcatatccatgcaaacaataaagaatctctgcatctctattttaacaaaatgattagctgcttgctcatcttgttcttgtaataaatagattatgaaataggatgaaattcatcatattctgtctgagagaggcaatagagaactgaggatatacaaaatgacatgaacatattaatgtagattgcagcactaaaacacactatatctaatgttatggctgtcaataaccacccaacatgtgccttatggaattggaagaaatgaaccaatttgagatcaaatcagtggtggaacaaaattagttgatcctaaacagttataggaacaaaactatatataaattattacttctagaagcaaccaaatatactttttgaaacagagtcatgccattttgccaaaaaagtgtgctttagtagcccttcaaaaatatttttttcacttgtccagtatgcatcatgttagctgaaaagtgttcattactaacattgaataatattgaaagcactattcaaaaaaggttaatcttttaagtgaggatggattatagttggactaaccatcttactttgtcattttgatacagtgtagtttaattgttgttgatctactgtgtcaaatatagtgcatgcgacatcatgtaaaaaatacagctttaccctctgagttgtcattcaggtaacttctcatatatttattctattaggatgactttcaactttacgtgatgcatcaacatataataattgttatcatgaagataaaacatggcagaatatgcattcagcagaacttacctagaagtatattatactggagaggtagatggcatgagggatgagtgttatccagctgggattgattcgcagccaccggggagagattggagaggcgatgcggcgtgcgatggtggtggaggtggtcgaaggggagagagcggaacggagatgcggagggaggcgtctgctttgaagctgctcaatcaatttatccctagacgattcagaggaaccaaaataatcaattgtaaactgaaatgagattaaaaaaaacagtgcacatggaaacacacaaacatatccaaggagtgtatgctgtagcagaaaaagacagatttataacaatggcatcaacatgtactgacaaacatccacatatgaaatgtattatccataatttcaaattacctcaatactgtatagatggaaccgcaagaaagcatgcattttttcccgtaagagacagatgaactattcagatatatagggaggatttaacactattagacagtgaaaccaaacaatgtccatcagctttaagttaggttggacaccataccaggtagaggtgcacgggagggggaaagcgggtggctcccgtcgatctggcggtggcgcaggtggagcggcggcgcaaccgacggctccctatgacagcgcaggtcgagcggctggcggctcccgtcgatccggcagctgcgcagccgatggaggaggtcgatcggtggttcccggcgatggcgcaggtggagcggccaatggatcccatcgatccggcggtggcgtaggttgagcaacagcgcagccgatggaggaggtcagagtgggtaaaatttcaggtcaacgtgtccctcatctgccaagcaaaagcataaaaacttgatgtataatataagcagtaaaactaaaacaaagatagaaagcaatatgaaccatgagtaggtgtagataacagagcaacctagtcagattttctatttgaatttggttcagataaatgcaaattataaataattaagggaggcagagctgaggcaagctttagctaacaggatatttctacttgattgcaacgtcagtatccctgcgaagaaatgctcagcatcgatagtgagctgtgcagcccagcatctcagaaatcagggtacattcaatttcatccaatggaaaattgcatcagttgttcggtatttacagccgaacctaagatttggaaataatagtctcaatctcctatgggaaaaatcagttactctatttgcttcaagtgactctagcatcggtctcactgaaatcaacaaggcacggattgttcaagcataataaaaccaaagctactgcaagaagatagattgaaactgaatgggagagacgatgaaatctagggtttgggcgacaaacacacacctcgagaacagacgaatcgaaagttgtcttctcgttctcaatcctgctcctgtgaggaaaaaaaattgaacacttgattaaaagaaagcaaggcaggaggcgcctcgcccactgcaacctgctcgggcggccgacggcaagatgacactacggcaagggcatccgcggcggcgcatgaggggaggagaggaatagattagggtttagggagggggttggcgatgcttgagagaggaataagatacctgggtggggcgtcggcggcggaggcggaggcggtggacagggaggaatgtttgtgacggcgaccacggtggcgccgatctggctgaggacagatgcgacgacggcggaggggtggtggcgtaggaggcggcggcgggaagcggcgggcgcataggaggcggcgatgggtggcgtaggaggcggctccggcgggagacggcggccacaggcggatccgaggcggcgacggggtagggtgagcggctccggcgggcgggcgtgcggcggcggcgccgacggaccaggcgcgtgattagcgttgcggaggacgcgtgcgaaggagaaggggaggcagttttttttgcgaaatggaagcagttttttttttggcgaaatttttttccgtgcgcgacgtggtctgtgcggtttctttgtccggatgacaggtgggtcccacgtgatagcggatctgcaggattgctggattgtggatgagctcgtactttttatattagtatagataaatcaggagagagaagagcagcggactactccctccgtccaaaaaaaaaggtaaaccctgggtttgcgtgtccaactttgactgcccgtcttatatgaaatttttttataattcgtatttttattgttgctagatgataaaacatgattaatactttgtgtgtgacttgtctttttaattttttttataattttttcaaataagacggatggttaaacattgggcacggaaaccagggtttgtctttttttgggacggagggagtacatatttgtagtcagctgtagcacagactctaagacgtagtgtgtctatgataggtgggactagtattaatagtatagtatgtaattattgtatgaatgaactattagattggctatagatgaattggagctattagttagctatactattgaacttgctctaagagccactgttttctttatttggggaataagagcaaggtcaatagtatagtccacggttggctccaaaaacatccacatcagcaatacaatggtttttcgcgcctaactttgatcattcgtcttatttaaaaaaaattaaaaaaattaaaaatataagtcacgagtaaagtattattcatggttttatcatctaataacaacaaaaatgctaattataaaaaaattcaaataagacggacgatcaaagttaggcgcggaaacttgtgactgcacttattttgggacggaggtagtattatttttcaatattttaatctaactttttctgctgctcacgataaattagtcgcccactttcactctctctccactaatttcttctccagatcattacttttgccaccgtgtacagattatcgcccacttaaaagacctattttacctgctctaagcgaaatggcatatttgcaaatgaaaaatatttcgcgaataaaacttgtatatatgtgtttttagcgatctaaaaataaagaggttgaaaaataaattttgataaaagaagatcccaaaattaactttaaatttaaggttgaaaaatttaaattttggcagataagtataagagcaggcacaatagcatactataagctagctataaacacatgtcgaggagataaaatatgagagaggagacagctgcagcacagactccaagacacaatgtgtgtatgatagataagaccatatattaataatgcaatatatgtttataggtaactgactattaaattaactatatatgatttggagacggtagttggctatactattaaatttgctcaagggaaaagatgagaatataatagtgtggcgtcatggcctgtaacgtctgggcggggcggtctcgcgtggaggggccgtgacagactttgatctttgcggtctctggggacgtggaacgggccggcgtgacacggttgatgatgctcgaggggctaagagcaggaacagactattagccagctataaacatattttaatgagataaacgatgagagagaagagcaacgggctatagatttgtagccagctgcagcacggactccaagacgcaatgtgtgtatgacaggcgggaccatatattaatagtatagtaagcaactattgtataaattggctattagattggctatagataaattggagctagtagtgggctatactattgaacttgctctaatggtgttggagctgatgggcgatgaccggacgtggctcatctcaaaggtgttcgttgtgcgcttgtgctcgtcggcatggactgcagcgtcgtggaggtccgtgcgtggacgcatcgtgattgcctcgagtgcctcgtcttcctccgtgacgaggaggcggacaccgagaggatggcaggcggacctcttaacgcggtcgcatgcgaaaattgatcttcgtatgcatgcgtagtaggaggctcgcttgcgaagatatatcttcgcgcgtggtttggtccgtttgctcgcgaaaatggttatcttcacatacacctgggggcagatggcccagccaaccgcacgcgaaagctcttttcggccgtctgggaaaaccctttctgtagtagtgatgcatcaaggtctacctcaacaacctcctctgtggcgactacaacggcgccgtggccattgtccccgctgccaccgtcgcatacgctgagcactgcctccactagctcatatcggctgacggctaccaagaagagcgcgcggtggtgtccccgaaccctctcgtgtccgtacagagctagatgaagcgtggctacttgtggacggtctcacggtggggagcgtgacaccaccgcccatctcgctggcccactgcgcgacaccgccaccgatctcacgtgtctacgcagcgaaatcgctgccctatcatgccagtgtggagtgaggctgtgttgcgttgccatccccgagaccatgggaccactgttctccacctcccgctccaaactccttcgcgctactgaagcgtgagaccgcggaccatgtttgccacttcgtgagactagcgcacgag

SEQ ID NO: 19526 - DNA, 12062 bp, Oryza sativa
aatttcatatggtatatttctaagaaaaaaataagataaacaatattttcccttttttattcaaggagaagccaaattacactcgatacccattgtcctcatagttacagcgtagtgttgttgcccctcctctatatttaaaaggtagaataggttacatggtttgactctagctctactgtcatataccataaataaaactctaagtccacttgtaacaaaatatagaactcatgtatttgatattttttaaaacaaacttcagcttagcgaatataccatcacgcctactcttatctttatagctgggtttaaaaccaaatctagtatcttatctcgaaaagtacttgatacaaggtttaggttgttttggactaatggattgggaacctatacccagctcgcaaatggagcaatagattagcggacgatttattaattaagtactcccttcgtttcagattataagatgactttaacttcaaattgctttaagtttgaccatgtttatagaaaaaaaatagtgatgtttttgacccaagataaatttattataaaaatttatttaattattagtttactaaaactaatttggtaatataaatattactccctccgtttcatgtaagtcattttaacatttcctatattcatattaatgttaataaatatagacatatatgaatatggtaaatgctagaattacttacattgtgaaacggaggaagtactatagttatctataaacttagttaaacttgaagcagttttaattttgaccagtcaaaacatcttataaccggaaacagatggagtattagctaaatacttttaaaatggattagtacgattttttaaagcaattttcctatattttttttaataaaaacacaccgtttaacgttcaagaagaatgcgcgtatgtgaaaaataaggaaggagaagttaggaacatgcatatacgaactcgggcttactagaagatttatcataatggccacatcatttctactgagttatagagctcaacgtaatgcagatgctgatatcccttttttaaagtctatatcagcaagctagttcccaaaccggtcagcattggagtgaatagtttggaggcctttgactgatgttcaagaagaatgcttcctaagctacgtttacaatgttgtcctgagatttttggcttaaaaagattgtgccggtgaaacactatttctttttagactttgcttccgttaagagagtagtagtgtagtaccaccaccaccaatttccgatgtttgtaaccttgccttctttttccatttggttatgcgtacccacacaactttggtttctgtttgtcattgttcttgagctatactggtaggtacaataggttcgtatgaagtaaagattgtttagtactcctacgtgaaccagttctattaaagtctatttggcacaacttcatattcgagatttcttggagctaagtattcctagctttacaaatctatgtatccggatatatgattatgttgataatattcgaatgaatcagtttgtttttttacttttaaagaaatataaaattttaaatcaatctaatttaatttattaggtaaggacccgcttggtagagttttaacttctaaatttaattacaggagttagatatatagagtgaagttgtgaagctatctaaacttgtacatttatatagtttactttgtaagaacgctctacctatatatctgttgaaaatataaataaagttacaaagttctgtcgtcatatcattttctatatatctgttgaaaatataaataaagttacgaagttctatcgtcatatcatttccttcaagagaagacgttgaaaattttggggagaatattccaaaattcaataattaccaaagagcatcgaatatggtaaatattatctcaaataatccaaaccagcatgaatgcagaaggcaacaagtcacaatatgctcaaggtaaaatccaagttctcaggaataaatagagcgtccgtgatcaaaagaagacatttaactctctgaagaacccgtgatgccacaatatgataaaaataagagtgaaaattgagctccctctccagcttctataaaagggaaagctggcaaagccagaatgacacagagaggcagcaaccctcactccctcagccagagtcccagaagccactctctagctcgtaatctgttaagagtccaccttgctagtatattggagaaatgattgtaatataatttgtgtaaggtaagcaaactttgtttatatcatccctaggggtttccgaaagggaaaaccatatgtatgttattttgtggtaatgtagtagttttattaagttttctttgctaagcccttgttctatttatgtgagtttacataaaaataacctgtagggtccttaccgtagaactaagctactacattaccacaaaatagcatacataaggttttctctttcaagaacccgagagatggtataaacaaagtttgcttaccttacataaattatattacaatcctagctccaatatactagcaaggcgggctcttaaattactactactagagctagagagtgacttctgggactctatcagagggctgctccacttcgtgtccttctggcttcgccagcttctccttttatagatgccagagagagagagagagcgcgcgcgcgctcaatcttcactctatagttatatgtcttcttttgatcacggggcgctctgtttcttcccgataacttggattttaccttgagcatattgtgacttgttgccttctgcattcatgctggtttggactatttgagacaatatttaccatattcgatgctttttggtaattattgaattttggaatattcttcccaaattttttaacgtcttctcttgaaggaaatgatatgacgacagaccttcgtaaccttatttatattttcaacagatatgtggtagcttcacaaatctacgtatatggatatataattatattgataatatttgaatgaatcattttgctctttactacttttaaaagaaatataaaattttaaatgactctaatttaacttattaggtttaaagacctgtttggtagagcttcaactcctaaatttattatagaagttgagtcaagagtgaagttgtgaaacaacttaaatctagctcaaactctatagtttgttttgtaagaacgttccacctattttcaatcttattttaggtggaggttaaattatttggctgaactccaactctagaagaggtggagttgaaggttaaccactgccagacctctaaatcaatgtgcatctgaaatagcagaacctgtaaacaggttccaaaaggaggtccgtaaacatggttaacgtccgcgcagcccaatattaattgatccggaacgggattcgcatttgcattacgtgtaagttgggccgggcttggtcaggatgaccgatacgggcctagatgggcctgctgctgctgctgcctgctccccactccgctgcctctgcggcgggcggcggtcctcctcctccgcgccggcgtccaccgcccggccgccggcaggccagtcccccgtccgtctcctccattgaaaaccggaacccaggttggaaggagagagagagagagagagagagccagcaggcaagaggaagttgcccggaaattttcggtaagctctgctctccgctccctttctgcccatgccctcttcctgttcgtgcttatgtctgcttgaatttagtagtgctataattatactgtactagtgtactggttctaataaacctttggagagagttcctcttgctcactgatgcttactagtcagtctagtccatagatttgctaggaagctcccaagaaagaagggagccggatcggtaaagaatgcagtattcgcttggatctacccgtttaattaggtagtctattccatcactataagcccactaagtggggcttgtcacgacctcacgacacatcacaccactcagttcttggtcaatgatcggcaaaacagaagaaatttcatcctggagtcgctttcgtcggttgggctagtgttgactccagagaaaaaatacaattcatgcccagattactactccaattccagtccagctccttatctttcgttttattgctgaattgccagctacaagatttcctagcagctacttcaatacttttgctaacccccgttctcaattctcaccgtctctcctaccatggccttggctttcgccggcaaatcggtggctgtgtcggccatctccatgattgtccgcaagtctttcgattaccttgagaagtatgcgaaggcggaggggatgaagtcggtgcaggagcggcttgagaggactctcccacaagtccaagttgtctttgatgcaattgatatggagaggataagggatcagagcgaggcgcttgatgcctggctttggcagctcagggatgccgtcgaggaggcagaggatgtgctcgatgaggtggagtactacaagcttgagaaaaaggtgaaaactagaggtaacaaggtgagcagctctctgtacaagtgcaagagggtggttgttcagcaattcaatagtacttttaaggctggaacttttaagagattgttggatgccatcagaaaacttgatgaaattgttgttggtgtggagcgttttgttctactcgtggaccggctggattcttgtacttcaaggcacgtatgtcatcaggaggttagtaatcctcgtgagactagctccttcagtgttgatgaaattgtaattggccgtgatactgagagggttaagattgttgaatggctgattgaacaagacaacgttcatgaccatgatgtttgtgctgtaaatgctttttctatagttggcataggtggcatgggcaagaccacgctagcacaggcaatctacaatgatcaaagagtgaagcagtgctttgatcaggctatgtggatttgtgtgtccaatgactttgatgtccctgctctgatgaaaaagattatacaagaaatcactagagaaggtactaatgttactaatttcaatacacttcaagaaatcgtcagagagaatctgaaatccaagaagttccttcttgtatttgatgatgtatggaatgatgagagaaggcctgactgggagaaactagtagctcctctgaaatttggtcaaaagggaagcaaaatcttattgacaacccggatggaatcagtggtagatattgttgaaagggtactaggaggaagaaccaagtctctacgattggagggactgcatgacaaagatcttttagcaatttttaacaggcatgcttttttcgaagtaaatcctgatgattatttcaacctacaggagataggcaagaaaattactaggaaattgagtggatgcccattagcagcaaagatcatgggtgggctgttgaacaactctctggatagcatatactggaacagaatgcttagagaaaatatctctaatattgagcataatagtgaaggcattatgaaaattttaagattaagttatcatcatctggccccacatctacaggcttgcttcagatattgtggcatgttccgagaagattactggtttcgaaaggatgagctgattaacttttggatgggttcaggactaattcagctatctgcaaatgaaaaccagaggccagaggatataggagagttttatttgggtatactaacaaagaagtctttctttgaactgcagttaaacaaatccactaatttgtatgaaggctatggtgagtgtactaatgaacactatgttatgcatgatttattgcatgaacttgcacgtacggtttccagaaaggagtgcatgaggatttctagtgatgaatatggcagtattccgagaacagttcggcatgcagcaattagcatagtaaatcatgtagtgatcacagatttctcttcgcttaagaacttgcggaccctcctcatatcatttgacaaaacaatacatgaaagggatcaatggattgtactgaaaaaaatgctgaagtcagcaacaaaactgcgtgttgtgcacatacagaattcgtcgcttttcaagctgcctgacaaatttggtaatttaatgcaccttcgctatctgtatcactcggaatcgcagaagaaagtggggaaatattccttttggtgtccatgttctatatacaaattatatcatcttcaaatgatacagttgaatagatgtctgttggtatcctggcgattgggaaatctaattagtctgagacatatatacttttctggtactatatatggattctccccttacattgggcatttgacttcccttcaagacctacatgaagttaatgtcccacctaagtgtggtttcatagcaagcgagctcatggatctgaaagatctccgctatttgtgtatccgttgtcttgagaatgtcaatgcagacgaagctactttggctaagctgggtgaaaaggaaaatctcattatgttgtcactcacttggaaaaacagccaacaggaatcagacacagaggaacgagtactgaataaccttcaacctcacatgaacctcaccaagttaaagatcaaaggatataacggttccagatctccatgttggttgggaaacaccactatcatcaatttgacatatctctatatctctaattgcagttactggcagcatcttccacctctaggcgaacttccttccctgaaatatctgtacttaatctgcttgaactcagtgaaaagaatagatagttccttctacgggtgtgagcgaccttttggcttcccatctcttgagtatctatttattgaacatcttccagcactagaagagtgggttgaaatggaaggcgagcatctgtttccccggcttaaggcactagtcgtcagacactgcaaagaattgagaaatgtaccaacactaccatccactgttaattatcttgaaatggatagtgttggtttgactactcttcatgaaccctatgtgcctaatgaaaatgcagaaccccaaaagccatcactctccaggctgaagatctgtcactgcccatacctggaaacacttgagcaacttaaccagtttctttctctggaggaactacatattgaacattgtgaaaatcttgttcaattgccgatggatcacttacagatgctctcctttctaaaacacatgacagtgttgggatgcccaaagttaatggtccctccggcaaccatcaggttgccgttgccaacgaaaaaacttcatgttgggtcatgtggtacttatgagacttgtctggttaactcattgtgtggtcttacttctcttactactttgatgctatatggttgtgatatagcagcacttccacctgttgaagtgtgcaagagtttgatagcgctaagttgtttggaaatcgtaagctgccacgaacttgcggatttaaatggcatggaagagctaacatccctcacagagttgaaggtgattgggtgcaacaagcttgaagagcttcctgtcgtttcatctcagcggtttcaagcctctgaacacaaccaagttgtcactgcctgtacttcataccttaggaaacttaagagactgcaaattagcgatccatttgtcttgcaatgggccccactgagaagcgtcacctcagttacaaatatgaccatcaacagctgtagatgcttacctgaggagtggttgatgcaaaactgcaataatcttcaacgcattggagtgagggatgcttcccatctggaatttctgccctcaatcatggcaagcctcacctcccttgaatccttagagtttacaagagttatgttaatccagtcacttccagaacttccttcctccttgcggaggcttcaaatccttggttgtaacccggtattaatgcggcgatgtcgaaagagtagaggtcgtgattggcacaagattgcgcatatcccagatctgcggattgtagaagatataccatcgtcatattcatggaattcatacttgtaatttttctatatgcaagtcgtcccttctttttcctgagctggttcctgttttgtaggctaagctgatgtctttaaagtttaaccctaacttatttgccccttggtgtattttgacacatttgtaacatttaaggcattttcactgacgcctcctatttgatttgcatctagcaatatggaacagagtgttctgattatttccgtgggtttcgactatcctaccattttccttttgtgtttttgctgaagttttcttgggtatcggttaattcttcgttcttacagtcctgattgcctgaacaactcacagaaagtatgatgttgatgactacctgatggttttctgtgatcaaagctaatgattgatagccaccacttatagttaggtctttaaataattagattccttaaagctgtcaccaggaacttcggatctgcttttctggggatcaaaggaatcatgtctgaattccaatcagaggccagtcacctgatcgatcaagttcacttcttgtatacataggtttttggcattgggagtgctttgaattctacttccatgctctactgttgcttatgcttagatcactgtattcgattgtctaaatgcaacttgcatgaccggtatcgatcaatccttaattaaacttcctgtgacaaaacaaagccccagagcatcagaggttcttgctaattaatctgctaggggttcaagaaccggaaactaaatatgtactcgtggtttttcgttgataaatcatgagtgccgtcatcaaagtacaaggtgagagtcaaagtgggggtgttgttgacatttcggtttatttagatgaatttacatggtacaaactagaaaatgtgtttcttttgagactagaataatatcccagcctctacacctggagatacacatggaaatcaatacttaagttttacaaggctttcatgctgagcagaataataaaagaaatgtaaagcaatatttttgtagcatttgatgaattaataaatttaagcctgtgcacaacctaccatttgacccagttctttttgtctttattaaatgtatgaatggttgatagattatcagtttttctttttcctaatatatgaggatacaataggacgacgaacacagcttacgaggtttggagtgttcaatgcttctcatctggtgtttctaccctcaatcatggcaagcttcacctccctagaatccttacaatttgcagaagccatgttaattcagtcacttccagaattgccatcttccttacgggctctacagatctttggttgtcaggagagcaaaggccatgactggcacaagattgcacatttcccagatctgcggattgagcaagattctgcatcacagtgttcatatacatgggttaagggcccctttgatttgtaggaaaagtgttggaaatttgaaggattttaatcctatggaaaaaattcctatgataacctttgaaacaaaggattgaatcctatactatcctttaaaattcctatggaatgactaatcctatagagattttggagaaaagttagcaagagttccaacctcttggaaaaattcctttgagtctatctctctcatccgattcctgcgttttttcctgtggtccaatcaaacggtcaatcctgtgtttttcctgtattttccaatcctctgtttttgcactgcattcctgtaagaatcctatgtttttcctattctttcgtttttccattcctacgattcaaagggccctaatagttctattttttttccccttcgatcatgatgctgtaaaaccctgtcctgaatgtaagtcctcccttctttttatttagttcattactgtacacagctatttagcacaaaacattattgaacagatcaagcattctggttattcacttagtttttttttgaacgactcgcacgagacggtgcgaagttctattgatagagcaagaaaaaaatacaagattacaaccctggagggtcgtaaccaggaaaaaggaaaaaatataccaccacccacgcaccgacagcgccaacacacaagaccgggagaaggctaacaccagactggccgctgctaagcgtgaccgactgctgctagaccaacaaaggaacacagacgagatcgcccaaaaaaatcactctcacaaccaacacaaagccaactcttagagcgtgcttgcaccaatccatcgagaggcttcggctaggggatgccaaaacgatgtcttcaagaagagaagcgacggtaaaccgccgccgccgtccgtcggggctcacaggagccaggattgggctttcgcccgacaaccacccttgagggatgagacagcacgacaacgccctcaagagggagaattaaccatcgttgtcggcccggccatggccgggctgagttttcacccgctgctcaccacctgcgaatccacggctgatgcaccaatgctcccaccacccctcaacctctgccgacatgtgggacccctgcaccggcgccccccgccggccagccttcgagcgccgaagaccgcaccacatccaccaacagctcctcctcgtaccgaggtcgcctcctccaccgccggcagcgcctctcgcgccaagccggcctcctccaccggatgcgcctctcgtaccaatccggcctccctccatcggccacgcctctcgcgccaagccggcctccatctccgctgtccgcgcctctcgcgccgagccggcctccgctgccatcggctacgcctctctacgccaagccggtctccgacccatcctccaaacgctgccgcgccggccagatgcagccgtctcctacgccctcggctagccgtccgaggccgccatgcatcttcccaccttaaccacggtggtcaccaccgtgcctcctcccaccacagccacggtcgccaccatgcctccacattcacggccgccgcaagccgaccgccgtcgccgctgctgaccttatcattcctgaactgctctcataaatttttttcccctcccataaccagataaaaacccatcgagatgacttctgaccgctgtaggtcatgcaagtgaagttgctgctgcttcaactcatcatcaattcatcaccaccaagaggaacttggatggatgcttctcgggggtgtaagggcattattcagggaagtccatggtttctagcgaagagactcctctaacgcactgtcctctgatatgcggcacgctagtcatgagcacatatgtcagccacttaaagttagagagcagtaagttagaggatctatttctggttgctagagccttttaatgctggtacttcagggcccaactcttgaggatgggttatggatttattcagtgaggattgcagttttattccacaacatcaaatcctatatccctgcaaagacacaagttggggaagcgctctctcaacaagtcagcagcagatgagatgcctgtatttatagtgaattgatcgtcttatccgtggcgcatcaccagatgatatttctactctctccgttttaaaatatagcggcataataataggtagctatattttaggacggatgaagtagctatttcacgcttctgtcgttcacaagccgatatgtcatactactaccacttcatgtctgatcagtggtcacaaggctcagactctcggagtcctgatcagatgcagttatatttttattttcagaaattgacactggataagcattttgtatgtatactctacttctttactctccttcagctcatgcttagttttattgtaccgagtgggcgcaacctgcatgatcactgtcaaatgtggatctccctgtaccaagagcccaagaccacagatcatgtttatttaccaaatcatcaaagctgatgttcctgttacatgtacctttagtaaatcgtgtatactccctccgcttcatattttaagattttctaacattgtccacattcatata
